United States Patent Application Publication US 2014/0230087 A1 - sequence listing, part 14

SEQ ID NO: 10752 - DNA, 3420 bp, Vitis vinifera
  Intron number 1 from transcript GSVIVT01034406001 (locus G SVIVG01034406001) derived from phytozome v7.0 (chr-ID chr1 0; pos 16790203 to 16793622 reverse strand)
acttcgaagttgttggaagtcttgtaaatctacaattttttgttcgatgacttgaaccttgatcttaatgcacttttagtgggaatggatgaagagagagtggaagctatgattctttctctttgaaggtggaatataactctagaagaagttatggaaactttaaccccaagatcgatgtgtgttaagatctctcaagtcaatgatcgataccgcaactttcaaccataatgatagggaaaataacaaagacaatatgagggtagttgtgaaaagactttcaaaacgataagaacggggatgggaggagttaaaaaatgaagccatgcttatagccaagctccaacataagaatcttgttagacttttgggttgttgcattgaactagatgagaagatactggtttatgagtatatggctaataaaagtttagatttcttccttttggtttgtacttctcaacatatctaaacttttgtttatcctatgctcaataaaaagcttttttcattcattgttgttggcctcttatttactgacactagtttgtatttatttggtgtaaaattgggatggatcctacaagacatgggattttggactgggaaacacacattcacataattgaaggggttgctcagggatttctttatctccatcagtactccagattgagggttattcattgagatttgaaggctagcaacattcttttggatatggacatgaacccaaaatatcagattttggattggcaagaatttttggagaaaattagttgatagcaacaaataatataattgagacttggtaagtgaatccttgcaaagtgtaaaatatgtgaattctcacacaacatggcctttcttttttttttttatatatatatatacatttttgttacaaagcaaccactaaataatttgttctaataatgaaatttagtggctagctacatgtcccttgaatatgctttggaaggcctattttcaactaaatcagatgtctttagcttcagggtcttgttacgggagattctaagaggcaaaaagaatactacattttaccaaagtgactcactcagtcttcttagatatgtgagtaacacaatctacaatgttctaatatactaattcttgatttactagtcaattttaagttgaagttctttgcatgcaataaaaaggactatacatctgtttttcttctttggaaatttgcatcaaaagaacattttctttcctttaggcatgggatatgtggaaaaacaacatagggctggacttgatggatccagtattgaattggaaggcatgggttcacatcattcaaggggtggctcagggacttctttatctccattagtactctagattgagaattattcatcgagatttgaagactatcaacattcttctggataagaacatgaacaaaacatatggttgtgacttagtaagtgaatcctaacacattgtaaacaattcaaaacatgttaaaacattatcatactgatttttatctggaatttaaatttttaaaattttgtacaaaatgatttgcacttatagctttttaaataagaaaactattttatattttaaaaataaaataatgcaattgcggcatgtgaagaaatttttatttttatggataaatatattttaaaaattttatatcaattttttttttatttatatctattttttttaatgtttttaaataaattaatattgatataaaaagttgttaccacattttaataaaattttagaaattaaatatcaaataaaatattttatataaattaatttaattttttatttaaaatataataaaacatttttgaataaaagcattttagatttagtaaagataaaaaagaaaatggaaacaaatcatgactcatatgcatctgatggtccaaattgaagctggatgtgatccaacggtcaaagttcaactccaacggctatgtgataatttgtacaaattattgatatttaatgaaatcaagtctttcatgaacttgataatgagtgtacaattacaaaattcatattttttatcaacccacataatataattacatctaatatcgcatatcatataatatatatatatatatatcaaattcttcaacaaaacaaatttaaattgtttattatacttctaattacattgttatgaggtttttcttacattttcatgagttttgatcaattttttgtctacaaaaatttttttccaaaatatccgtcgatatttatccgatatatccataaaatcaagttaccgatatatccgtgattatcgatattttcatccttgaggacgtaatgagagggtattgaaaaccagtaacatccaaaagagctctttcctgccaaagagtttatgatatcttctatgtcagctaggatcatgaatctaaagaaagagaactaccttgctatatgtatctatatatatatatatatatatatatatatatatatatatatatatatatatatatatatgttttttctttttttttgtttaccaaaattgaagatgaatgttgaagatcacatccaatggcccaagatattcttctgtacctacctcacagtaccctataattttcctgaaagatatattggaaaggagatcggtggaaaggagactttgaccgagtcgccggacctcagatatgctactgcctgtttaggatggctataagtttatcggcgggctgcttaaacgctgcttatgagttatggctagcatgaaattttcaaccagttggtggtctgttattcttgttttcttgcttatttcttcaggttttcacttggaatttgctgatgcatttacagatacaatctcacaaggtcaatcaatcacaacctctcagaccatcatatctgcgggtggtgaatttgaattaggattcttttctcctggaaactccacaaaatactatgtggggatatggtacaagaaagtatcagagccaaccattgtgtgggtagctaaccgagattattcattcacagatccgtctgtggttcttactgtcaggacagatggtaacctcgaggtttgggaggggaaaatttcatacagggtgacaagcatatcatcaaacagcaaaactagtgccaccctgttggattctggcaatcttgttttgagaaataacaactcgagtatcttatggcagagctttgactatccatcggacactttcttgccggggatgaaacttggatacgacaaaagggctggaaaaacatggtcattagtgtcatggaagagcacagaagatcccagtccaggagttttctccatgaagtacgaccctaagggaagcggccagatttttatcttgcaagggtccacaatgtactgggctagtggcacctgggacaggg

SEQ ID NO: 10753 - DNA, 5838 bp, Vitis vinifera
  Intron number 1 from transcript GSVIVT01014072001 (locus G SVIVG01014072001) derived from phytozome v7.0 (chr-ID chr1 9; pos 114874 to 120711)
actccactccatttcctgctacaataatcggacaggtcttaaactaccccgtttcttgttttcttggttgcttttctattttcctgtcaatttcattgttgtgtacgatgcccgtttatccccttcttttttggtgttcttgaggttttggtgtgcttgtcgtgggtgttctgggtatggttgttggatcttcttttgtgggttggttgtggaaactgggacaagtttcagtttttttaaggttccacagtgtgtctgaagttcactgagtctgtaattatctttgttaatcaattgaagcaaaatacccatttgtcaaatttgttgttttctgtttgtgtggttattatatgctgtttgttgatatttttctgcggattgggggtaaaaatatagcataagtttcaagttttttgggtgccaaaaagtgtgaagtcaattgcaatatgtaatctctataccattggttggaaaggtgtcaaattctcatttatgtgtttttataatttgatttatcatttgcaatattaaatcatatacggtaaataatccccattgttatctctctgtttctctgtttatctcattaatgatatatatatatatatatatatatatatatatatatatatatatatatatatattggatagatttctctcattttaatgaaattatttgtcatttggaatgcttttgtgatgttttttcattatcagtttgtaagatgattgggggttttgcatttagtaggtactaggtgcatctaaaatctgtggcatttgcggttggtaagaacagaagttatctataataagatcatctctctgcagtccattttcaacctctaattacctccttttcatcctcattgtggtcttcaattgttctctcttctatctcctcctcattggctgcatcaaacatctttttttgtatcagcattgcccaatgtaccatagaggtgatatgcagataatggttgctgtaaaaattgggtcccctagcaacactcctctagcatttgctttatcacctccatttttgtatatctagttggccctgataagagatgcatttgttcaattggggtctttcagtggtgattgaaagattaatgggtcagctttgatgatgggaagtcaagttgaatcagttgtttaacttttttcttgtggtcagcggtttatatttctaaagttttgctagaccaactttttttttttgataagttttgcttgaccaacttattatttctagtcttacaaaccgagcttgtgtgtatagctctattaatgttttccttgatggattaataggttttaagctgagaatttttttctaataattattaatgcatttttatataaattgttaatattatgcaaacaattgtaaatattggaactgtaaattattaattgaatggctcatgtcctctctatcttgcatgcacttgccaccatccactttgatgtcagagcttggtcattatcttcttcagacctattttcagtaaaatctctctttagccctatccaacctttcaaatcttgctcatttctttccagtaaaattcatttggaaatctaaagccccatctaagatcaaggcctttgcttgactagtggtcaacaagaaggctaatatcaatgacttgctacaagtgagaagtccttacaaagcctttagttttgattgttgcactatgtgtgcggagagtagggaattggttgaccatcttttcttacattgccctatgactttagggctatagcataggcttttcaaactagctagactcgattaggttcctcctagaagcacaagtgatttaatgactatcttttaaggatttaggtagtacaactagaggcaaaatttagtggcaaattgcttacctcactttgatttggatagaatggaaggaaagaaatgcaaagatttatgaggatatatagagaactacaaaatccatttggggcctttgcatggcttttgacaaatgagaaggtcaatattaatgacttgctctgatggaaaagaccatacacaatgcttagcccaaaatggtgtgttatgtgcaagcagaatggtgagtttatggtattatggtataaccttttttgacttgcaggagttgattgggtttccacctagaaagatggaggagatattgattataacatttagaggttttgagagactttttcaaggcaagacactttgatgcattgctagactatctttgatttggaccatttggcaggaaaggaacacaagaatttttgtttgtttgtcacaagtttgagtcgagtaaggataggtggacttcagaagcgcattgggacttattttacttctcttcttcattgtaggcttctactagtgaattgcaagcatttatttgagccttattttgctagattggaaccttgtttgtagaaccacgagatcgacaaaggattaaccttgtgaatggctaccactattagtaggttttatcaagctaaattttgatggatgtttatttggcaaccctgggcaatttgggattggagggttgattagagttcattttggtagagtgttaaagagcattatctaaacctacaagctaaggtttagccattgagacaaagattctagcccttctggaagggttgttactagcaaaaacttagggtttttccaattttctagtaaaaggtgattttgatgttgtcatattgtgaacgaataagaaagaaagaagactacggaagtttgattggtggttgttctagactattgacatttcttcatatatgggatgctcattctcatggactccttgcttaggcaatgacatgacaaatgcgttagctgatccttctttgtgtagaggattaggtacttcttggaaggattgcttgtccttctttggacataatacttcatcacactgaaatcattgttttcttataaaaaaaaaaaatgaaaaaaaaaaatgtgggacctaatttatttttcttcttcttgtttggcctttacaactacaacttgcgagggaactcctttcaatgtcattaagctcaattggaatattgtgtctgaatcataagggttaaaatagtaaagctaggagcaaagctccgatctatagagagtagagtcgccttcttatgtatgtttcttttggcaatatattaaggtataggtcttgttttgtactttggggaattcatccacttgctttgtttatctagggttttgtatcttaaggggggattcctggtccttcacattactttcaatttcttatcaatgactggttgtttcttgtaaaaaagaaactgtaaatagtggaactgttttttgttttttccctactctttatatagtgaaccttagtgactaaatctattggatatgaaaaataacagaataatctgaataacaaatagctttgaagatccaaatcatgtatataaaggctactcttctcatcatagctttcttcatttatccatgattagttgttgacagcaattgaatgggttagcattttaatggattctgaaataaaggctataccttttttttttttgatcagaaacgaagaaaaatatattaaaagaagaaaagatataagagaaggaagagatacaagagaaggagaagaaacaagagaaggatgagagatctttcccacaaaaacaaaaactgaataaaagagaaaacacccaactttagaaaactaaatacaaagaaaaaccccaacactctcaaacttttgaaacgcaaaccgcagtccagttgagttgtaaaacactaagaggaactccgttaaaagctgcagtacaagaggcccaaagagaggaatagaaaagaagcaagtcccataacatctcttccgttctccccttatcctcaaaaatcctattgtttctctcttgcctcaccatccataacaaagtgaggcaagcgatttgccaaagtgtcttgcctcttaatgaattccccaaacctttaaaagcaataaccatcgtgtccacaatactccttggagggacccaagccaaccctgctagattgaacagcttgtgctagagtccaatggtagcaggacaatgaagaaaaaggtggtcgatcgattctccatttcctttgcaaagaatgcaccattgaggacagagggatttgtagggtcttctcaattacaacttgtcattggtgtttaccttcccatgtactactaaccaagtgagggccttaacctttgagggagcttttgaactccacaaaaacttggccggaaggaacaagataggatttgagacttttgataaggccaagaaaaaagatttcactgaaaacaagcctgatgatgaaaaagaccaaactcttgaatctgccaaagaaagtgagaaaagcattgaactaagggaggatatgattttctgaaggagatcaatttctgtatcagtaagattacgacgaaaattaaaattccaagacagtagaaagaaattgccaaggatatttgagatagtggggtttttcacagaaataactctataaagaccagcaaattgagagcacaaagtttggttaccccaccaaagatcttcccaaaaacggattctctccccattccccaccactaggcgaacgaaaggggagaaatcctggaaaacttgagcaatagccttccaaggacatctgtgtgaccatctaaccaccatcttggcgtcccatccattaggatgtgtcccataaatacttgtaataaccttatgccaaagaccattcctttttctagggaaccttcaaaaccatttccctaagagagcaatatttctcaaagaaatcttcccgaaacccaaacctcccaacttctttggcctacaaacaacatcccatctgataagatgatctttcttcccttcccccgccctagaccaaagaaaatccctttacagcttctcaatctttgaggctattgatattggaattttgaagaggaagaggaagtagctagggatgtgagacaaacttgactgaattaaagtaatactccctcccaaagacaaaaatgcttttttctaaccatccaacctcctcgatattctctcaaccatcgggtcccaaaagcctattgtctttgggttccctcccaatggaagacctaaataagacaaaagccactctgacactctgcaataaaaaactgaggttaaactagacaacaactcttgccttgtattaatacctgaaatgatgcttttttctaagttgatttttaatcccgatacttgcccaaaaaccaaaaggataagcttaaggttttgaagatgttccaaagaggctttagagaaaaagatggtgtcatttgcaaactgtagcaaagacactctagtcttgtcccttcccacaagaagccctcagttagcccagtttcctctgctctgatcatcaacctacttagaacatttgctactaaagttaaaaggaaaggagaaagggggtctccttgtctcaaacctctaaaggctatactctcttggtctcccgcttcctctcccttccttctctctctctctctctctctctctctttgtttgagggatgattgatgcactttttattttcgtaacactcgggtgtatttcacaccaaggatattttctttcattcttgactaagattggtgcatcgttataaattgttttttcacttttcctgtagttttgtatctcttctgtttttcccttttccatgatttcaagatggctaagttcatgtgtttttggatttgcaggtgcattcagacatcacaggcagtgccccttttct

SEQ ID NO: 10754 - DNA, 1334 bp, Vitis vinifera
  Intron number 9 from transcript GSVIVT01017379001 (locus G SVIVG01017379001) derived from phytozome v7.0 (chr-ID chr9 ; pos 7551541 to 7552874 reverse strand)
ccgcgaaaagaagcctggcaaggcttttgtcggtttggctcctgacctcatgtgatagtcctgtacaacataacatttgattcatctgtttttacttcaaattaatattagttgccatgcctgagttgatgtgtgaaacatcaaacatgataggaatatatcatgccatctgtgatatttctcatgtatttttgttcaagatggagatcgctatccgctcattaacttgatgcaattttccttgatgaaatgatcacagcaaactcgaacaaagtggctttcacactgcagcatgcactttgatgccagctattagttgcatgattttgaataccttttcagttgttttgagtggatttttgcctgctagtttggagatatcttgagaccaatgtgaaatttgaagcatctacaatatatcctgctacccatctggtttcctcatttttgataaaaaagatcatccgcatgtttttagacattcagtgaatctggttcttgctatgaccatgagttttttattcatctcagaaggttctaggtgcagcccttagtaccatataatcatgcagaaatatagatgcatagtttgggaaagttaggaatgagaaatggtggtggattggtcaatggtaaggttgcaaggaagaaaatgggtatgttacgaaaggtgaacaaggagagacggctaagtgcagggattaacagaattggttgtaatataaaatggaaaatagagaaagtggacatgatttataagcacccatgggcaaagactatggttcgtcccatttgtgtagtactgataacttatatctcaggagaagtgagttggaggcggcttaacctccagcattttccacaaactgtccattctcaggagttgagcctgcatatgtacacttgagagttttacctctatactctctatctcagctagcaacaacctataagtgtgttggctacagctgaacctccagctttttgctttgtgtttattctcaagagtcaaaaccgcacatttgctctggagacttttaccttccagtgaacaggggcctctctctctctctctctctcacacacacacacacacaaagatcctcttgttgcttgtggtttccataattccatgcaagtatgtatgatagataaaaataagcagtaggattcatgagccatggattagtagatcttatcttctatatttttctcctaagcccaatcctcctatctctctttagatgtcataaattgatgacccatataaaaagctaacaggttttcatctgatgtcagggaagaaaattgatttcatcagtgccggtggcagg

SEQ ID NO: 10755 - DNA, 30728 bp, Vitis vinifera
  Intron number 10 from transcript GSVIVT01001045001 (locus GSVIVG01001045001) derived from phytozome v7.0 (chr-ID chr 11; pos 6947533 to 6978260)
ctcttacgccttattggaattctttctacttttaggttcgtattaaaatgttttgtcttattttctctatacgtgtccttgccttctcaaattttgagaactcttatagacttatacatatggaccttcgtcatcacatcatttaatcttgtatttagttgcgttttgtccaaggattctttttgtttttatactttgtggtaaaatgtgaaattcttgcatgtttttttgagatgaaatacttactcccttgtgtatatcaaaatatttagttaaagataaatatgtaaatagatttaaatattgcactttagctatcacatgaaaacaagtgatgtaacaaactaaatccttgtgtgactttttatttttattttttattacaaagaacaatatcattgtattgaaatagtaagcacaaagaagtatcataaatccttcccagaagtacaaaatcttctatacaaagtgaaagttggaaacatgaatttcttattatttgagaagaaaagaaaatggaaactagagaatacaatcataaaaaaggaaactaactcctataattttgcacttagttaggaaaaccaccaactacaatattctacagtgtacagttaataaatacactatggaagggaataacatccttgatttactattcctaaatggaagggaataaattccctgatttcctattcctagaagatcatgttttctaatactccccctcaagctagtgcatacatgtcgtgcattcccaacttgctcactgtgaaatcaaacgtggtacttgacaacccctttgtcaaaacatctgcaagttgtttccctgtagttacaaagggtgttgtgactttcctgacttcaattttctctttgatgaaatgttgatccacttttacaagttttgttctatattgttgaattggattatgggcaatgctaatggcaaccttcttgttgaatctttgttggttcattaagttccaatccaagttctttgagtagaccttagatgtataaaactttgcaaatacctagtgtcatagctctatattctgcctacgcacttgatttagccacaacatttcgcttcttgcttctccaagcgatcagattgcctctgataaatgtgcaacaacctatggttgatcttcgatccttgattaacccagcctagtcaacatctgtataggcctctaaatgtagctcaccattcttttggaagattaggccttttgttaagatgactttcaagtatctcaatatcctagtactacttccatgtgacattctaggggtgagtcatgaattgacttacaatgctaacaacataaacaatatcaggttgagtatgggagagataaatcaatcttccaactagccactgatatctttctttgtcgattggaacaccttttagcttgactcccaacctatggcttggatccttaggagtctcggctagtttgcaacctgtcatgccgatttccttgaagagatcaagtgtatacttcatttaagtaactgagatgccctctttaaaccttgccacctccattcctaagaattaccgaagactgccaagatctttgattttgaactccttggtgagagaagtgatttcaacctgtatatttcttcttgatcatcacctaagacaattatgtcatccacataaacaatcaaaacagtaagtttcattagtgaggattgtttgtaagacagcatgtggtctccttgactttgacctaacctataaagttttagagacttggtaaacctctcaaaccaatctctaggtgattgcttgagaccatacaaaaaaattttcaattttcaaactttcctagagctgtttagcttctcaaaacctggtggcaattccatgtacacctcttcttcaagattccatgtaaaaaagcattctttacttcgaattgatgtagattccaatcattatttgcagcaatagaaagaagaactcttatagagttcatcttcataactgggggaaaagtttcttggtaatcaataccaaaagtttgtgtataccccttggcgaccaacatagccttatatctctctatagatccatttgctcggtacttactggtaaagatccatttatatgcaatggatttcttgccactaggcaattataccacttcctatgtgtcatttttatacaaggcactcatttcttcaaggacaactttcttccacctaggatctaatagggcttctttaatagtgtttgggatagactctagggataggcttgtagtgaaggccttataagttgatcctaaccactgataggaaagaaagttggctaatggatgttgagtgtaggttctaacacctttcctaatgacaatgggaatatctagattgatgtctaacaaagagcaaggttgtttaaagtttggaggagaagttgtaacaattgtatagttgtacatagaatcttatagtattttttcctttcttagcattcttcactttattttatttattttttgatagcataatcatgggcattatttcctaggctatttttatacaattattctatatatattgatatgtaatcctaaacagtaaacacaacaaaaagcatttcacaaaggcttcaagatttgaatgagaacatggtaccagagctagaattttcttaatctaatcaatatcattctcagtgtcttgtgccttcattgtgaggaatttttcttttttagaacatatcctatttagtttctgacttcttgttagaaacactgcttcagattaggccttcattgccccttcataatgtcaaacacttcagaggctgattcttcaatatcgagctaagccacaatccaacaatcaacaccactcgttgaattccagaatatagtaggatccttcaaactcaatggaggaaattgtttagagtggtcatagttggtaaagacttatattaagggtaaaagggaagttgaggcatctcattggacttgtggtgagtaaggatgatccaaggtttgtcatgtgggatggagaagactctcaaatcatgtcatggttgtggaacaacatgcaaccagagataagccgcacatgcatgttcctctcaacagccaaggaaatttgggatttcgtgtgtcatacttactctaatgtaagggatgcaacccaaatgttagtactcaaggattcacaacaccaggcaaggtattctttatgtaattgagtactacaatgttattaaaagtctttggcttgaatttgatcaatatcagaatttaagaatgaagtgcaggatagatgcaacaatgcattaagagttcattgaatgaaagagggtgtatgatttcttagcgggtttgaatgtggaattagatcaagggtccaaatccttgggaaagagccattgccatctcgaaacgaagcctttgcaatcattagaggagaagaagaaggaaggctaaatataatgttagaaaaaggaagcaccatcgacaaatctactttagccatctcaaaaccaagtagaaatgagggaaatgttgcagctaatgttgcaaactttggcagaaatgaaggtaagaaaacaagtgagaaagactctttatggtgcagctattgtaagaaaaataagcacacaagggagacatgttggaagctccatggcaagcccctaaatttctttaaggggaatgggggtaaagaggttaattttggctataaatcataagctgatcttgttgaaaatgaaggaaaacaataggaggaaagctttggcggaagctcaaatacttcctagggattgaagttgcacactctaatgaaggaattgtaatatcagaaatacattattgatttactgaaggagacaggtatgagtggttgcaaatcggcagagactccaataaacattctcacaagctaaatgaaggaaaaggaagcactccagtgaataaagaaagacatcaatgcctagtggggaaattgacatacttatctcacagaaggtctgacatagcctatgtaatgagtgtggtgggtcaatttatgcatgatcctagagaagtgcacatggaagcaatatttagagtgctaaagtacctaaagtctttaccagaccaaggcattcatttcgaaagtggagggagcctaatcctagaagcatacattgatgttgattgggttaggtcagtaatagattgaagatcaacatcaaggtattgcacatttttaagaggaaacttaatgacttggagaaatagaaagcaattggtggtagcaaggtctagtgtagaagcggaattcagggctatggcacacggaatctatgagcttctttggatcaagataatgctaagtgaccttggaatcaaatgggaagaacctatgaaactctactgtgacaagaagtcaaccattagcattgcacacaatccaatgcaacatgatagaactaagcatgtggaagtggaccaacattttatataagagaaacttgaaaatgggctgatttgtactcctcatatttctataaagggtcagctggctgatattctaacaaaggggcttcctactcagccatttcaaactatcttaagcaagttgggactgagaaatagttattccttagcttgaaggggagtgttggaaaatctgccagttggaaattctgccaacttggatggtagattattgaatatttttctagcccatatgagctataagaattgtatagttgtacatagtattgtaggattttttcctttctttgcattctttacttattttatttatcttttgatggcataatcatagacattatttcctaggctatttttatacaatttttctatatatattcatgtgtaatcctatacaataaacacaacagaatgcgtttcataaaagcttctagatttgaatgagaacaattttccatacctttctttgaagttgaagattggccgtgtgaaggagaatttgggactataactggaggatgatcgtctcttttccttttagtatagaccacatgtgttttttccacttctttgttaccttctttagatcttggagtagtgtccaactgctgttcatgagtatgttttccccttgattggttatcttccatctgccttgaattttcattctcaacctatcctccaaagtcagccttatgtcacaggatgcttcaaatgagcctcattatgggtttatatagagcccaggaagcttctagagactcctggagccatctacactaagctattggagggaagagtgtggaaggttctagagatgcctagagatatccacacatctctacactatggtggaaggtatgagaggagttcaaggctttctagagaattctagagatctcttgtatatagggttgtacatagaattgtgtagggtattctagaatcttcttgatttgtaaggaaccctccaaggttccagagagttccattggtgcttataaataggtgagggcctcatttggccaaggcaccacccaaatcacttcctaaccaagcaagtgagtcctcaaagcacttgtaaaggcttccttgagtaataaaagcttccattctctaagaattgcctactacaccttctcaatctttcgagtcgtgaacatcttagcctagcaagctaagcgttgggagtaaggctgacttagcaagatcaagcgtcttgacttgtctaagtgctgcacgagcttaggagacaactaagtccgtgacacttagcttgtatgaatgctaattaaccgggtaatacaatcgttgtaggttcatttcagctaagacatgacatgttttctactctccctttctccccttgaaaacctgtcttagagtaataagataaactctcaaagaattttacatccatggtcacaaaggttccctagtaggaggttgaaaacatttgtatcctttttgagtggatgaatatccaacaaagacacattgaaggcttttggttcgatcttagaccgatctttcacatgaacatggacatacgatacacacccaaatacttgaggaggtggagacccaatgaggttgacactaggaaaggtttatttcaaaaggtcaatgggaactttaaggttaagtggttttgatgatatttagtttatgagatatgctactgtaagaactgcctttccccacaagaacttaggaacactctttgaaaaacatcaatgctctcccttcttccaacaagtatctatattttctctcaactactctattttgttgaggtgtgtctacacatgtagagaagtgtgcaatcccatcttcaccaagtaaggacttaggatagaattgaaatagtcatagaaatttttgtttcttcactccaaccattcttgatctgcaatggaagttttccaagacaggaactggcaaattctctacttaactcagaattttaatacagcttttgtacacttctgatttagattctatccccactttagaatcttgcttctgctattacatataaaccttgttgcttcatgtacaatcttccatttctatcatcttttcgtgattattttggtctctgtctttgttgtattactttgttatgtatgaatatggatatcctctcttcaataagcatgatcaactaatagggttatcttggctagatctaagagaatatggtaaggtcgttgaaggtctctatgaagaggaagaccttcttggttaggttagacggcaagcacggaggaaagtggtgctcgattacagagcacagtagaggctctatttatgtcttaggttttgaaaaggatgaagtcgggtggttgatcgaacacttgatgaaagctatcgaattgaagagttatatggggttcagtagaaagtacaggggaaaattctgcgtccatttgatggaagtatgcttcaacaaccacaaaaggttcataaggattttggagttcgctaccaacagaaaatcaacttttctggttattcctgagggcgaggagggcagaggatgggagaatctaaaaagcacgttgtcttcaatgctaatggtccctttctcgaatgcagatgaaaaaggaagacaaaaccgagtggaaaggtctatccacaatcacatgggtcctctatatcggtccttcgcgaatgtagttagagatgaaggaccaaggagaggtggacttgttcttgttgggaggtgggcgcgagctatggtgtgcgaaagcaatacagttagggttaaatgggttaaggttggccaagttgtggcgagaagtttagggaagaaaggagtggcaacgattgtgcccttctcaggcggaaaataagttttttttgtagaaacaatggaggaagttctctttctccaggatttaaggattcttaagattgagggagggaatacagtccagttgagaaggtggtcgccaaaggaaaattcggaaattgaggggaagttcggaggtggttggattgaaatatagggattgccatttcatctctggtctgaagttcatctgaagaaaatagtggagcagtgggggatggtgactgaaattgattggcgaacgttgaaattgtttgatcttagcaaggcgagggtaagaattgcaatgaaggatcggtcaattctcccagctttgatcaaggtgacaaacgaggattgggtgtttacaatctctgtcgcagtgaacggagttgaagatgataggagaggcagtgtaatgggtgattcgacttgggagatttttgcatctcactcgggaacaggtggtggaaggcgggcggagagagataagtcaatggctgaaggaagttttcatgttggggaagctggcagaaagaagaagggaggagaaaggataatggctgaagttcatccagtgggaacacgtggaaagagaggtcaggaggtggggaataactggttcctatctcccttgtttgaattcaaaaaaacagctggttcaaaaaaactgaacattgggccagttgggacaaaaaaaacgggcgtagcaagggccgacggggacgaggctttctcaggtgagggtggtcgggcctttgagagaaaggcccagtcccttcccattcctagtccacttaatgttgcaaaagtgggctgtaacttaaaaggcccgtcgtggttaggccaaagaataggaggaaagaagccctctgataagatgggttcgtcacgaagcgaagaagtttctgcagtgggaaagggtaaagttgtatcagtagaacttgacattcaaacgagaggctccgcgaagaaggaagcgaagattggttcaaagaagctgtggaataccctttttcctcctagtttcgatcgctgacaaggacttcgaagtcgcagcgagcctcttttgcatgggaagccatcgtcagatagcgaagagtttccaaaggaagagactttcggggcgcgatctcagtcggaacgaggatttagtgcgagtcctctatttttttgttgattgtcaaggattcaaaagtggtgttcgggggaagggacttcgtcagcaagaggcgaagaggctttgcgcaaaccctattttgaagaaaacagagaaggatttttaggccgagtggggtccgatcttcgtggttcatcagtcacggttttgccttctaatctagaaatcagaggtaaatggataagctttaaggggaattgtggaatatcggtagcggaaaacatggaggtaaattcgtcttcaccttctcagtcacctgtgtcttcttttccccctttttgtggtttgacactttcatttctgagctcttctattccagatctttttagttcagtctttcagcctcagtttcctatggaaaatcgagtaatctctgaatttttttccaaaaaagacgatgttggtactttatgtcaaaattctgttggcaaccctaaccttgatgtggtggagtcccagtttgctttttcaaaccagttgctcgagagttttaacccctttaagtctatacccaatttgcctaatgaggtttccaacttggttacagttagccagggggatgttgtggtctccccaacgggtgagttccaaatagaaggcctatcccccaggaaagtggctaaagtgcgtgaggttttaagctctctggatattaagttatattccagaaggaagagcagatgctccacatgtatgtgagacctgttggatctggtttggaggtttagggtctgagagctttttccatgaaaataattagttggaataccaggggtttgggatcaaggaaaaagcgaagggtggttaaagattttctgaggttagagaatctggatgtggtgatgattcaggaaacaaaaaaggtggagtgtgacagaaagtttgtgggtagtgtttggacggtcagaaataaggaatgggctgttcttccggcgtgcggggctttaggtaggattttgattatttgggactctaaaaagctgcgtagtgaggaggtggtatcaggatccttttcggtctcagtcaagtttgctttggatggatgtagacctttatggttgtctgcagtttatggcccaaacggtcccttacgtaggaaggatttttgggtggagcttttagacatttttggtctatcttttccgttatggtatgtgggcggtgattttaatgtcataaggagaagttcagaaaaattgggaggttctaggttaacttcaagcatgaaggactttgatgattttataagagaatgtgaattgcttgatccacctttacggaacgcaccattcacgtggtcaaatatataagagtctcccgtgtgtaagagattggatcaatttctttactcagacgagtgggagcatgtctttcctcaaagccttcaagaagttcttcctagaaggacatcggatcattggccgatagttttggataccagcccgttcaagtggggcccaacaccttttaggtttgagaatatgtggttgcaacatcctagtttcaaggaatgctttagaagttggtggagaggttttcaaggaaatgggtgggaaagtcacaagttcatgaggaaattacaatttgttaaagccaaattgaaagagtggaataaggtttcttttagagagctaaacaaaaggaaaaaaagcatcttaaatgaaatagctaactttgatgccattgagcaagtagggggtctcacttttaaacttttagttcaaagagctttaagaaaaagggagctagaggaattaattttgagggaaaaaattcatcggagacaaaaagctagggtgaagtaggttaaggaaagggattgtaactcaaagttttttcattaagtggctaatggttaggcgaaataggaaatttatcaaggtgttggagaatgaaagaggcttagtgtttaataactccgagagcatcatagaggagatcttactttactttgaaaagctctacgtgagtcctattggagagtcttggagagttgaaggattagattggtcccctatatctaaagagagtgcgtctaggttggactccccttttattgaagaagagatttctaaggccattttcagttggatagggataaggcgccggggcctgatggctttaccattgcagtgtttcaagattgttgggatgtgatcaaggaggatttagttaaagtgtttgctgagtttcacaggagcgggattatcaatcaaagcactaatgcctccttcatagttctgttgcccaaaagaagcatgacaaagaaaatcttagactttaaacctattagcttgatcactagtctttagaagataatagccaaagtgctatcagggcgtctaagaggggtactacatgaaactatccattctactcaaggcgcttttgtttaagggagacaaattttcgatgcagttctcatagccaatgagatagtggatgagataagacgatcaggagagggagtcgccttcaaaattgactttgaaaaggcttatgaccatgtgagttgggattttttggatcatgtgttggagaagaaggggtttagtcctagatggaggaaatagatgagaggttgtttgtacatggtattttatgcagttgtaatgaatgttaacgttaaagggtgggtcaaggcatctagaggcttaagagaaggcgaccctttatccccttttttgtttactttagtcgcagatgtactgagtaggatgttattgagagtagaggaaagaaatttgttggagggtttcagggtgggtaggaatagaacaagggtgccccatctgcaatttgcagatgataccattttcttttctaacactagtgaggaagaattgcagactctcaagagtttattgctagtgtttgggcatatctctgggcttaaggttaaccttgataagagtaatatttatggtatcaatcttgaacaaaatcatctttctaggttggccgagttgcttgattgcaaggcttctgggtggcctatactctacctgggtcttcctttgggagggaatcccaaggcttgtggcttttgggatctagtgattgagaggatctcgaaaagattagattggtggcaaaagacttatttatcttttggaggtaggataacccttatccaatcttgcctcacccacatgtcttgctacttcatttccttgtttaagatacccgcttccgtggctgcaaaaattgagagattgcaaagggattttttatagtcaggggttggggaaggtaaaagagatcattttgttagttgggatgtagtgtgtaattcgaaggcaaaagggggattgggatttgggaagatttctctaaggaatctcattcttttagggaaatggttgtggaaataccctagagaaggttcagctctatgacatcaggttattttaagcatttatggatcacactctaatggttgggatgccaacattatagtcagatggtcacatcgttgtccttggaaggctattgcacaagtctttcaggagttttccaagtttactcggtttgtggtaggagatggggaaagaattcggttctgggaagacttttggtggggggaccaacctttgggatcccaatatccaagactatttagagtagtcgcggataaaaatattcctatttcttcaattctcggttctacttgtcccttctcttggaacgttaatttccgtcgtaacctttccgattatgagatagaagatttataaggcctcatgcggtcacttgatggtttgcatttttcaccttcgggttcagatgcgagatcctggtccttatcttcttcagggctttttatagtcaaatctttctttcttgtcttatgccaagtttctggttatactccagttttccctactaagtttgtttggaattctcaagttcctttcaaagtcaagtcctttgtttggttagtggcacacaagaaggtaaatactaataacttgctacaattgagaagaccctacaaagctcttagtcctgatatttgtaaactgtgcatgaagcatggagaatcaacagatcatcttttcctacattgttatttgacgatggggttgtggcacagattatttcagttagccaagacggattgggttccctcgaggagtgtttccgacatgttgtccatcaattataatggtttcagtttatctaagagagggatagttttgtggcaagatgcgtgcattgctttaatttgggttgtgtgggggaaagaaatgcgaggattttttaggataaagcaaggaattcagagaatctttgggactctattaatttccttgcttctctttgggctttttgttccaaggtttttaaggggattcctcttaatttgttacaacttgattggctagcggtgtgcaattccaatgggttggtctaatctagagagtttgtttgtttttactttgtatttttctgtttttgtattattgtagtttagttttatttggtgggaggattcctcatccttctcttgtacttcttttttctatcaatatatcattttgtcgtttcctatcaaaaaatagaattgaaatagtctttctcattgttagaaaatgtggaaagaaaggaataagaagtccttcgacgatgttaagaggaatgaccaagaaattaaatctatttttttgtacacttttgtaaattgagctagggtgtatatagaggaacacactttctctttgattgattttgtagactggttagctaccaagtaagggacaggcttgttgccttattgtcctttgttccttggtatactccgtgtatactctctctttggcttttaatgaaattttcctttacctatcaaaaaagagtatatagttcctcttctctggcttttgagaagaatatgttatcattagtaaaccgtaaatgagtcacctttgtcctatttccatctaccaaaaagccctctaagatacttttatcgtttgctctcaacatcaatctactgaacacatgtgccacaatggttaaaaaaaggaagggaggggatcgccttgcattaagctatcctttggcgcactgatgtattagcattgccgaatttgactgatgaaatgcacctaggagtctttaatctccatccctggttaaaagttaagaccttggaaacaagatttgataaacttacaatcaattcaaaatattccaagtctttgaaaaatcttccacttctcttgctaaacaatcactggacactaaagtttaagttgttaggtaacgagtcaaatgtatttcaagttgattaatacttagcgtaatagcctttatagcatgctctgtgtccaacctcctcttgcttgcttgtggcttcatcaaatgttatagaaattaacctgtgagctttgaaagcaagaccttttgaaaacaaaggcttgagaccaggttgagccatcacttgatcaaaagtttaagttgctaggcatgggtctataatttatattaagttaattattacttaggtagtagccttaagaactctctttccaaataaacatgatgaatagacaactccttttgtttgcaaaggtaacactagttgactaaagtccaacattgtctaatgagttgatcaattgttagaaacttttctgatgttgcctcaccaatatgaagaaacccaacttaggtggcaccttagtatctttaatgtctttggctaggaaagccaaaattgtgcttgaatttaaagacttccaaaatgaccttagtaagaaaataccattcctaatgccctcaagaccaacctatccttataattatcataggttgcaggatgcataaatttcaaaagaactccactaattccaattcaaatcatagaaggtcctcttaaacctaagatttcaatgaccttgagacgcatatttcttttcctagtagttcaccattcaagctcctttatgaactacaaaatttgaaaatagagaatgatttctgaatcatacttgtgtattcattagatatatttacaccctatttataacactagaataggaaaaggaaagaaaattattctaataaaccagccactatttataggaaataaatagcaagtcaactgtagagaaaaataaacaatcctagattaaatctcagcctatacaggctgcataatgcaagatgtgtaatcccgcaattactgcatggatactctaacaaaattacatagaacaaattggatgtaaagccacgactcatagaattgctcgttttagagtgaaactctcctctacccttactatgattctctagagagtcaacacctaagcctccattcccacttttgtgcactaattctctcttaaccttctcatgctctcttagaataagtcttctccacaaactattccactctattacccattttatatccacttccctagtgatgccttattaagcaccaagagacttgttgttcaacctccttcctttatgtgaaattcaatcttcaattcatagacgcgatgtacacaataattagtattgtcttttggaactttataaggcttgatggacatcaaatttaagcattaatttgtttacaaaggatattctagcattgctaattttaagggtgtttaatagcagttcttttggtagaaacttgtaacctaattgcatggatagtgtttgatcaacaaatatattgttgaagactctaggttgttaattgttaaaaatattattggtttaatccccaagccattatggcattctaacttctaatgtatgtgggagcatctgatgagatatggttatagaaacatgtagaggactcctagttagaagtttttgttgggggactgttttttgttagagtgcatgatatgtattgtgggcccaaattcttcaagtttaagcttttagaaaaattggtggttcaacattttccttttaagtgagtgtatgaatgtgggaggttcaaggattgagtcctacatgaagaaaagggggaaaaaaacactaccaagaaaaaaaaaaggttcttgttctgcttttgtattttcctcctttagtttaacttgtaggatgcttgtcctttcttacattgttgaaacttaaaactattaaacaaaacaaagaaattattgaagcagaaagaaaaaagttacaaggaagatgacatgtccttcaaaagaaggaaaaaaaagagactcaaatccaccccaactaagaacaaacactaaggttgcttcttgaagtgggtcaacaaattgcccccaatttgaggagaaaagggtaaaaggaattccgacaaattcctttgtcatagatatctaaataggggtcatgaaggttattccaccccaaataagaacaaacactaaggttgtttcttgaagaggactaccaaaatgcctccaattcgaggaaaatagggtaaatggaattccaacaaattcctctgtcacaaatattccaccctaactaagaacaaacactaaggtcgcttcttgaagagggttaacaaattgcccccaattcaagggtaaaaggaattctaacaaattcctttgtcatagatatctaaataatttttttttttgataggaaaggacaaaggaatatattaaaataaaaaagaagtacaagagaaggatgagaaatccttccaccaaagaaaactaaacaacaagaatacgaaaacaagaaaatacaaagaaaaaacgaacaaactctctagactggacgaacccaaaggaattacacgccgctagccaatcaagttgtaacacaataaggggagtccccttaaaaactttggaacaaaaagcccaaagagaagcaaggaaatgaatagaatcccaaagattctctgaattctttgctttatcctcaaaaatcctctcatttctttccctccacacaacccaaattacagctatacaagcatcttgccacaaacctatccctctcttcgataaaccaaagccattgtaattgatggacaacatgtcagaaatgctccttgggggaacccaatccatcttggctaactgaaataatctgtgccataaccccatcgtcaaagaacaatgtaggaaaagatgatcagttgattctccatgcctcatgcacaacttacaaatatcaagactaagagctttgtagggtcttctcagttgtagcaagtcattagtatttaccttcttgtgtgccaccaaccagacaaaggacttgactttgaaagggacttgagatttccaaacacacttggtagggaaaactggacgagaaccagaacattgggataaggcaagaaagaaagatttgactgtaaaaagccctgaagaagataaagaccaggatctcgcatctggaaccgaaaatgacacatgtagacattcaagtgaccgcatgaggccttctaaatcttctatcttaggatcggataggttgcgtcaaaagttaaagttccatgaaaagggatgagtagatctgagaattgaagaaataggactatttttatccgtgactactctaaatagtcttggatattgagaacccaaaggttgatccccccaccataagtcttcctagaaccgaattctttccccatctcctactacaaattgaataaatttggaaaactcctgaaagacttgagcaatatgtcacaagatgtttcaaatgagtctccccatgggtttatatagagcccaggaagcttctggagactcctacacttagccattagtgggaagagtgtggaaggttctagagatgcctagagaagttcacacaactctacactatgatggaagacatgagaggagtccaaagctttctagagaattccagaagtctcttgtatactcttgtatataggtttgtacatagaatggtgtaggatgttctagaatattcttgaattgtaaggaaccctccaaggttccaaagagttccattggtgcttataaataggtgagggtctcatttggccaaggcaccaagcaagtgaatcctcaaagcacttgtaaaggcttccttgagtaataacaacttccattctttaagagttgcctactacgccttctcaagcttccgagtcatgagcatcttagcctagcaagctaagcatcggaagtcaggttgacttagcaagatcaaatgtcttgacttgtttaagtgtcgcacgagcttatgaaaatactaagtccgtgacaagtggtatcagagcgcggctacaaagcgggcatagtaaaggaaacatgtcgggctccaacgtggatgagactagtgagcaaacccgtgggagggagaccgagcctactgcatggggcagaggcaagaaggataagtctcgtgacgccatagccaacatggaggcaaggctagccaaggtggagttagccatggtagacacccgggaaggggtggatttgatcgagcaaggcatggagaaaggcttagaggatctaagagagcagatccaagatcttcgcgagggggtactaggctcacaagtttagtcggtgtcacacgaggagttcatgtccttccaagacaaggtcatgaacatgttcgctagtgtggagtcacatggaggcccgagatcaggagattcggcaagagctgaccatttacaagactgcagtatcagcatgagtcatggccactcatgaggcaccaagggtggaggtgcccaagccacacacgttcagtggcaagagggatgcctagaagttggataaattcttgtggcacatggaacactactttgaggctatcgcactgacggatgaagccactaaggtacgcaccgcgaccctctacctcactaataatgctactctatggtggcgtcgaaggtttgcctacatagaaaaagggacgtgcaccatagacacatgggatgcctttaagcgagaaatcaaaaggcaattctaccctgaagatgtggcttacctagcaaggaagaatatgaagcgtctcaagcacacaggctcgatccgtgagtatgtcaaagagttttctacgcttatgcttgagatacctaacatgttcgaggaggagctactattcaacttcatgcacaacttgcaaagctgggccaagcaaaagttgaggagacgtggtgtccaagacctagccacgaccatggcagtagtagagtccttggtggattataaaagggaagactcctccaagcccaagccacaatccaagggtaatcatgctaaaggtgggggagacaagggatcaaaggggtacacccctaaggaaggatcaagtaagacctctagtggcaaggatggtaagggcaaagacaaacgaaaggagttcacacccaggaccaattgcttcctatgtgatgggccacacttggcgcgggattgccctaagaggaaagctctaaatgctatgattgaagaaaaggaaaagtagggcgatgctcaggtgggttcgttgcaactcctaaatgcccttaaggctaagccgatgcctaagatgcctcaaagcaaaggactaatgtatgtagaggcctttgtgaatgggaaggccaccaaggccctggtggacactggtgccactcgtaactttgtctcagaggatgaggcaaagaggctggagctccaagcatccaaagaaggaggttggctcaaggcagttaattcagctgccaagccatcacacgaagtagttcgcggggtgactatgcacatcggctcatgggaaggaagggtcgacttcacagtggcactcatggacgacttcaagatggtactagagatggatttcctacaaaaggtcaaggtcgtgccactacctttcctacgctcaatggttatcctataggaggagaagccatgcatggtccctacggtcatcgaaggtacgcccaagacccctatgttatcagctatgcaagttaagaaggggttaaagaagaaagaggtgacctatctcgccaccctgaaggaagaaagggatgatgggtcgaaaggacccatgcctaaggaaatcgaaggagtccttgatgaattcaaggacgtgatgtcgcctgagttgcccaagcgacttcctcctaggagagagaaagaccataagatcgagttagagccgggagccaggccccctgctatggggccatataggatggcaccacctgagttggaggagctaaggagacaacttaaggagttgttggacgcagggttcatccaaccatccaaggctccctatggcgcgccaatcctatttcagaagaaacatgatgggttccgacggatgtgcatagactactgggcactcaataaggtgacggtaaagaacaagtaccctattccgctcatcgctgacttgttcaatcaacttggaagggcgagatatttcacaaagttggacttaaggtcaggctattaccaagtcaggattgcggagggggacgagctgaagaccacatgtgtgaccaggtatggctcattcgagttcttagtgatgcctttcggactcaccaatgccccagcaacgttctgcaccctcatgaacaagatcttccacccttacttagacaagttcgtggtggtatacctggatgacataatcatctatagtaacaccctaaaggagcacgtagagcatttaaggaaggtcttcaagatcctgaggcagaacgagctatatgtgaacaaggagaaatgctcattttccaacgaagaagtgagcttcctagggcatcgcatcaaggatggcaagttgatgatggatgatagcaaggtgaaagccatccaagaatgggatccaccaaccaaggtaccttagctcagatctttccttggtttagttaattactatcggcagttcatcaagggttattcgacaagggcagctccgttcactgatcttcttaagaagaacaaggcatgggaatgggatgaaaggtgccaacaagcctttgaggatttgaagaaggctgtgatggaggagccggtgttggcactacccgaccacaccaaggtttttgaagtacatacagatgcctcagacttaggcactatcttctagggtctcacttcatagtaaagaccgataacattgccattagctacttccaaatatagaagaagctaagtcctaagcaagctaggtggcaagacttcctggccgagttcgactatacactggagtataagccaggaagtgctaatcatgtggccaatgccttgagctgtaaagcggagctagcatccatgacgagccagccctaaggagacataatggatcttctaagggagggactgcaacatgacccagtggctaagagcctcatcgccctggctcatgaagggaagactaagcggttttaggtggagaacgacctactctacactaaggggaggcaactctacatgcctaagtgggggaacataaggcggaatctaattaaggagtgccatgacaccaagtgggttgggcaccctaggcaatgatgcacgagtgcactactcgagtcggcttactattggcctcaaatacaagatgaagttgaggcctacgtaaggacttgtcttgtgtgccaacaagacaaggtggagcaacgacaacctagaggcctgttggaaccactaccaatagcagagcgcccatgggacggcttcacgatggacttcatcatcggactgcccaagttagaggacaacgggtctatcatagtagtagtggacaggttctctaagtacgcaaccttcatagcagcccctattgactgcactgcagaggagacgacaaggctattcttaaagcacgtagtcaagtattgggggttgcctaagtatattatcaatgatcgcgatccgcgtttcattgggaagttttggacgaagctcttcaagcttatggggttggagcttcacttctccacaagctttcacccacagacagatgggcaaactgagaggttgaacgacttactgaagttatatttgaggcactttgtgagtgccaaccagaaggattgggttcagttgcttgatatagcccaattctcatacaacttgcaaatgagtgaggcaaccaacaagagtccgttcaaactagtcatagggcagcaacccttaactcctcacacactaacaataggctatacggggagaagtctgacgactttcaagttcacaaaggggtggcacgagcaagctgacatagcacactcatacttggacaaggccactaagaaaatgaagaagtgggtggacaaaaagcgacgtcacacggagtacaaggtcgaagacatggtacttgtcaagcttcttcctcaacaattcaaatccctaaggccggtgcatacgggccttatgaggaagtatgaaggacccttccccatacttgggaaggtcggcaaggtgtcctataaagttaagttaccaccaaggttgaggattcatcctgtcttccacataagttacttgcctatcacgaagacaagaatgatccaagccgagggttgtctaagagggcacctatagcggtcgtgacctcctatgacaaggaggtagaacacgtcctcgcagattgggtcatcaggagacgaggtgtgcctcctgctacggaatacttagtgaaatggaagggactaccagagagtgaggctagctgggagccaagagatgcactatggcagttccaagagcagattgagcagttccgggtagaaggtgcgacgaggacgtctgcggcttaggtgggggaaagtgtcacaagatgtttcaaatgagtctccccatgggtttatatagagctcaggaagcttctggagactcctacacttagccattagtgggaagagtatggaaggttctagagatgcctagagaagtccacacaactctacactatggtggaaaacatgagaggagtccaaagctttctagagaattccagaggtctcttgtatgctcttgtacataggtttgtacatagaatggtgtaggatgttctagaatattcttgaattgtaaggaaccctccaaggttccaaagagttccattggtgcttataaataggtgagggcctcatttggccaaggcaccaagcaagtgagtcctcaaagcacttgtaaaggttttcttgagtaataacaacttccattctttaagagttgcctactacgccttctcaagcttccgagtcgtgagcatcttagcctagcaagctaagcattgagagtcaggctgacttagcaagatcaagtgtcttgacttgtctaagtgccacacgagcttcggaaaatactaagtccgtgacaaatagccttccaaggacaacgatgtgactatctaactatagtgttggcatcccatccattggagtgtgatccgtaaatgcttagtataaccttatgccatagagctgaaccttccctagggtacctccacaaccatttccctaagagtgcgacattccttagaactatcttcccaaatcccaaacctttttttgctttcggcttacacactacatcccaactaacaagatgatctcttttaccttccctaatccttgaccataaaaaatccctttgcaatctctcaatttttgcagccactaaagcgggtatcttaaacaacgaaaggaagtagcaaggcatgtgggtgaggcaagattggataagagttatcctacctccaaaagataaaaaagccttttgccacccatctaatcttctcgagatcttctcaatcacaggattccaaaagccacaagttttaggatttcttcccaaagggagacccaagtagggtataagccacccagaaaccttgcaatcaagcaattcgaccaacctagaaagatgattttgttcaagattgatgccataaatattactcttgtcgaggttaaccttaagcccataaatatgcccaaacactagcaataaactcttgagagaatgcaaatcttcctccctagtgttagagaagaaaatgggatcatctgcaaattgcaaatgggacgcctttgtattgttcctacccaccctgaaaccttccaacaaatttctttcctctgctctcaataacatcctgctcagtacatctgcaactaaagtaaataaaaagggggataaagggtcgctttgtcttaagcctttggatgccttgacccactctttagcttttccattcactaagactgcaaaagataccgtggacaaacaatctctcatccatttcctccatctaggactaaatcccttcttctccaacacatgatcaaaaaaatcccaacacacatggtcgtaagccttttcaaagtcgattttgaatacgactccttccttccctgatcgtcatttctcatccactatctcattggctatgagaactgcatgcaatatttgtctcccttgaacaaaagcgccttgagtagaatgaatagttttgtgtagtacccctcttagacgccctaataacactttggttattatcttgtaaagactagtgatcaagctaataggtctatagtctgatattttctttgtcatgctttttttgggcaacaaaactatgaaggaagcattagtgctttgattgataatcccgctactgtggaactctgcaaacactctcactaaatcctccttgatcacatcccaacaatcttgaaacactgcaatagtaaagccatcaggacctaatgccttatccttatccaactgaaaaatggtcttataaatctcttctttagtaaaaggggagtccaacctagatgcattctctacagatataggggaccaacctaagccttcaactctccaagactctccagtaggacccgagtagagcttttcaaagtgaagtaaaatctcttctgtgatgctctctgaattattcaacactaatcctctttcattctccaacaccttgataaatttcctatttcgcctaccattagccactttatgaaaaaaccttgagttacaatccccttcctttacccatttcaccctaactttttgtctctaatgaatttattccctcaaaattaattcctctaactccccttttcttaaagctctttgaactaaaagttcagaagtgagaccccctccttgctcaatggcatcaaggttagctatttaattcaggatgtttttcttcctttcatctagcactccaaaagaaaccttattccactctttcaaattggccttcacaaattgtaatttcctcatgaacctatgaccttcccacctagttccttgaaaacctctccaccaacttttaaagcactctttgaaattaggatgttgcaaccacatattctcaaacctaaaaggtgttgggccccacttgaatgggttggtttccaaaacaatcggccaatgatccgaagtccttctaggaagaacttcttgaaggctttgaggaaaggattgctcccactcatttgagtaaagaaaacggtccaatcttttacacacaggagtctcttgcatgtttgaccaagtgaatggtgcgttccgtaaaggtggatcaagaaattcacattctcttataaaatcatcaaagtccttcatgcttgaagttagactagatcctcccaatttttcagaacttctccttatgacattaaaatcaccgcccacgcaccataatggaaaagatagaccaaaaatgtctaacaactccacccaaaagtccttcctaagtaagggactatttgggccataaactgcggacaaccaaagaggtccgcatccatccaaagcaaacttgaccgagaccgaaaaggatcctattaccacctcctcactatgtagtttattagaatcccaaattatcaaaatcccacctgaagcctcacacgccggcaaaatagcccaatccttatttctaaccatccaaatactacccacaaaccttctataacactccatcttttttgtttcctgtatcatcactacatccgaattctctaacctcagaaaatctttgaccaccctttgctttttccttgatcccaaacctctggtattccaacttattattttcatggaaaaacaacacagaccctaaaccctgaatccggtaccaccaggtctcacaatcctgtagagcatctactcttcctcctggaataaaccttaatatccaaagagcttaaaacctcacacactttagccattttcctgggagataggccttcaatttggaactcgcccaatggggagtccacaacattaccctggctaaccgtaaccaagttggaaacctcactaggcacattgggtttagacttaatgaggttgagactctcgggcaactggtttgaacaagaagactgggactccaccacaaccaggtttggaatgccaacaccattctgacataaagtaccaccatcgtcagttttggaaaaaaaatcggaaattactcgattttccatgtgaactgggggctgaatgactgaactagggaaaacgggagcagaagggctcaaaaatggaagtgccaacctagaagaagagggaaaagaagacacgggaggctgagaaggtgaggacaagattacctctaagttttccgctaccgaaattccacaattccccaaaaagttgagccatttacctctgatttcaggattagaaggcaaaagtgtgactgaagcaccacgaagatcaaaccccactcggcccacaaatccttccctttcttcttcatgaaatggtttgcgcgcagcgtctccgcctttagacgacaatgcccctcccccggagcaccactttctaaaccattggcgcatgaagagagggcttgcgctgagtcctcgttcccactaagctcccgccccgaaagccacctccataggaagctctacgctactcgacgaaggcttcccgtgcataagaggctcactgcgacttcgagaaccatgtcgacgagtggaacttgggggaaatagggtattccacagcttctttgaaccgaacttcacttccttcttcgcggatcctcccgtctgaatatcagactcagctgcaactcttttcccctttcccctttctcctttccccttgtagagccaccttcattttgtaacgatcccagctttccaacgggcttcttttcttctgttcctaggcccatcctcatcgggccttttaataaacaacccgtttttgctattgggctgaaattggagagagactgggcctttctctcagaggcccgaccattttggcatgagaaggcctcgtcctcgtcggtcgaagcttcgcccgccatctctatcccaacaggcccatagttcaggttttttgaattcaaactgagcgagttgttccccatgcattgaccattcttaccacgcgtccccgcaggaagaacttcagtcgaacacctttcttcttccttcttctttctgctagtttccccaacacgaaaactaccttcagccgtagatctgtctttctcttcccgccttccaccacctgtccccgagtgagattcaaatccctcccgagtcgactcacccattactctgcctctcctgatctcttcacctccgactactgcgacagaaatagtaaacacccaatccccgtcaatcacctcaatcaaagttggaagaattgtccgatctttcattgcgattcttaccctcaccttgttaagatcaaacaatttcaacgttcgccaatcaatttcagtcaccgtcccccactgctccactaatttcttcagatgtacctcagaccaaagatgaaatggcacaccccgtagctcaatccaacctcctctgaacttcccctcaaccatcgaattttcctttggcgaccaccttctcaactgaactgaattccctccctcaatcttaataaaccttaaatcgtgaagaaagagagctttctctatcgtttcaacaaaaaaaacaccttttcctcctgagaagggcacaatcgtagccactcccttcttccctaagcttctcgccacagctcggccaacctcagcccatttaccacaatctacactgtattcacacaccacggctcgcgcccaccttccaaccagaacaagtccacctctccttggtccttcatctctgaccacgttcgcaaaagacctatacaaaggacccacgtgaatgtagttaaacctttccactctatattgtcttcctttttcatatgcattcaatggggggaccaccgacaaagaagacagagcgctttctagattctcccaacctctgcccttctcgccctcaggaataaccagaaaagttggttttctgttggtagcaaactatgaaatccttatgaaccttccatgattattgaagcatacttccatcaaatggacacaggattttcccctgtactttctgttgaaccccaagtgacttttcaattcaatggctttcgtcaaaagttcaatcaaccacccaacttcttctttttcgaatcctaaggcataaacatagcctctgttgtgctctgtaattgagcaccaatttcctccgtgctcactttcccacctaaccaagaaggtcttcctctccacagagaccttcaacgtccttaccattttagaaatgtgctccacatagatatctaaataatggtcaagaaggttattattattattattatcaacaccaaaactttggcccctataaggtgtgttattattattattatcaacaaaactttggcccttataaggtgtgttgttgttaatattattattatcaaaactttggcccttataaagtgtgttagaagccatacctagggtttgaatgttcccaaacccaaatcctctcccagagaatatgtctggaaaccatgcgatcttccacttaatggctcatttttttatccatggcatttgtgtagaggggctacacacttcttaagggaaagagatgaagactagatctttggaagaccgattctttggaagattagaaaaattagagtcttaaccctaaaacccatggggtttatatagactctcctataatcttaggcgactttggcccaacttgtgcttgggtcacttactctagtccactaggtcctaattagttaattaacataatgggttccaattaattaactggcccaatctaaataaacaaaattaattaagcaaccttgcacttttatcaaaatgctcatatgcacacatgattaatctttaatgttgctcaaacccttatgtcaacaaagactatgagcttgagtggggaccactaagactcataggaaaaaaattgctcccttaggatccaattttgaagttaactcaccattccactgaagagagtcaatcgcaccccagtatcctatgtcattatattaagataagaattgattaaatctaatttaatcaattcctccaattcatgacctatccattgcatgcaaacttatcatgaattggtgtccataatataacggggtaaatgctatcaacctcttaagatcatctttacaattgtggagtctcatatcctcctattatgcagtcaattgacatacttaagtgtataaaggacatctgtcaaatcctacttgaggaattactgtgacacaacatatttcatgattataagtccataggataacccaaggggacacattgtctcaatcccatgagatatcatggtgtctctattgaaaatacttgagaatacctgttgtcatcttccttaatcaatagtgacccaattcgtaaggaatatatgactactttagggtctctcccataggtcaaaattgttgaagatctcaacactagctcaatattctctcaaggttgaaagtccatgcaacatggtaacttggtgaactcaccatgggaaactcatcccggtgattaagatacgttatccctccaattaagaggtagtgcactgcaacctcagttggatacctaagtccataaaccggttctgaacaactcatcaacttgcaaggaacctatgattttggatcttttatgcaactcctaatgctcctaagtcatgtacaatgcaagttatgcaagtttaaatgcttgaataaatattaatgcaaataaggatagaatagtaaaaacttactttgttgtcatgtcttccttttaagagctttatgccaacaactagcaacatacaatactagaggactctactcctagagcccctaccaaagccctgaaaggagatagccaacatgcttgagccacctgttgagaacctaccaaaggtaaaataaacaagtacaagtaatgtgcagaaggaaatggtaaaagtaggtggttagttgactcctctagacaaagagtgtgtctttcatagctgatagctttataaggtttcttgggataaagcaaatagttggtattctcttcattgtgaacctccaacaataaaaaacgtttgactttcgtgagatctagagtttcaaatcaattcaattgaaaaaacctagttaggttttccttgaaggaaatatagaagaatttgaaagaagataaacctgggaggatttgctcttagtaggcttcaatccttaattgagcttgctaaagtgaagatccttggtagggataaaccatcatctgtagtgaggattttacattcacatgagaaaagtcatcataatgataaatttcagaaagttgcatataggtaatgacatggttgttatgaccatgggtaagcacaaatgtggacgagatactgttcagaagacaacgattgataaatcaaggttttagtgattgcagcagactaaggcgtgcatgccataggaaaccttaataagatgcgtgctctttatttttgaaaaagtgatttcctttttagaagcatgaaagtgcatgtgtttgcactgcatggagtttttattaatgagcttgttacttcaagatccttagtgtgcatgcttaaaagccttaagtttttcctgtcttggaagtgtaatttccttggaggagcactcatgcatgttgtaaataggattattactgcaagatccctggtatacatctttcaaaaccttaaatttctgtcatcatggaaatgtgattttgttgccggagcctgcatgtgtgcttgtttctatataaggtgtttacataaacatgtgtgtaagtatatatgtttgtatgcgcaagaatcgttttctgatagaactctttcatgtgttttttcaggcgacagccaaat

SEQ ID NO: 10756 - DNA, 8092 bp, Vitis vinifera
  Intron number 1 from transcript GSVIVT01034198001 (locus G SVIVG01034198001) derived from phytozome v7.0 (chr-ID chr8 ; pos 14501732 to 14509823 reverse strand)
atcatagacccttgtttattggattgtttttccccatagttggtgtaggccgcgaatgtaatatgagtaggggttgtagtagctagggtggggatcggttgggatgggtgagattaattagttaggaccgcctcggcttgtggatagccacgatatcggaacacaggggccaaggtcttgtttaaaaattgttatttacagcggttctccgggacaaaagctaaggaaaatgtgtttgatgatctgattatagaaaatgggatgttttttaaaaattattttttaattatttttacctgttctcttttttctccttttctttttttctttttttattttatgattgtttttaaaatattgtatgaagatggagaatggttgaaaatagaacattataaatacaaattatttttaaaaaaatatttaaaatatagaaaataggttaaaaacatatggactttgtttggaaagtgctttcgaagatgatttgaaacaatcattttttaaattgttttttaatgttttgtaaaatgaacatttattggaaacctaaaatatatttaatctattttataagtttttaaatatgttttaaaagtaatttttatatttaatattttattttcaatcatattctatatttttggaataattatttttttaaaataaaaattatttttgtttttctctttctttttatggggaacaaaaaaagtgttcaaaaaaattgttaccaaacatttctgcaagatgcattataggtagtttttcaattttttaaaaatgctttctagattttattgaacacttgatttttacttcaaaaacactttatatgttggaagtgttttgcaaggatattgtcaaaacgggttctttcatctcatgaaatgaaattacgaatgtagttttgtagttgttgtggaaactttgctggaaatgcatattctcatgagtagtcttccttagtcaatatttcagaagttttcaaaaccagttttgaaaaataatttgagcggtttctgaaaattgttcattgatgttttgtaaaacgaaaatctgttagagactcgaaatgtttttaacccattttttatattttttaaacatgttttagaaataacttttgtaagtaatgctttatttttaatcattatccattagtatacttattttttaaaatagcacctaaaacctaaatgaaaataactaaaaaatattctctaaaaacgtcatatttttagtttgtcaaacatggtttcctgtttttttgttattgagaacaaaaattgctttcaaaagaagttaccaatcgaggccttaggttttgattgggaagtgttttaaaaaacggttttattcgaaaacaagcattcatccaaatcttttataaaaataattgatttaagcttaggtaaagatgaaaataaacttgaagtgtatgagaaataatttagacttaagtgcaccaacaaataccatcttacaatcccatgttacttcttcaaatatcacaaatcttcaaaaaaattaatcttcttctataattgcttgagctttctatgaattttaacaaacaaactagaaaaacttaacttaatttgaaccattagcattattaacctcattttattatcatcaaaatccgattagggaaacccttaagctaacaatcttcctttttttaatgatgacaaaactatgctatccagagaaaagactctcattcgacaaatgtataaaacaaatcaagaaaataaagctcaaagatacaagtaaatagaagattaaaaaaaatatgcataaatgtacaatcatccatctaacaatcatcaaaccaaaaagatcaatgtcccgaaggatatgtaacaaatgatatgaataacatgaagtgtattggaaataaataaccatgaagtctaaagttatatccataatatccagaaaatctaaatagactggtaaaggagctatccatagtggaataaaacatgtctaaaagcatatccacaacaaagtaaccaacataagtggagtattaaaacatttccaaaccaaatatatatccaaaataactttaaaataactcttaaaccccgtagacaagcctatgaagagtttatatctttcccatttggcaacattaaaatcatgggggaaaatactatagatcaaactcaagattgggggaggtgaaagtggaaaaatggaataaaggtatgtcatcatctcctcttgttgaatctaaagctaagcaatgaaagctgcttggtattgatcaagttgagttgtgaaagctagctaatactgatccatgtgatcctcaataaagtagaagtagcaatcgctgatcatagcttgcttctccatctatgtaccaagagctaatttgagatgtgagatctatctaatactaatcaacctatggagatgagtatggagcgatgagctcaatagcaagagatagagacatcttagaaaaatttgacttagtggagaaggtttcctcagtaggcatgtttcattcatggtgggagatctaaactacctcatatggatgctcaatacaaaagggctcctcgatctgcatttcctctatcacatgaccttaagggaactctccaccgttcatacctttaatctcatccttttccttaaccctcttcttagaaacctcctatccatcccacttgtgaatgtaagacccatcaagaagtttcttgaaatgcatttgatccatagactttgcattataggtgtcatacatggtaggaagtcaaacattctttttagtctttaggtctatattgaacacgttgaaaatgtagggatacctgaatctttccataccctatacccagattaggtaaggtgcctataaaaactttcctaaactttctaaatcttatacacaaggaaaacaaatataattttaaacaaaatagatttagatatcagtgttagaaaacattacattcgatttagatattcctaaattgattcattttgatgaagagtatatgtagagtcataaaaagtctcgtaaacccatgatctctcacctcatggctctctcttcatcctaacacacttatgatggggggaaaagagggtgaaggttgtgactctcttactctctggaggtggaagacaactctatggaaaccctaactcctaagtgggtatttataggcttccttgttaggtcccactaagggcttgagtcatttactctatccaaaaatgagtcctaattaattaattaacacaataaggcttattaatgaatcaatttgcctaatccagagaccttgttcacttacccttgtgcaatcttacataattaccaaaactcccttatacataaaagtgaacgtagagtcaatctgaccctcatagattgtattaacaaaacaaggcatatgagctcagagcggggaccacttgacctatatgatagtattgactttctcaaaatccaattatgaagttgatttaatactccactacaaataatcaactacactccaatactatatgtaaataataacagaacactatgtgctcgagttcatgacatgttatccattgtgtttagtctccttatgaactgatgtttataatataataaggtagaaactatcaacatttcaatactaccactgctatcattgagttacagatcctcttattgtgcattcaactgatatgttttaattcttaacgagtctatatcaagtttcatttaaagaactactatgaccatagtttacatgaacataactccttaggatcatgacctaatggaacattctatctcaatctagaggtgtccaatggactaggccgcctattttggccagtagtccgacatgccaaaaggccaagctggatcgacacaacccaattactatagtgagcaaggctggcatgccccaaatgagcaagtcaggtgattggagccaaaacatgtgctctaatggcacatattcgatatgatttgtgcaccaacggacattcaaatcacccaacttgacctaaatcaatgctaaggccctagccatgagtttaatctatactttggagatttatctcaggttcaagagaagaaaattgtgcaaattgaatgactttcgattttgaaagatcaagaaagggctaaatgaggaaataagtgagtcaagactcattgaacgtaaggaaaggcaaaacaaggatatcatgaggttggaggatgattaatgaccattatggagtaagaaagaaggcaagaaagcatgggaaatgaggcatgaagcaagatttagctgcatggaaatttagaactcaaaaatctgatggcattatatactctgactttgaggacaaatttggagcactttttggagtccattatatacatactatatattgtttcgaagctcgggaagtcaggagtccaaaacttcaaacagtttgcaaatcggagctgaaatgaagaagttatggccattttaagacaactgtaccaagctggagggtcatttcgaaatgatttcgaaattcaacttatgaattcgaaatccacttcgaaatgacaccaatttcgaattcacccactgccactttgatgttccacttcctctacctcgggaattgcatctaaagcactccatccgccctaggtggaccccacacgactggaaatcaccattttattattttttaatcatttttaggaaattttttttgtaataagtggccaatgagattgtgccacatgttaggtaattgaggatattatataaactctctcaattctaggttttagggatcttggattttttttctagagtttttgacattgaaggaggaagaagacgagaactttgatttgttttctttttcttctttattgaatatatcgtttttagtttcttttgactcaaattatggatttttaccctactatggattgtgaatgtgacatcacccccgtgagaggctaagatccaacttggggcttgaagcatgaaaacctaagggttaggaaacctataggaacaatgggtgaattattataacaatgagattaattattggttgagtgacaatttatcaattttttttatcctatccttgtgagttcgtttagggaatgatacggtaggttattacttgatactagtgattcttggtaattcttgatcattagttatcctcatcttacctaccgttatttgcccctaaacaaagctataaggagtaggaatagttaaaaagccaaatcttaaattgataatcaatctcattcatttgatggttttaggaatctattttaaaaatgaaaaattaggtttcggatgcaattttgagttatagaactcaacttgatcgcgagtggccaaggatcccaaaaccctaagatcatattacttaaaatacccttgttttctataatttctataccctaggttggattgtggaaaaccccaaacttgaatcaattgaatttaaaatcaatattcatcttctcttattaatttaatttcttttacttagtttcacattattcacatattgtttttcactgaaggatttaaacaaaaacaattcatttattctagtattgacaattttcataagtcagtcattgagaacgatacccggaatactacaaaagccgtagtgactctttctctagtttttcttgaccacagttactacgtaaaaaggctaagtattttggtacaatagagaaatttcggtcatcatgttaggactaaagagatgtccctttgtgccattgtgtcgacccctgttcaaatattacttttattttttttactttttttttattatatgttaaatgtctataatactattttcaacaatatataacagaaaaaagtgaatcaatagccattttttatttttcatgttaaataactatattatttttctccttatttccttttatattccaatattttaaatttattgttattttgatatatataaaaaaaattcaaatatgattttttttactaattttaaaaacaaaaaattaacatttttataaattttaaaattacaaacttgataaatataaatataaaaaataacaaatataattattaaaaatatttaaagtaacaaaaataattttcatttaataatgaaaacaattaaggcaaaataacctaaaaaattaaattaaacctagtacagcccattggcacaacccattagcatgacacgatatagcacaattagcccatggacttatgggtcgtgtcgggcacctatttagtttgcatgggctagcccaacccgacatgatttttaagtgagtcgtctttatcgcaatcttatgagatgtcatggtgtctctattaagaataactattgttatatgcttccatcaataatgacccaactcatatggaatatataatcaacttacgatctgacccataagtcaaaatcactattaactttaacataagtttgatattctcttaaggttgagaaacaacacaatgaaacagcttagtaatgtcacgactacttgacaaccttaagtcataacttacggtcttgtccaatgtgtaaccatatacactagtacaaatatcatgggaaaccattccaatggctaagaccagtcatctttccaattaggaggtaatgcactacaacctctaatggatttgcctaagcccatgaactagttgtgaactagttatttattagtaaagaacctatgacttggatctttcgtacaacttttaatgcactcaagtcatgtatgatataaaagatgcaaatcagaatgcttataaagtataatgcatggaattagaatagataaaagtgaattgaaaatttattaataaataataaaatttaaaagtttattgcatcatgtcatgattttaagggttttatcctaacaaaaaatccttgttaaaaaacatccatatgaaaggaccttagattttctctcacaacaccgcatcatatgttgtaggatgactaaaccaagattgatcctcctacgagtcaagatggagtcaataaaaaatgtctcatagtgggaaacctcatcctaatttccaccttaaggaatgaaaatgtagctaatcatatggtgcaagacttgactaatcacaataaggacataagcatggggctttgtaatcatcatgttaataagaaggtcacagacctttgaatagcttaactaataacaaaattgagatgaccattcttagccattgtcaatgtactcatcaattgtctaaatgaggttatgcaactatcatttggaaacatgaccttggagttgaatgtgtttcacctatgcaagcaaccaattaatcatgaagagtttgaatatgaagaggtatgcttgattgacacactagctcaaaacatacaatatactcatgaaaaagtaattaaaggaattgctaattgatttttcaagggaaaaaactcaagcgtttatcaatctactaagttttcaagttgtagcctagttgtttgcacacatttcaacaaagttaacacacatcaacccttagaggatatcaaagatagcaagagaatgagcacacccctatgcttgatattttaaagggtgacgtactagatgacaatttatagatatccctaagttcaatgagcatgttgagagggagattaaaatgcacattacaaacttataccttccatcatttactagcattagatatggtttctcctattagttagatatttcattttttttatcagtaaataatttatccaattcatagatcgaatttaaatagatgatttgtgaatcatctaataactaattaccaaattattttggttttgagttttactagattcatatatttctctcaatctaaataatagagttgaatttttaatatttgtatattttcatatgaaggaaaaagttatttttacaagaaaaggtgaagtgtatttttgtaaaaatcgttattttttaaggtaaaatatgtgaagatttagattcacaaatttggatttttttttttaatcaaataaccaaaactttattaaggaaaaggcggat

SEQ ID NO: 10757 - DNA, 394 bp, Vitis vinifera
  Intron number 2 from transcript GSVIVT01024637001 (locus G SVIVG01024637001) derived from phytozome v7.0 (chr-ID chr6 ; pos 8148112 to 8148505 reverse strand)
gactggtggagatacggtaactcttttatttacataatgcagaaatattaatataaaattagttgccaaaatcttatatatttacctatggtggagaggcttggtacaagtcgtggttgcagacatctcttattttattcttctgataattgtagataagttctagatacctatccaaagaaaattacctttttccatttcatgaaattctcgttatactattctgccctatcaattatcattggacttttataaattacaattggaaaactctcgacttaaaggagaaacttgtaggatgtattcttctagtcaagaagtgttccaaccaatgatgatttatttgccttttcacctaggtattggttcagcttggagatatacttgatcgagg

SEQ ID NO: 10758 - DNA, 18045 bp, Vitis vinifera
  Intron number 14 from transcript GSVIVT01020549001 (locus GSVIVG01020549001) derived from phytozome v7.0 (chr-ID chr 12; pos 4495028 to 4513072 reverse strand)
tcagaaggtttggcagaaggtagagtttgtccttggtaaggatttcaaaaactcttatttttaatgtattaaaccttccatttatttatttccttcatttataaatttgtatatgtttatgctttatgttacttgttttgtgagatgaaacttcttttgacccacatgttccaggagtggatgtccttcctgttggtgattacatgttaagaaagttcattttcacattgggagatcctagaaaaatgtaatcaacatattgttttctttaggcatcaagaatttttaaagacatgtttgtaatgctaagtctagagcaagaggtgggggaggggggggttacccaattaaaaatatttagaatatgtagtgatgaataaagatgctgaaataaattctcaatcacataagaaaaactgaatatacatgaaaaactctacatagtatcaaaatacccatccaggttaaaaaaacacaagccaagctggccatgacaaagaatccactaaaataagaccaaattacaaagtcttactaggataacaagcctaaatgcaacccccaggatccttctcacctctattttgaaccttaaaacgttctttgacgccttagtggatcttcttctcaaatgcttccaaagaagtgctctgatggctctctcttgaactcccttaagagacacctgtcttcacaaaagggaattgcacgttgtgccaaaagtatggaagtatgggtaattgtttcctaaaatataaaagacaaacctttggatttcttgagagaaaaatttggtgttaaagcaacaactaaatttttttattcaaagtaggaaatagaatttctcagtttttaaaaaacacttaaagatataatttgagtcaagatgataaagtggatttctttttcctttctttttttttttggggggggggacttcaagatataattttaagttagaaaagaaaagaattttatattaaaaacagttttaaattccaatacaagtaaaacaacttatatgcaattctaatgcagtacaaacacctaagaaactctcatatacttacccaccactttttttagcttttttaatccaaatcttccagacttgacttctttcacaagataaagtccctaggattggatttgactcaaacactaactgaacagtgctagctttgctagaaattggcaacagtaaaaaaacaatgacaaattctttcacttgaagaattatgagttcaatggcaccagctagatgcaaaggcattgttcaaaatcctgttgtgaaaggtgaattttgatcttcaaaaaaacataaacctagtgggacgcatgaaagggaccaaatttgataaaatattatcatggaaatttggtgtgtagatggaaacaagatttgcatagttgcaaagacaagcttcaatatcgatgaatataattcccttatgcacttattgactcagaaaaagtgtaggtatgcacacaaatattttaatattagactagctgttagaaatctgcacaattccttaatttcaagggtgtaattgactgttgttttgttaccatgtatattctaaggacttagctgttagataaatcaaatatttttctttataggacaattgtgttatatctagaaagttgtaaaatcttagcttgatatcaccctaatttttcttttgtatgacttttattcaataaaaataagaagaattggttctaaccaatatggtatcagagcaccatcaagtttctaggctttctatccttcttgcatcttttgcaaaaaagtctatgacatgttcgtctcttttcctcttttgttcaactcttccatatttgcatttggcaaatatggttgacaaactctcttctcaaaatccttcagatagattttgtcaatccacaaaagggctcaaccaatctttgataatctaacccttcaaatcactatagaaaaactcaatggctacaatttcctagagtgctctttgtctgtcaagaagttcttgaagaatagacataaaatgggatatcttcgaagaacaataaaagagcttgactgcattgatctcaactatgagccatgggaggttggtgtagtggaaagtttgtttccaaacgaaatgaaaaacactcaagaacaaatacaaagatcacattaggatctgaaaattggggaataattctgctaaattatattgaaccccttctaacaattacaataagcttttaaataatgtttgtaaggcaaaaataaaggaaataactgaaataggaaactaatgatgaacttaaaatagaaactaatgatgtaggaaactaattatgaacttaaaatagaaactaatgatggtcgtgtgctgcatcaatcccctccacttgaagaaaactcgtcctcgatttttttggcggcaaagaaaactcatctcggggaatattcgaagatatcaacaacgttcaaagtattggaaatgttcatatcagctagaagatcaatcttgtaagcatcatcgccaatcttccaataaaccaccaatcttcaaatgtgataagtgttcctcctcattcttactgtagatgagaatatcatcaaaataaaccacaaaaaattttctaataaattgacaaagaacctggttcattaaccgcatgaatgtgcttagcatacttgattgctcaaatgacatcactagtcattcataaaggtcatctttagtcttgaaagtcgtcttccactcatcgcctagtcgcatacaattctggtgacaaccacttcataaatcaagtttggtaaacaccacaacaccttttaacctgtcaagcatatcattcagacatgggatagaaaagcgatgcttgactgttattttgttgataacgtgactgtccacacacatgcaccagctattgtccttctttagggtgagtaaagctgggaccctcacaaggactcatgctctcacgaatcaagcctttatcaagcaactcgttaagttgtcgctcttgaaccctagtgggaatattaatagttgcttcaaattagcccttaaccactaatgctactacaaaatttggctccttgacttgcttaaagaaatctagacccactatgttggtgaataacaacttaccttccttagtaaccgaattgctttctaacaattgagattgtgacatcaaaatgatcttcttatcaactcaccaaaagacgaaagtattatcttcacccttgtaagtggcatcaacatcatagtgccacaccttgcccaataaaatatgataaacatccatacccatcacatcacatacgatctcatctttgtaatatttcccgattaataaaggaactttgcaaacctctagcacttgaaattttaggccctaaaaacagatctctctctcaatcttcaaatttagtgctttcaccaaagccttggaaacaacattctcgctactgccactgtcaataatcacgttgcatcctttattatgagtagtgcatcaagtctagaatattttatgttattgagagtcatctggcttctttgaggcaagcaaaagtcattggacaatgtacaccacttcttttcccacatttccttctacaaacctagcaccctcgtagatgtctttttcaagaacatgttcttcttcaatgccaccttcttttgcaaagttaacaaatcatctatttgggcaattatttgaaagatggcttggttggttgcatcagaaacattttccagggtttagacacgcataagggtcattattgactcgttgttgctactagtttcgaccttgagtattagatcgaacaagggttgaagttccactttgattctatgccgaattttgagttgaaggggcattgttgcctaaagttgtttggagcagaagaagcttcttgggttggtcaccaaaagttactttgagtgcatgtcgtggacctattgatctgattttctactttcatcgccaaattaactgcatttttcatggtccaaaccctttgtagagccaatcaatcttgaataactgactttaggcttctaatataatgagcaattaattaatcctctgtctcggacaaattaacttgggcatttaactgataaaattcctccgtgtattcgttcacagtacggttggcttgccaacaattttgatattgttggtataaaaattgctcataattcggagggacaaatcttctttataacaattgtttcatcttaggccaagtacaaccacgttgttttccttgctattaatgattatattgaagttgttcccaccatgcaaaagctccgccttttaacttatatacgccacgagctttacttgattttcttttgaaatattcaaatagtcaaaaaaaaattttgacggtatggacccaatcgagaaaatcttcaatgtgtaatcggtcgtctaaactcagtacatccatcttcattctaaattcttgctaattttgactccaattgttagctcgataatcaaaatgaaaatcatatttttccctaaaagaatgatccaacctctgttgctacctttgttgaatattcctctattgtggaagtcgaaaatcatcaccatctcaaaaaaatggaaagaacgcatcttgtccatcaaaaacctttatagttgctgatggaaagcaaccaccatcctcgaactcgtcgtcgccgctgattggaacccctcactagagttcatcattgtcgttgtcacactgcctaggagctcctcaattctgacgtccatacacccaaaatggaaagggctcgcaaaaatcaagatttgtggttggacctgtgcaaatcgtgcctccatcatcaatttttggcctgatctgtggctggcatcgatcgtcgtagctgccctcctactagttgccatgctggtctggtcattgttccatgggttcacgtttcccttcgatagtcaacgcaaccaccatttgcgtgtggttgcgaagagttttgttgatctcgtcaagtcattcgttgattttttcaaaccaccattcgtcattgatggttcatttttcactagaaccgtcgttagccatcaaatcgaggtaaaaatccttgctctaataccaattttggtgtagtggaaggtttgtttcaaaacaaagcggaaaacactcaataacaaacacaaagatcacaacaagattttaaaattagggaataattctaataaattatattgaaccccttctaacaattacaataagcctttaaataatatttgtaatgcaaaaataaaggaaataactgaaataggaaactaatgatgaacttaaaatagaaactaatgatgatcgtgtgctacatcagaggctgagaactccatggtaatatcctggttattgaatttgatgaagctagaaattagagagcctttcctatttctttccaagggaaggaagtttgggatcttgtttcctaaaagtgctcaaagcaaggagatgttcccaaatatatgagctgaaaactaagatccatgccaccaaacaagggaatcttgatgtgacatcatatcacagtaccctagaagtattatggcaggaacttgacatgtattagcatgtcaaaatggaatctgctgcggatgctgctaaacttgctgacttgcttgaacaagaacgtgtatttgagctccttgctggtctaaactctgtgttggatcaggtaagaagttgtgtctttggaaaagattaattcccttctttacatcaagctttttcccttgtacgtcttgaggaatccaagttgggagtcatggtgcaaacatcttctgagaaccatggctgaaaaaggaactatgggaagagaaaaagatccaaagtggtgtgacttctgcaagagatcaaagcacacctgagaaacatgctggagattgatggaaggcctcaatgaggaaacaagggaagaagatactccaaaagtaacaaagtgttgaacaactgcaaatacaacatgcactggctaatatgaatcctccaactattgggaacatgccattcacaaaagaacagattgatcttttatataatatcatgggaaaatctgaagtgtcttcatcttcgtgtgcttttgcacaatctggatcacatggtaaggcctataaaatctgttcaatttctaattccaacccttggattcttgattctggagctagtgatcatatgggtaaagaatctaattcttttgtatcctacaatacatgttttgggaaaaaggttcaggttgctaatggttgttctcttcctgtaaaaggaaaaggaaatgtgttgttctcaccaaaaatcactctaagctcagttttacatgtccctaatatgacctgcaatcttttgtcagtgagtaaacttacaaaagcaaataattgttcagtcgtcttctatcctaatcattatgtttttcgggacttatctttggggaggatgattggtagtgctaagaaaaagggtggactttattgtctagaactcgaggaaacaaagaagcttcaagcctattaaataaagggaattgcataaagaaatatggaggaatattggctgctacatgaaagattaggtcatcctagcttcttttatctaaagatacgtggcaacctcgatttttccaaacttagatgtgaagtgtgtgagttagcaaagaatcaccaagtttcttatcctttgagaattaaaagaaatgatattcctttctctattattcactctgatgtttggggaccctctcggattcattgtttgtctagtgctaagtggtttgtaagttttgtggatgattgtagcaagataacgtggaatttatctcttgaaagaaaaagttgagataataaatatactcaagttgttttacaaaatgattcaagcacaattttgtgcacaagtaaaagtagagtggcagaaagaaaaaatcaacacttacttgaggtggctcgagcatcgatgtttgcaagaaatgtccctaaacttttttggggtgatgccattctcacggctgcctacttgataaacaaaatgccctccaaaactctcgactttgatccccattagcaatcttgagaagtcatttctcccatattccaagtcttggttctctctctcccaaagtctgtggttgtagtgtatatgttcatgttcctagtaaggatagatctgaacttgatcctagggctaacaaatgcattttgctaggatactcacctacaaaaaaaaggatataaatgttttcatcctctatctaggaagaaatttgttaccatggatatgggatttttttaagaccaaccatactatcagaaaacagctcttcaaagggagaaaacacaaaatgaagatcagctacaatcatgttttattccattacatatgcctacttgggaaaatgaaagagagggggagaatcaaacaatccaaggaggaaaagatgttgaaaaggatgttgaacagcttgtttactccaaaagacattgggaatctatattggtataagaaactgttctccctatgcacgactcatcatccactctagaagaaggtacaacttccaactctaatccttcaaattcaatcctttatcattccaactcctctcttatttttaatactgacttggacattcttatagcaatacaaaatggtgtaaggggttgtaccaaacatcccttgtccaattttatgtcttatgacagaataaacaacaaatacaaagcctttgcaactcaattggctatggattcaatcccgaagtatttgggggaagccattgtcgatcccagatgaaaagaagccataaatgaagaaatgaaggcactaaacaaaaatcaaacttgggagatttctaatttgcctccaaggaaacatttagttggatgtaagtgggtgttcaccatcaagtacaaggcagatggcaccatagaaagctacaagccacgtttagttgctaagggatatatgtagtcttttgggattaactacggaaaaatgttcactctggtggacaaaagatgaattccatttgaatcctactatctctagcagcaaatcatgattggccactccaacaatttgatgtgaagaatgtttttctacatggaaacttagaagaagaagtctttatggatcctctacttggttttgaagatcaattcaacaaaaggaaagtatgtaaatttaagaagacattgtacgagttaaaacagtcttcaagggcatggttcggaaaatttactctttatctttcctcaagtttggttatcgaaaaagttaagagttccttgagaaaagattaaccatacttaccatctgcgttgatgaaatggaatctacatctctcaaaggaaatatatattcaacttgcttaatgaaacgggtatgataggatgcaaacccacagatgctcctactgatccaaaccagaagttagcaacccaagaaggtaatgttcttgtagataaatggagatatcaaaaggctgatttatctatctcatacttggccagacattgcatattctgttggagttgtaagccaactcatgcatgctccccttgaagaacacatggatgttgtgatgaggatcttaaggcatctaaaagctaccccaaggaaaggactcctgttttcaaacaataatcatttacatgttgaaggctatacagatgtggattaggctggatcattgactgactgaaggtcaactactggttactgcacctttgttggaggtaatttagtatcttggaggagtaaaaagcaaccagtagtctccagatctagtgttgaggttgagttccatgcaatgaccttaggaattcgtgagcctatgaagctattctgcgataacaaagctgcaattagtatcgctcacaaccgtgttcaatatgacagaactaacatactgaaatcaatatgcacttcattaaagagatgcttgatattgggattgtctacaccttacattcatactaaacttcaattggcagatctattcactaaaggtattgcaagactaagttgcaagtttatggcaagcaagttgagcatgcaagacattttcgaaccaacttgaggagaagtgttagaaatctgcataatttcttaatttcagggatataattgactgttattttgttactatgtatattcctagtgtcaaaatattgtgtgaatggccgaataccttggccttgagttttgtatattatatatagactttacaaggatgctatacatggaaagcaaataaaagcaaataaattcctgcatgattctagccctatacatgtaaactataatctgtcaaataatgtatgctaactgtacagaataataaatggagaaataaggaaacaattgtgggctaaaataaggaaagaagtgcggacaacccccctcaaattgatgcaggttgatcaacaagcatcaatttgctacttagcaagcaatgtcgatgacgagggagagccttggtgaagatatcaacaatttgtaagtcagtggaaatatgtggaagagtgataacacgagcttcaaaggcttcacggatagagtgatagtccacttcaatatgctttgtgcgctcatgataggcaggattggccgtgatttgaataacacttgtattatcggcatgtagaggtgtaggatcggtctcagaaaaatctaactccgcaagcaaaccttgaagccaaatgatttcaaaacaagcaagagacatcgcccagtactcagattctgtagatgacttaaaggctctgtcttgcttcttactttttcaagagatcaatgcatcacctaagaacacacaccaaccagtgatggagcgacgggtatccgcacaaccagcccaatcaacatcactataaacagcaaggcgagtagaattgcctgcagagaagaacaagccatgagtagaagagccttgaacatagcgtatgatcctacggacaacagccaaatgaagatgacgaggagtctaaaggaactggttgacttgctgtatagtaaaagaaatgtctggtctagtaatggtgagataaacaaggctacccaccaacttcctgtataaactgggatcagcaagtaagtcgccctcctctttgcgaagcttaacatttaattccatgggagtatcaacagaagtagccccttgtagaccaactgtagccaccaagtcactcgcatacttatgttgattgggggaaataccaaagagactatgatgcacctcaagaccaagaaaatatgtgagagacacaagatctttcatatgaaaggactcagagagatgagttttgagctgaccaagtaaagaaaaatcggaaccagtgatcacaatatcatcaacataaaccaaaagaacaacaatacccatgtatgatttccgaagaaacaaggaagtgtcatacttgctctgcctgaatgaaaattgtaataaagtggtgcggaatttatcaaaccaggccctcggagcctgtttaagaccataaagagagcaacgaagcttacacacgtgaagtcggagagggaaacaatcccgggggtggcttcatataaatacactctttaagatccccatgaagaaaagcattttttgcatccatttgatgtagtggccaatcactggaagcagcaagagctagaatcgtacgaacaatagtcattttagccacaggagcaaaggtctcttcataattgacaccatattcctgattattcccaagtgcaacaagtcgagctttgtaacgatctaaacttccatcagatcggaccttgactgagtaaacccatttgcaacccagaggaacaatagtgggaggacaaggctcaatgtcccaagtgtgattggcctctagagcggcaatttcttcctgcatagcttgtcgccaacaatcatgcttggcaatatgtgagtagcatatgggaatatcaaaattggacaatgcagcagtaagggctgaaatagaattgccagaaatggaagagggaaatccatacctattcggaggtatagacactcgaggagagcgacatactaaaggtgttggaggtgctggaactgactgaatctggagcgtggtaagatcagatatcgggtgagccaccgaaagagactgtgggcgggagtgtctcgtatacacaatacctggttgaaagcgagaactgactggatgaagatctgagaactgctgctcaaaagaggggaggaccacagtagaagaggatgacacagtagaaaatgatacaggaaaaaaatgttgattttcaaagaaaataacattcctagaaatacgtgtacgatgtaatgtaggatcatagcaaacaaatcccttttgacacattatatatcccaagaaagcacatcgaacagattgagcagataatttatgtcgctcatgaggaggtaaatgaacaaagcatacacaaccaaaaatacgaaggtgatcataactaggttgcttagcaaataagcagaaataaggagactccatatgtaggacttgagaaggtaaacgattaatcaagtgagtagcaattttcagagcctctacccaaaacatggatggaacagaagattctaacaagggagtatgtaccacatctaggagatgacgatttttgcgttcggcgactccattttgttgaggagtagagggacatgaacattgatgaataatacccttagaagccaagaatgcttgaaactcagtagacaaatactcaccaccggaatctgtgcgtaatgtcttaatagaagtagaaaattgattgtcaacatacgctaaaaactcagtgaaagtacgaaagacctcatatttagagcgaagaaagtagacccaagtaaatctgctatgatcatcaatgaaagtgacataatatttaaatttctcatgtgaactaaccagggaaggttcccaaacatcactatggataagatcaaagcagtgagatgctctacttgcatgcaaagggaaggaaagagtgttacttttaccaagtttgcaagaatcacactcaagagataaagaagaacgatccttattaccaggtaaattagagttcaatacatgagataagatctgagtattgggatggcctaaacgacgatgccacaccatactaagatctgaaacattattacaagcaaaagacttaatagaagaaagtggagaaaaatctggaacaggtaaaaatagtggaaacaagcgccccactttaggtcccttcgcgatcggctcccccgttacctggtcttgcacatcacaaccattactagaaaaattaacagcacaattgttatcaactaattggccaacaaaaataagattcgtggaaagctaaggagcaagaaacacatcaatgaacttagaagaggcatcgccgatagcagctatgggcaaagagctgccattggcagtctgaatggaagattgaccggcgtagggccaaacatgacacaaagcggtgggattattagtcatgtgattagaggcccccgagtccacgtactagagtttagtagaattgttaccttggaaccccattactaataatgctgaaattaacatccattgcaccatttttggggtgcagtaatctggtgcaggaggtgcaggaacaaagcacgcagctgaaggagagtcgtgtgctgcagaagttgctacatgaaggacaataaccgaagtctgaaatgcttgggcctgacgattctgggggcaaatatgacattctttgataatgtgacccttcctcttgcaataagaacaaaacttcttaggacaagtggcagcaatatgcccatattccttgtaacaaaaacactgcaagtttttagaatgcataggtggtctgcgtccttaggcaacataatgtcacaagatgcttcaaatgaccctccccatgggcttatataggaggagggaagcttttggagactcctggaaccatctacactaagctattggagggaagagtgtggaaggttctagagaggcctagagatgtccacacatctctacactatggtggaaggcatgaaaggagtccaaggctttcaagagaattctagagatctcttgtacatagggttgtacatagaattgtgtagggtattctagaatcttcttgatttgtaaggaaccctccaaggttccagagagttccattggtgcctataaataggtgagggcctcatttggccaagacatcacccaaatcacttcctaaccaagcaagtgagtcttcaaagcacttgtaaaggcttccttgagtaataagagcttccattctctaagagttgcctactaagcttcttaagctttcaagtcgtgagcatcttagcctagcaatgctgacgtagcaagatcaagtgtcttgacttgcttaagtgtcgcacgagcttagtgaacgactaagtccgtgacaagtggtatcagagcgtggctatgaagcgagcgtagtaaaggaagcatgtcgggctctaacgtagagaagactagccagcaaactcgtggaaaggagattgagcctactgcgcgggacaggggcaggaaggataaatatcgtgatgtcggtgctaacatggaggcaaggttagctaaaatggagctagccatggcggacacccaggaaagggtggacttgatcgagcaaggcatggagaagggcttagaggatctaaaggagcagatccaagaccttcgtgagggggtgctaggctcacaagttcatccgatgtcacacaaggagttcatgtccttccaagataaggtcatgagcatgcttgctagcatggagtcaaggatagaggccttgaccactcgaatagagtcccgagaccatgaggttaggcaggagttggccatctagaaggttgctgtgtcggcacgggccatggccacacaggaggcatctagggtggaagtgccgaagccacatgggtttagtggcaagcgggatgccaaggagttggataacttcttatggcatatggagcgatacttcgaggctatcgcattagctgatgaggcagctaaggtaaggactttaaccctctaccttactgacacggctactctatggtggcgtcggaggtttgctgatatggagaaaggcatttgcaccatagagacgtgggaggactttaagaaggagatcaaaaggcagttctaccccgaggacgtggcttacctggctaggaaaaacatgaggcatctcaagcacacaggctcgatatgcgtgtcaaggagttctcttcgctcatgcttaagattcctaacatgacagaggaggagttgctattcaacttcatggataacctgcaagggtgggccgagcaggaattaagacgccgaggtgttcaagacgtagtcactgctatggcagtagcagagtctttaacggattacaagaggggagactcttccaaggttgagtctttggaggatagccacgccatgggtgggggagacgaggtctcaagggaccacaatgctcctagaatgggatcaggcaagacgcctaacgtccgagaaggaaggggtaaggcggaaaggaaggagtttacacccaaaatcaaatgcttcctatgtgacggtccacattggacacgggattgtccaaagaggaaggcgctcagtgccatgatcgaggagagggaacaggaggacgaagcacatgtgggctcgatgcaactactaggtgccctccaattcaacccaaagccgagtatgcctaagacctccttactatcaagagtgcaagtaaaggaggcaaaaggggtgcgagctgaggtagctcgcacacacatggacgaggtcaccaagggaaaggtgaactcgatgggtaagaggaagcaacactctaagcatcgaaagtgcacgggtctgcatctatttgtagcctcacgagagaagaaggtgaagaatatcctggctgaacaagtcaccaggagacaaagagtccctcctgtgatagagtatctagtccaatggaaatgactacctaagaggcaggcaagctgggaacatgcggattccttgagaaggttctagaaacacagagaggtttcaagaagaggcaacgacgaggacgtcgacgacataggtgagggagagtgtcacaagatgcttcaaatgaccctccccatgggcttatataggaggaggggaagcttctggagactcctggaaccatctacactaagccattggagggaagagtgtggaaggttctagagaggcctagagatgtccacacatctctacactatggtggaaggcatgagaggagtccaaggctttctagagaattctagagatctcttgtacatagggttgtacatagaattgtgtagggtattctagaatcttcttgatttgtaaggaaccctccaaggttccagagagttccattggtgcctataaataggtgagggtctcatttggccaagacaccacccaaatcacttcctaaccaagcaagtgagtcttcaaagcacttgtaaaggcttccttgagtaataagagcttccattctctaagagttgcctactaagcttcttaagctttcaagtcgtgagcatcttagcctagcaagctaagcattgggagcaaggttgacgtaacaagatcaagtgtcttgacttgcttaagtgtcgcacgagtttagtgaacaactaagtccatgacaataagctacagttgccgtcccggaactgccatgagattgctccaaaatagcttgagtactaaggcgttgctcttcgcgaagtaactcaccaaaacaaatatcaagagaaggaacatgagatctgttcagtaaagaggagcggatagattcatattccggacgtagtttcataagaaactgatcacgccgggtagtcgcgtgaatagtctgaatagttgagagagcggcaataggaacatccattgtaaccaaatcagcatattcatgccaaagagttagaaatgccgagtagtagttttggatggaaagactaccatgttgaaacatggcaatcgcatgttctaactgaaagtgacgagcatcgttattttgatgatacactttcttcaagtaagcccacatagattgagcagagcgatggggctgcaagtgggtgacaatatgaggctccactgaaccaagaagccaagacatgatgcgtgcatcaagcacaacccatgaaggagaagacccaacatcctgagatttgtcaaaagtggatggtttttcaacatccgtgccatcaatatgaccccaaaggtcttttcccttgagaaaaagttcaaactgaaatgcccaggtagaataatttgtgcctgtaaacttaacacacacaggtacggaatccatagaaaataaatagaacccgagacaaaaggatggaccaaaaaaaaatcccagaagaaaactgacccatgacagccacagaaataccgagaaaaatggttgtggttgggtgcagcacggatcaacacagacttgaccgaaagacacgagaggcacctccgaaactgagaagacaaaaaagaatttgagggaagaaaaattagcaaccttgctctgataccatgtcaaaatattgtgtgaatggccgaataccttggtcttgagttttgtatattatatatagactttacaaggatgctatacatggaaagcaaataaattcccgcatgattctagtcctatacatgtaaactataatctatcaaataatgtatgctaactgtacagaataataaatggagaaataaggaaacaattgtgggctaaaataaggaaagaagtgtggacagcaaagctgtcttttgacacctaggacttagctgttagattagtcaaatatttttctttataggacaattgtgttacagctagaaagttgtaaaatctcggcttgattttagcctaatttggtgacaaccttgtatatatatgtgtatgattcttattcaataataataagaagaattggttctaaccaatactagcataaaaatatgattgatgaaagtgactcacataacatgaagcagagttgtagagcagtaagtcatcatatgggtaagtggtattctattgatgtcattttatgattttgttaaaaataaaaagcaacctgtgttaaacttctaattgaaccaaaatcttaagttgtaaggtaatgagctaacaaaatatatcaggctggctaacacttaatactccatctcacatgcagcaccttccctccaacatatggtcaacaaataaaggaataaacagacaaggaggtttgaatgtaaagctctagtgtcatgttaaagtactaattaacacaaaagattaagatgttagataaggggccaataatgtatgtcaagtgtgttaacactcaacatcgatttgtagagtccaattaatgtgtgtaaattgtaatacaagatgctaaaactcagctactgcagcaagaattgtacaatttaaaatgccaatatctcatcaattttatgacaaatttgtggaaattccaaacttattttcttgagggaatttgatgtactggttttatatcttctttaaaacagaatttgtgtatttcatcttttgactagggaaggtaggagtttttatggatagctctgaactttctccactttttgttgcatctgctcaaactgtgccatactgcaacctgtatagatatgtatgggttgaaaagatgcagcaaaggttggagtgagtaatggctatgcgttttttatttgtacttaaattacagaaaatcttaagcttacattccaaaaacttgtcattcatgtatctttagaattttggaaattacctttcagtgtttctttagggtattccaaaaaatatccctgttgcatctgtaaattctctagagctttcattgtgtgattttctttaatgatatgtgatctgccatcgcattgttattttttatttctataggagataattggttgctttttctccctcagggtggatat

SEQ ID NO: 10759 - DNA, 14351 bp, Vitis vinifera
  Intron number 2 from transcript GSVIVT01020732001 (locus G SVIVG01020732001) derived from phytozome v7.0 (chr-ID chr1 2; pos 2547587 to 2561937)
aaagttttgccttaaaacaagcttgtttttcttccatcatgacattggccttggattgtaccgctgagcctcctgagaagcgaattaacatgaaagatgttgtggatagactcaagatcttcaacaaattgctgatataaggactccacaattaagaaaaaaaaaaaggcatgaagatcatgtccctttcttccaccctgagcttgtttaagagttcacaaatcaagaattgagggaccattgggcatggcctgctaggcagttgaaagttcctcattatatgaaccctatgcaaattatgctcaagtgtttgtgtagttccatccattttccctaatgtaattcaacttgaataatgtcatgggtctgaatgcttttattttgtatttttctaatagcataatattaagtgaaggtgcccaatgcgtaacttctagaagaacatttcgtgcttttctttttaagatatgatagactttactacaataaattatttgtctataattgatcactttagcaaactgtctggtcaaaattgacctttgcttgcagacatatcttacttaatttcttataacttgcaattacttccagattatgtataattgaatttcgcttatttcaaaattatggctcatgagaattaagaagttcgatgtgtctttcatcttccaaacatgttttatggtttgaaaagaatataatataaattgacaaaagttagctattgaaagaatagagtaaaagtggtgctcattttacttaatcagatatatgacatgatcaatatttatcatgtaatctgaacaattttgaaaaggtcaataattttaattttgtgtttgtatttgtgagaattgagatctcaaatttgaaaaagaatttagaaaaattaatgttaaaaaaaaatgagtgaagattaactttggggatgatatatacaagtcatttgtcaataggaaataacttttttgaaaataaccatcatggtaatgtgggtgtcacatagcactgctaaccatggttttgtttctataaactaaaatttgtcatttcatcaaagtcatatagcaatcaacaagttcgaactcagattgaattttagaatcaaatagatataacttagatttcctatgaatactacaaattaggaatttgaaaatatgggaaataagactttcacaaaatatattaaaacgtctagtaggaacaataatcctaaaaaaatatggaattatttaagtaaattagattaaaaaaaaaaatcagcaattcatcaaacaaattcatacttgaatgaaatatcatgaccattagaattgatacatctatacctataaaagaatattaaggtagggaattgtaagcacaaggttaaggaattaattagtttgagtccaattagatgtaattattatttcgaagttgttaaacaatttattaaattattaaacagattacatagattaaattatgaaaaaaaagaagaagagtagcatcggaaagtgtgactaccaagtcaataaccaatgttcttgcaccactttggtaagtgaactgttatcactctggatgggattacattgaagcccttgttcacctctgaggacattttttccaaaaaaggttgttgctcacgaattacttgacagacgttaagatcactcacagctctcaccgatctcaccggtgtaacggctgctgcttgcttcagaagttgttgcacttcttaagttgggtagtttgtaagactttgttagattagttaagactgttacacaatggaaaattctatggcaccgaagtgggtaccgcacctgcaaaattcctgtcgttagatcaaaagcttccaatcacgactgaatgcctttgcacaacttagccggacagctccatgtgcaattggtgtttttttaaccatcgttgcctcttcttgaatacgctttgcttgaccaacttttcaggtttctttcttggttttggtaggactgcactgtttttgcccctgcttgcactccatgacccacttttttccaaggaggtggtttccaatcaatttttctctccttgaatacgccattagatcgtgatatgcggacagctctatatgcaaattgagttttgtctcctgtggaatgtggactacagcaccgtgataacccactcttcactgcaccaggcttcacctgaggttagctcttttgtccttctggaaaactgcaccgcagctgtcccttcttgaccggctcaacccactttgttctttcttcattcttcctacatttctcaaattgcattatgacatgcaaagttttgttgaattgttttgagtatgccctgctagagacagttgcagcagctctggtcataatccatgctgtcagtgatgtgtaggaaatatcaatttttacgggagttagaaaagtcttgcttcttcgatgattatccaaagataggtttggaacttatttctttagaaaatgtaaatcttcatgtatatatatgaatctccaacaatccctactttctttaaaatgaaagtattaactttaaatcaattacataaattccttattccactcgctttcaaatgaaagtattcttatagaatagatattaactttaaatactttatcaaatattccaccactaaaactcaatggcaaaaacaatgaaggatagaaaataaaaaataaaaaataaaattattttatataaaatgaaataaaaatacctttgaacctcttcatgtatataggtaccgtttggagttatttacgactgatttcttcaatgttgtctagaatatatactagagatagctcaaatactcacaatcatacacaaagaaagaggagcgatataccatcttcttacttgcaaaatggggattggtagttgaaaattttattattattaatctaccatttccaaagtgaaaccatcaaaactttctaaatttgaatttcttgttaataaagtttgatagaagataagcaaaataaaattataaggtataatataagtactttttaataataataataataataataataataacattattattattattattatagttatggatttccttaatataatacattagatgttctttaagtaaaggaatattgttattgcttttataataatatataagaacattagaaaaaaatagttaatgacaaatttaataatcataatttaatatttaaaactaccatcaacaataatgagattcgacatctatagattttagaggatttataatataatcttgtaagatttacatgtttaatttacatgagcaaattactaataaattatttagtccaataaatcgcaatagatgtgatattttatttgaaaataacttttaaagtttaatacattaactagataatatttgaaaataacatttaaatttttttatataattagtgttggtttaattttgtaaaataaattaaccttagtctttaattattttcattatcaaagagtcaaaaataatgtgaaactaaaaattttaaaaaaaggttaattaatactacagtttttttttgttttctttttggactaaaattattcatatttgcaacatgaaaaaccatatccttgagtaaaaaatatatatatatatatatattacacaatgtgtattgaaccaaaccaaaaatataaaatataaaactttgaatatacctccatttttttttatttttttttttagaaacagaaataaaaaagctctattttttttttaactgttttcttttttcaaagtctaaacaaatattttttgtttgtgctatatatttgaaaactaaaatttccataaaattttatcaaaactttaaacaagtaatcaatataaaaagattaatttaatcactcatatttctagtcattaaactaaacattgtcatcaacaagtatttaacatttatataaccttgctaatcaaaaacataaatatgatttttcttaatatatatatatatatatatatatatatatatatatatatatatatatatatatatatatatatatatattaatcattatttggttgcataggaattttaagaaatttaattattttactaagaaattcatcatgaagcttaatttgtaaagttacaaaaaaagtccatgaaatggagctttttgttggaagttgatagcgtggaaatgatgtctctgctactaatgggtttgcagtccctgtttttgccatgagccatgtgctcatgtttgtattgtgggctctggttgctgctattccttgtcaggacaggggcctccagattcattgttcagtcccccgacgttcctcatggagtgctccatttatcttgcttcaagagagaattatggaggattcaaagaagcgggagcgacggaattctagcgggttgttgaaggagatcaatcagatggaaaggtgtgcgtctcacatgacagacttagtggattctgttcactttcctctgacggatgaacataagacagaagcaggacagcaagagcagtgatgaggttttccacctggtctggttcctgctccgggttgaaagtgctgtccccatattcatcagaggaggtgcatggcaaggattctgaagaagcaagccaagttactgtttggcttcttatgccatctgatcagataagatgtgttattgggaaaggtggacagacaattcagagtatacgcagtgaaagtggtgtacaaattcacattctaaaggatgatcacttaccttcttgtgcattgagttccgatgagcttgttcagatttctggagaaccctcccttgttaggaaggctctttatcaaatggcatctcgtcttcatgacaatccttcccgatcttgaaaacctcgtcaacgagcaggtgtcttcacaaacatactccttggatgcaaatctttgccttctccgcctctaccaatttgagccagagcgaatgagtacccaaatcgttgctcagattttggtgaaggcccttatggcaatgccagctccagatttcagcctgtctctttttaattccagaacgagtgcaaatggaggaatagttttaagacttcgattgttctctcacattatttggagacagcaaggttccgtcagttctgggatgaagcagctaagaattgacacatagttgaagttgttccaggttttgagcaagaatccaagcctatgccattcacgttatttccttgacttatcaaaaggttcctaggactgtatttgctgttatcattggtggagttcttgagaaggaggtgagaactgcaacactaaaagaaccctcaggccatcaggagcccgcatggtgtttttccactgaagatgagctaccatctagagtccagaacctcaccccttgctttctgtcatcacataaatcctcgtaccccactcttgcatgtcatatatggccacctttcgtgggccattcttaaaacctacgtgtcctacctcctatatttttatgcatgcctccaaaactcggttttcaaaaatcctgtttccaaataattttaattcttcaatttttctctcttggttttaaataaatccaattttaataaaccaattcctaccattttccattaggcatgcatcttttattttttttttattttttttatttttttttcttaattttaaatattttctattttttaataaaattggttgccacatttctttccaacaaacacttttcacaaattctccttgatttttttaataattttcttattttcattttttttaataagcatgaataattctataatttcaagtaatgaaatttatgaagttaactcatgctaaaataaatcgagctttggtggggcccaacatatgggattttctcattgatcgattgattgctatgtttaactggcttgcctcactctatggcatgcatacaatcatcttgtatttgtgtactaaccttgtctcttatgatagtacttagcttacgattaaggtacacctcatacccgattgtgtttatttatttatttgttatcatgtgtgtcttgttttcacacccctgattactgtacgatatcaacaattaatcaatcaattgtcacacttgtttcacctaattagtagagacccattttaggagcttagaagggtggtacggtttttatcgtaacttcccaataggtaacctgacctccgaattcagactcgatttttcatagatctgtttttccttcaggagtcacatttagggttttctttcttattttatttttccttttaaaaataaaacaaaaataagtgacgactctaagttattttctaaaaaataaatcatttttcgaaataaaaagcgagtctcaccatttaagtgggaaacgcatgcgtgtagaaatacggggttcacaaaggtataatatacgtactttttaataataataataataacaacattattgttattattattatagttatggatttccttaatataatacgttagatgctctttaagtaaaggaatattgttattgcttttataataatatataagaacattagagaaaaaacagttagtaatgtatttattgacaaatttagtaaatataatttaacatttacaactaccatcaataagaatgagattcgacatctatagaatttagaggatttataacataatcttgttagatttatatgtttaatttacagtgagcaaattactaataaattatttagtccagtaaattgcaatagatgtgatattttatatgaaaataatttttacggattaatacattaactatataatatttgaaaagaacatttaaatttttttatataatgagtgtagggttaattttgtaaaataaattagccttagtctttaattattttcattatcaaagagttaaaaataatgtgaaactgataaaaaactaaacacacacaaaaaaggttaattaatactacagttttttcttttctttttttctttttggactaaaattatccatatttgcagcatgaaaaaccatatccttgagtaaaaaaaaataaaaaattacacaatgtatattgaaccaaaccagaaatataaatatccatatttgcagcatgaaaaaccatatccttgagtaaaaataaaaaaatactaacaatgtgtattgactggcttcacctcctaggacatctttccccgaaaaaaggtcgttgctcactaattacttaacagacgttaagatcactcacagctctcactggtctcaccggtgtaacggctactgcttgctgctgtacttcagaagctgtcgcacttctaaagttatataggtagtttgttagactttgttagaatagttagactgttacacagtggaaaattctacggcaccgaagtgggtagcgcagctgcaaaattcttgtcgttggatcaaaagcctctaatcaagactgaatgcctttgcaccacttagctggactgcaccattcgtattgcctattcttgaatacactttgcttgaccaacttttcaggtttctttctcggttttggcaggactgcactgttgttgcccctgcttgccctccatgacccacttttttccaaggaggtggtttcccaccaatttctttcttcttgaatacacctttagatcgtcatatgctgacagctcttcactgcaccaggcttgacccgaggttagctcttttgtccttttggaaaactgcaccgcactgtcccttcttgaccggctcaacccacttctccgaaagaggttgagggtgtcttgtccctttagggatcaccacatagggtttacccagcaattactttgttctttcttcattcttcctacatttctccaattccattatgacatgcagatgcttgttgcattgttttgagtgtgtccagctggagacagttgcagcagctctggtcataatccatgctttcagtcatgtgtaggaaatatcaaactttatgtttggtcatgcagaaaatgacacctgaattataatttttatgggagtttgaaaagtctcgcttctttgatgattatccaaagattcaatcatgaaatgcggaaaatgtaaattcatgtatataggtttgaaacttatttctttagaaaatgtaaatcttcatgtgtatatgaatctcctacattccctaatttcaaacccatatcaatggtgtgtgtaccccatttatatttattacaaccatcggttatatatatcacattcaaaacacccacaatcatatacaaagaattttagcaaatttttggttgcaaaatggggattggtagttgaaaattttattattattgattattatttcattagagggttgtcaaatttcttgttaataaagtttcacaaaagaacagaaaataaaattacaaggtataatatatgtactttttaataataataataataatattatttgtattttgtctatcattatatatatatatatattgataatttatttaaagttataaatttgttaatattattacatagttatggatttctttaatataatatgctagatgctcttttgagtaaaggaatattgttattgcttttataataatatataagaacattagaaaaaaacagttaatgatgtatttttttggcaaatttaataatcataatttcatatttgaaactaccaataacataatgagattcgacatctataaaatttacaggatttataacatagtctaattagatttatatgtttaatttacatgaacaaattaaaaataaattatttagttgagtaaattacaatagatatgatattttatatcaaaagataatttttactgatgaatactttaaatatataatatgggaaaagatcattgaaaagtattaataaactgaggtggtgtttgtttttttacttaattctaaatagaaccttaatgcttaatagtgtcaaatattagattgtttgtttttgtagtattttatttctattaagtattaaaaaaataaaaataaaaacaatatgttattttttctatttagaaaaagctacatattttaactttttctatttagtaaaaagtttataataagtcatgaaaaatagaaaaataaacaacctaaattctaaaactaaattgttttcagcaaaaagccaaaaaaaacaaacaccacctgagtgtagggttaattttgtaaaataaattatctttagtctttaatgactttcattatcaatgagttaaattaaattcaatacattgaactatcataccaaatgcttttcactttgattgatttagcaattattataaagcttataatttttagaaaataagaaaataaatcttaaaaatcattcacataaggtagacagctctatttgcaagtggaactttgtctactgtggcatgaggactacggcaccatgattgcccactcttcagtgcaccaggcttgacccgggtagctcttttgtcccttttggaaaactgcaccgtaactattgccccttcttgtccggcttaacccacttctccaaaagcggttgagggtgttcttgtcactttagggaccactacacaggggttacccaacaattactttaatatgtctaacgagagacagttgcagcagctctagtcataatccatgcattctatgaggtgtaggaaataccaaactttgtgtttgctcatgcagaaaatgactctggatttataatttttatgggagttggaaaagtctttgcttctttgatccatgattatccaatgattcaatcaggacaagcagaaaatgtaaatcttcatgtatataggtttgccagttatttcttcaaaaaatataaatattcatgtatatatgaatctccaacaagccctaatttcacccctataaattcgatatttcactcctataatttgtgtcatgcttccatattatattactcttctccaataatcgttgaatctgctttattaattctactccaatatctcttaatttcgctttcaaggacaaagttataaatcttctattctattaatttatatcatgatctaattgctttgtgtccttagtcacattgctttgtacccttgatcacattgctttgtagagaggtttcatttcttcatgtttttgtcccaattggttgatcgtaccatagttccttttgctttgcatccccattgttacaaaatcaaataaataagttatactcaactctcaatggtgtgcacccaattcatttgtattacaacgtaccatatgctatatatcacattcaaatggaagtattcttatagaattgatattgatgttaaacacttgaccaaatgtttcattatttagaccaaagctcaatggcaaaaacaatgaaggataaatcattagataaggtagactttaggattttaattgagctaaaatatttttattagattattaaaaaccggatgcatgctcaaacctagcgcttaattaagtactcaaatttaggctcaagcgtttgagagcactcaagcacgagaagcactctagtatttgagcgtttgaagtcgatctttccaaatttgaattcccaattttgttttaattcttttcatgttttaagaattggtttttggaaactttaggtgtcaatccactagggtttcatccttgtataaatattatgtctaggaattgttttcgttattgatggaaatttgaaaaaaagattatcagcctttatggattctaaaactcctaggtttttgtaattctcattctttcagttcgtgagagagatctgcatccctttaggtgttgagataatccattgattgcatgtgtggtgttgtgttacgaatttgaaaactagtatatgtattgaagaataaaacttaaggataacatgcaccatataaatttgtatatttttcttttgaaagaagatttgtgttttgtagtctttaatcctatgggttttatatctgtatatttacaatgatatagataaggaatgataaatatttgttcatatatatatattagattattaaggtagagaattccaagcacaaggttaaggaattaataagtttgagtcaaattagatgtaattacattgaagttgttaaaacgatttattaaattattaaacagattacattagattgaattatctagaaaaagagtagcacgggaaaagtgtgactaccaagtcaataaccaatgtttttgcaccactttaataagtgaactgtaccatatggttatcattctggatgggactacattgaagccctttttcacctcctaggacatatttttccagaaaaagttgttgctcacgaattacttgatagacgttaagatcactcacagcttctcactggtctcactggtgtaacggctgctgcttgctgctgtacttcagaagttgttgcacttctaaagttaggtagtttgttagactttgttagattagttaggctgttacacaatggaaaattctgttgtacggacgtgggtacggtaccagcaaaattcccgtttttggatcagaagcttccaatcaagactgaatgcctttgcaccacttagctggactgcatcatcgtattgcctcttcttgaatacgctttgcttgatcaacttgcccctgcttgccctccatgacccacttttttccaaggaggtgataacccactcttcactgcaccatgcttcacccgaggttagctcttttgtccttttggaaaactgcaccgcagctgtcccttcttgaccggctcaacccacgtctccaaaagaggttgagggttagggatcaccacacagggtttacccaccaattactttgttctttcttcattcttcctacatttctccaattgcattatgaaatgcaaatgcttgttgcattgtttcgagtgtgtccagctagagacagttgcagcagctctggtcataatccatgctttcagtgatgtgcaggaaacatcaaactttatatttggtcatgcagaaaatgacacctgaattataatttttatgggagttagaaaagtcttgcttctttgatgattatccaaagattcaatcatgaaatgcagaaaatgtaaacttcatgtatataggtttcgaacttatttctttagaaaatgtaaatttttatgtgtatatatgaatctccaacaatccctaatttcacacccatatcaatggtgtgcgtaccccattcatatgtattacaatcatctgctatatatatcacattcaaacaaaagtatgcttatagaattgatattgaatttaaatacttgataaaattaatattccattacttaaatcaaaactcaatggcagaaacaatgaaggatagaaattaaaaaagaaataaaattattttacataaaacgaaataaaaataccttttgaagctcttcatgtagataggtttggagcttatttattgcttcttcattgacagatttcttccatgttgtctagaatatataccaaagatagctcgaaacatccacaatcatatacaaagaaagaggagaaatatgacatcttttagcaaatatttacttgcaaaatggggattagtagttgaaaattttattattattgagctaccatttccaagtaaactcatcaaaacctcctaattacaaggtagtagctgttggggtgttctcttgaaatataaaattccatatagactcttgaacacttaaatgtatagcaaaaatttaaatggtttcagaaatattttcggtttaaaaaaaaaaaactaacacgcttacttttggttttatttttaatggttcgattgccttgatttttaaatcatataataaatttatttttgaaaaatgaaatgtctttaccctaataattatttataaaattttctgaagggcagctttttgaaaaaatttcaagtccttcaccaatcctctttttccacaagtaatgttacattctagatttggctatatttttatctgcttcttcaatatatttgatagagaagttatatacaaattatcacacactctctctatttaaattgattgaaaaaagtggaccaaaaaaagtatcatttgcctttctaaattgacataaccaatagtatagcgtcgctctaatgaaatgataaatcatttgttatgatgtgatatagatatgaaatgataaatcttttgttcaaatataaattaggttgttttgtttgaattaacaattttgttctattcatcttgacttagcaattatttacttgacttttcttactctctattgaagattcaaaattgttgtatcatcaacccaaaattaaacaagtatagagagattcaaaaaaggctaattaggataaattatgagataaaattggctttaggtttttaattaagctaaaatatttttaaatagattattaaaaactagaccaacactcaaacctagtgctcaagcactttaagaacacccaagcgtttgaagcaaatttttccaaatttgaattcttgattttgttttaatgataggtgtccgtccactaaggtttcatctctatataaatattgtgcctaaaaatcattttggttattgatgcgaatttcataaaaagattattagcctttactacatcccaatattcccatatttttgtgagtctcattctttgggttggtgagagagatctgtatcccttcaagtgttaaggtagtccacttggtgcagatatgatcttgcattttggacttaaaaactagtatatatattagaaattaaaacttagggagaacatttgccatgtaaatttgtatacttttcttctaataatgggcttctgctctatagtctcttaccatgtgattttttttacatttatatggtatttgggagattttatgggtggtttttcatgtaaaaattgttggtttctttttcttttttttctaattattaaagaggaattaaaaaaaaattgtattaaaaagaagataatacgatttaccccgtaggtgtttcgtaattgaaatatacaaacttttaaaatgtcatacatttaacttataaaatgtggagaagatttctagtgtataattaatatagagaattccaagcataaggttaatggatttagattgagtgcaatcatcttgagttgtaattatatcaaagttgttaaagtaatccattaaattaattattaaataggtcacaatcttctaaacaaggagtaacataggaaagagattgccaagtcaataaccaatgcttttgaaccacttagatagttcc

SEQ ID NO: 10760 - DNA, 11804 bp, Vitis vinifera
  Intron number 20 from transcript GSVIVT01023271001 (locus GSVIVG01023271001) derived from phytozome v7.0 (chr-ID chr 12; pos 20330306 to 20342109)
aggtgtttctgcagcctcctgaaaacatacgaaaggtaagttataccacttaaaagtggttggtttttcatgttgatatttattagcaactttttttttttccaattcttggttgtgtaaaactatattttttttttcagtgcaattgtttgtttgtgtatgttttatgccacaatgctaacttttcaatatgtacacatttcagtgtaaaatttatgttaaaatatcaagtctagttttgacaagcttatcgatacttaatttgagaatagaagttaaaagaagcacaaacatatctgagacagggtgatgctttcattctcctagtaaaataagcaagtagtatcaagaaacaaatatattattttgaaagtggaatcaatggttctgcagcgatctttttccttccccagtggttgttatgccatggcatctactttctcaaggtagcctggatttaacaactgagaaatctcgttcaactgagatttggaacctcgaatccccgaagtattttcttacaaaacttacatcaatgaataattaggagtttgctgctatgtttttctgttatttgtttccattaatctgaactgattactgatcagtttcggatatctaggtgttctgatagttaggtcctagagttgtgcttgttagtttctacattcttgatagttggttacacggttaagctgcagacttagcctatttatttgtttccttgtgatttttcatggtagtaagttattaatctttaattttgttatgcaagttaaattctttgttagttcgtccttgttagagatacctaggatgcgtactagaggtttgtggatgcataaaagtttatgatcaatggctgacttggtgtgattttatgtgattgataacggaggagaatctaccaaatgaatattgggttttaaatgccttaaatatttgaactttttatcagattacttgttagaaaattgatgaaggatgaatttcaagttttaaaatatgattccagacttagatggcctatggcctatattagtgatccaatcttagaagataaaaaattctttaatcaatacttgttatcccttagtccttagtcggaaactagattcgtgaaaatctccacaattaattatcatagttttctcattttatcaatcaaatcataattttaatctaatcactttttcataaaagtcactacttgatttggtttaggcaaaactagttaaattttctgattccttgagaacgataacctgaaatactataaagtcgtggtaactctatctttggtttttcttgatcagggttatcacgtatttaggctttagcattttatttacaattgagattttcggtcagctttcttaccgcatttgaaaggttttttaggagaccatccgttaggctcaatgtgcatttgttgagagtaggcaaatcctagatgcgatattggttgctaataaagtggttgatgagagaatatatgctggaaaatttggagttgtcttcaagatagactttgaaaaggcatatgatcatgtgaactaggatttcttggatcatgctttaaagaggaaaggtttttagtctaaggtggaggatgttgattaggggttgcttatcttcaacctcttttattgtcatagtgaatagttatgccaaaggttgggttaaagcatttagagttttaagccaagttggccctctctacccttccctttttaccattacaattgatatgttgagtagaatggttgtaagagtataggattgcaatttagtggaaggctttgtgatagggaagaagcagacatgggtgtctcgtctccagtttggatgatactatttttttctttaaagcaaattgtgaggagttgctaagtcttaagcttatcctattggtattgggacacatatcatgtatcaagattaatctagagaagaacactgtagtaggcattaatgagagagaggatgttattgttgatctagcttctctgatggaatgtaggtctttgattggtgccttacttaggtctccctttaaggggaaatcttagagtcgattctttttaggttccagtgatagataggatttcttattggctagatggttggaaaaaaaactttgtccttgggaggtagaattacacttgggcaatcttgtttatctcttatccacgcttatttccattagatttttaagatccttattaaagtgccttctagaattaagacattgcaaagatactttctttggttggggttagaggaaaggaaaaaagattacttagttatgtcggaccaagtgtgcaaatcgaaatgggatgaaggatttgggttagagagaatctctttgaggaataaagcccttgtaagaaagtggatgtgaaggtttcctataggtaggaacactttctggcatagggtcatcttaagaatttatgggatgcactctaatgattgggatgccaatattggactaaaattcttttttggaggatacttggttaggtgattaacctctcaagtatcaatttccaaatcttttcagagttatatggtctaaaaatgtgtttgtttccttatctaaagactggtcctttattggtctatcctggatttttaattattgtcgaaacctttctgatccagagacagaggatctttctagcctcctcttctccttgcatcatgtgagcattttaacctcctttatggatgaaagggtgtagtctttgattccctcatatcttttctgtgtgctctttctttaaatctctctcagttttgcctacctttcttgtcttaaccccttttttcctactaagttaatcttgaactcaaaagctccactaaaagtaaaggcctttgcttgatttgtggtcaattaacaccaattacttgctttagttgaggaggccctacaaagctcttagcctaaactaatgcataatgcgtttgaagagtagtgaattaactgatcatctttttctctattgtcccacaacattacaagtttggcataaattgttcaacatcgctagtctcaaatggattcctcctagaggcatagtggagatgtcgagaatctcctttaaaggctttggcaacctacctagaggaaagattctttaataggtgattgtattatccttggtttggttggagaggaatgcaaggttatttgagcataaatagagatcaatggacatttgggatatgatttactttctctatatctttgggccttagtcaccgagccttgagtgcttgctattcaaacaggtcgaaaaggagagaaatgatggactggttaccccttccaatgggtttggcaaagttaaacttgacggatgttcctttggtaatcttggatggttgggtatagaaggagtgattagagattattcaagtatagtgttgagagcttactctaagcatgtagaaaagggcttgcttccatggaaatatagaaaaagaggtctttgtggatgtacctcatggttttgagggatagttcaatagtggaaaagtgtgcaagctaaaaaaataattgtaagggttgaaataatcttcgcgggtgtggtttgaaagatttgctcaatctcttgtcaaatttgaattgtggcaaagttaggcaggcaatgcattgttcatcagataatcatataaaataggatgattattcttattgtctacattgacgacagcatagtcacaagagattatttagaggatatatagaaactgaaagagaaattggctaaggaatttgagagaacaaatttgggaaatctcatttattttctcatctttgaagtagcaagatcaaagcagggaatctatgtatctcaaaggaagtgtattcttgatttattagtgaaactacaatgtaaggatgtaaacctataaaaaccctatagatcataattgtaagttaggagcaacaatgaaaggagtaccagttgttacgggaagatatcaatgacttattagaaagttaatttatttttctcacacaaggtcgggcattacatagccataagcatggtatgtcaatttatgcatactctttcaaaagacaacatggaggccataatgaggatcttaagatatctaaagacatgggcgaagggttgttattcttcacaaacaatcacatgtgtgtagaggcttatgttaatgttgactagagataatcaatgactaacaaaaggtccacttctagatactgcacctttgtgggaggcaatatagtgacttggaggagtaaaaagccacttgtagttgccaggtcaagtgttgagtctgaatttcaagctatgaccttaggtacttgtgaactcatgtggatcaaaacttcactaaaggaattgcaggtagagattgaaagacctatgaggctatattgtgacaactaagtgacaataaactttgctcataattctatttaacacgacaagacaaaacatattgaaatagacaaatattttatcaaagagaagactgatttgcactcttttcatcacatttaagctacatctagttgacattttcacaaaacgagtttcctatccaagtttcaattcaacagcaagttaggtatggaaacattttcgaactagcttgagggagagtgttgtaaattggtagaattccctaagtttaggaatttgtttgtattataattggctgattttgcttttttggtaagttctaactagtagaattacttctaaggagagagggtgagggggctcgttttttgtgccttacctctttcttctacagatctgttctctagtgtcaattgtatactttgcgtgtattttgttgcacccttatatatatatatatatatatataacaaaggcgcaacaaagtacacacaaagtatacaattgacactgaagaatagacaagtagaagaaagagataaggcacaaaaaatatcttcttgtttcctttcaaaaaaaaagaaaaaaagaagaagaaagaaaacaagatagctagtggaattagtcaactattatatatgctaggacaattgtataaggactgaattgtaggagttattgtatatggtaggacaatcatataagggcttaattatgagattaatttagggtcagaataggagtaattcaaatttttaaggtaaaaatcagctaatcctcttatataaatgttgttgaaatttggcattcaaagttaggattttaatttaggaaagtattttaggaataaaaaaggagagatcatttaggatatttccttaggattcagtttcctaattttaggagagaatcaagctagattgatattttcttattcaatcttttgtgtatatatatgtgtatggtgtgtaccgaatattatcaataaaggaattcagaaattctttatggtatcagagccagttttctgaaaccctaatcccttctggccgcctcttattcaggccatcattcattccggccaagtctctctggccatctctctctctggccatctctcattccggccatcagtccctgttctcagagccaagggagaaaacctaattctttccagtttccccatgtcatcaattccgggaaacgactttctggtcggtcgaatcgtcgtcagaaaacattcaccgctggcgacttttccgtcgaacttttctggcaaacttttccggtgacgtctttttcccacaccgcaaggagcgcctggaagagatctccaatttttcccaaagcaccggagccaaaaaaccacccacgcgccgttcacgcgcgtttttccggccagtgactacatctcacgtgccggcgcatgagccactttccgacgacgcgcttcctcttccagccttgcctgacgccgactagccacccttcacacctgtttctgccatccgagccctgcacgtgcctcttttgggttcttttgcctctgcgggccctccgaacagtgtttctcggactatttttttctcaaccccaatccctgcacgtgccttgggaagtgttcttctacctttccggtggtgccacgattatttttcttttccattaggtcggtatctctggttttctctcttcccaatttctagcaaccatattcaactgtcttcctcacctccatgacaaaatacggaatgacatcatcacaagtatccagcgtcacgacaccagaatcagggggcaggtctgaaattccaaaccttggtggcagtgattcctctcctattctcatcacaggacacaaattaaatggccataactatttacagtggtcacaatctgtgttgctgttcatttgcggtaaaggaaaggatgagtacctcactggagaagtagccatgccagaaactacagaaccgggtttcaggaagtggaagattgaaaacagcatgatcatgtcatggcttatcaattccatgaacaatgacataggtgaaaatttcttgctgtttgggactgcaaatgacatatgggatgcagccaaagaaacttactcaagttctgaaaatacttcagaactttttcaggttgaatcagccctatatgacttccgccaaggagagcagtcagttactcagtattacaacacactcacaaggtattggcagcaacttgacttattcgagactcactcatggaaatgttcggatgatgcagcaacatacaggcaaattgtggaacaaaagagactgttcaagttcttcctaggactaaacagggaattggatgatgttagaggccgaatcatgggcattaaacccctgccaagtctcagggaggctttttcaaaggttaggcgtgaagaaagtagaaagaaagtgatgatgggatccaaagagcaacctgccccaacattggatgcctctgcccttgctgctcggtcatttaatagtagtggtggagatcgtcagaaacgggataggccttggtgtgattattgtaagaaactaggccattataaggaagcttgctggaagcttcatgggaaaccggctgattggaaaccaaagccacggtttaacagagatggtagagcacacgtggttgccaactttgagagcacatctgttcccgagccgagtccattcaacaaagagcagatggagatgctacagaaactattaagccaagttggcagtggcagtactaccgggatagccttcactgctaatcgaggaggaatgaagccgtggatagtggacacaggtgcttctgatcacatgacaggagatgctgccattcttcaaaattacaagccaagtaatggtcattcatccgtccatattgctgatggttcaaagtcaaaaattgctgggacaggttccataaaacttactaaagacttgtatcttgactctgttctccatgttccaaacttggattgtaatcttttgtccattagcaaattggcccgtgatctccaatgtgttactaaattttatccaaactcgtgtgtttttcaggacttgaaatcggggaagatgattggcagtgctgaactgtgttccggactctacctcctcacatgtggccaattctcaaaccaagtctctcaagcaagttgcgtacagtctcagagtatgttagagtcttttaattctgtgtcaaattctaaggtcaataaagatagtgagaatataatgttacactatcgccttggtcatcctagctttgtttaccttgccaaattgtttcccaaattatttatcaataaaaatccagcatcttatcactgtgaaatttgtcagtttgcaaagcatactcgtacagtatatcctcaaatcccatacaaaccttcgactgttttctctttagtacatagtgatgtgtggggttcctcacggataaaaaatatttctggcactcgatggtttgtgacattcgttgatgatcatacatgggtaacatgggttttccttatgaaagaaaagtcagaggtcgggcacatttttcaaaccttcaatcttatggttcaaaatcaattcaattcaaaaattcaagtcctcaagtcagataatgcaaaggaatactttactagtagtctcagtacttatcttcaaaatcacgacattatccacataagttcttgcgttgacaccctacaacaaaatggggtggctgaacgcaaaaatagacatctcttggaggttgcccggtgccttatgttttcctctaatgttccaaactatttctggggggaagccattctcacagctacctatttgattaaccgtatgccatccagagtgcttacctttcaatccccacgtcaacttctcttaaaaaaattccctcacacccatgcaacctcttctgatttaccactcaaagtatttggttgcacgacattcgttcatgtgtatcctcaaaatcgtagcaaatttgctcctcgagccaataagtgcattttctagggtattctccaaccaaaaaagggtacaaatgctattctccaaccaacaaaaaattttacaccaccatggacgtctctttctttgaacatgtcttcttctattccaaatctcatgttcagggggagagcatgaatgaacatcaagtttgggagtctcttcttgaggttgtacctttttctcactcagagtcacctgagttgtccacacccatgctgtcatcagtccagccagcccagtccacaaatgttccttctcccgtgaccatccagtctcccatgcctattcaacctatagccccacaacttgctaataagaacttacaagtttacatcaggaggaggaaaagacaggaattagagcacggatcacagccaacatgtggccaatatattgactccatttcaagtctacctgaagagaacataggtgaggatagggctggagaggtgttaattcccagcattgatgattctactctgccgattgcattgaggaagggtgttaggagatgtacagatcatccaattgggaattatgttacgaatgaagggctatcaccatcttacagagcatttgctacttctcttgatgatactcaggttctcaacacaatacaagaggcattcaaaatttcagaatggaagaaggcagtacaagatgagattgatgcacttgagaagaatgggacatggactatcacagatttgccggttgggaagaggtccgtggggtgcaagtggattttcaccataaaatacaaagcagatggatcaatcgagagattcaaggctcgtttggtagcttgagggtttacacaatcctatgggatagactatcaggagacttttgctcctgttgcaaaactgaacactatcaggattcttctctcattggctgtcaatcaagattggtgcttgcaacaactggacataaaaaatgcgtttctaaatggtgacctagaagaggaagtctacatggaaataccacctggtttcgaaggaagtatggcaaagaatcaggtttgcaaactccaaaaatccttgtatggccttaaacaatctccccgagcctggtttgatagattcacaaaggcagtcttgaagctgggctacaaacaaggtcaggctgatcatactctatttgtcaagaagtctcatgccgggaaaatgaccatatttatagtctatgtcgatgatattattctatctgggaatgatatggaggaattacagaatttgaagaagtatttgtcagaagagtttgaagttaaagaccttggaaatttgaaatatttccttggtatggaagtggctagatcaaggaagggaattatagtctctcaaagaaaatacatactcgatcttcttaaggagaccggtatgtttggatgcaaaccaattgatactcctatggatagtcagaagaaacttggtatcgagaaagagagtacatcggtagacagggggagatatcagcgactcgttgggcgcttgatttatctctcacacactcggccagatattggctttgcagtgagtgttgtaagtcaattcatgcacagccccactgaggaacacatggaagcagtctacaggattcttagatatttaaaaatgacaccagggaaaggtctattcttcagaaagacagagaatcatgacactaaagtatactcagatgcggattgggcaggaaacatcatagacagacggtccacttttggatactgttcttttgtctggggaaatcttgttacctggaggagtaagaagcaatcagttgtagccagaagtagtgcagaagctgagtacaaagctctagcacagggaatctgtgaagggatttggataaaatgggttcttagtgaattgggataaccgagttcatctccgattctgatgatgtgtgataattaggcagctataagcatagcaaagaaccccgtgcatcatgacaggaccaaacacgttgagattgacagacacttcatcacagaaaaggtgactagtgagacggttaaattgaactacgttcctaccaagcaccaaaccgcagacatcctcacaaaagctttacctaggccttacttcgaagacttaacttgcaagctgggattatatgatatatattctccagcttgagggggagtgttgaaatttgtcattcaaagttaggattttaatttaggaaagtattttaggaataaaaaaggagagatcatttaggatatttccttaggattcagtttcctaattttaggagagaatcaagctagattgatattttcttatttagtcttttgtgtatatatatgtgtatggtgtgtaccgaatattatcaataaaggaattcagaaattcttcaaatgtgtattatgtttccattaaaactagaattggttttatccaacaaaatcctcccaaattgagtcttacccatcccaaaatggaagaaaggagaccggataatttgattttattcctttagttatttgtgtataaattgaagttttgtaaatataatttgaaggattgttttgtaaatttacattaatccctacatagttcctgagataagcaaacactaaagtgggaatgaaagttaatgggaatttcaaatccctaaccgtaaacaaacgttgaaatggttcctatccattccattccaggtacctatttttggaaagaagattaccattcccagattagatgttgatggaccaaacatgcctttaagaccttgttctttcagccatttacaatactttataggccacatgactctcacatactactgaataacactaggattctaataacactctgtagaactaccataagatgtaagatattaaggcaagcagaaaaaggaaataaattagaagctgcaaatgccatgttaacaagtgcccagctaagctggctattgggcctttttggtcttggtaagcctcttgaatgctctggataaagataaaggatcgcctgatgaaaataccttttttttttatatatataaaaatgagaaatgtaaacaattgatacttaagtagtcttgctatttatttttccaaagaggaggcttggctaaagtggcaagtttatggtagggatgggagagcttccaagttcaattccatataacagcaaaacaaaaaaaaaaaaaaaaaaaaaaaaaaaaaaaaagagaagggaaaaagtacaaacaaatatagtagatagtagacagtgacattacaacaaagaatgcaaagcatatttggactctttgttgattttttctaccaatcattattgatttttcttttctatgtgtatatgtcccaggttattatagccacaaacatagcagaaaccagcat

SEQ ID NO: 10761 - DNA, 7232 bp, Vitis vinifera
  Intron number 4 from transcript GSVIVT01030979001 (locus G SVIVG01030979001) derived from phytozome v7.0 (chr-ID chr1 4; pos 20201893 to 20209124)
atcaatatctttcatctaccgcagaagctgctgaggtactttctgaaacacaagtggatagatgatttgctccatatttttaataagattgctgatgcatgctactgttatgtgttgtttgaaattaatgttcttcactgatgtatcatgttggttttttagctgtccctcttccgtatgcctagggttgtggcaagaagactagaaaagttgcaaagagactttttgtggggagggggaagtacggaaagaaaagctcacctagtcaattgggagagggtgtgcgtgggtaaggagaaggggggactggggttgaggaagttagtccctttgaacaaagccctacttggaaaatgggtgtggagatttgcccgtgccaaggaggagatgtggaaacgcgtccttgtggcaaaatatgggcaagaggaatttgggtggaggactaaaaaggtaaatggggcgtttggtgttggggtttggaaggagattatgaaagaagctgattggtgttgggacaatatgaattttaaggtaggaaaaggcaccaaaatcaggttttggaaggacccttggtgtggggatgtggagttggcccggaggttccctcaactcttcaatgtcgctgcccaaaggagtgccactgtgggggatatatgggaccagaattctggccaaggaagttggaacctaaggtttattagaggattcaatgattgggagctgaatatggtagatgaattgcttcaaatcctaaggagtcaaagaattactttggaggaggacttagcattatggaaaggtggaaaaaatgggaagtttgacgttaaggaagcgtatgggctgctgatcagtcatagtacccctttgtttcccaaaaagggcatttgggtggagaacgtcccttccaagctagcattttttgcgtgggaagctacttgggggagggttcttacccttgataggctccaaaagagaggttggcagtttcctaatcgttgctacttatgcggtaatgatgaggaaaacgttaatcacctccttattcattgtacagtggctagtgtgttgtgggggattgttcttagtttgtttggagcccagtgagtctttccagaaactgtaaaggaggcggttatcagctgaaagggttcttttgtgggtaaaaagagggagaaaatttggagatccatatcgttatttattttttggacggtttggaaggagaggaataaattagcattcaggggggggggggggatagcctcgttcccttataggtttcctggagtggataacctccagttaagggttggtgggtctttttgtttcttttggttgtcgttgtgaggtcttcgttgcctcgtatacttcctgtatgctatgcggcgctttgccttttgcaaatatatgtgtttacttattgaaaaaaaaaaaaaaatgttggttttttacatagggcattactgtttgcaggtcactttttgatttttgcacttaatactctttgcttcttgcacttaacctaaaaacctgttactgactagtggggtgcaaataggtttaaccattggagattttagatgttcgtgattttcattaatggtaatgatatctacatcagtatcttgctgaagcttaaagattcacatacaatccctgcatttttcattaatatagattatagaaattggatcacaagttttgacctctattttcacaattctttccttctggtgcatctagttgcttgagctaatatagttttgttgcatattcatttcttattagaggatttagacaattttttctctaaattcaccaaatgttgattgaccgctagaatgttattagatgatatatgatatatcatatcagttgtcaaaattctttagacatcccattcttctgctctgattatgaatatatttgcataaggtcctttctagaggaggccatccattataggtgttgaggtgtctgaatcctagagaaaagtgaagcagagtgggaagtgagaggggattggaaaaattggtaatagcctcatgagggtgagtgtagaatcgtggagaattcaaacagtgggcttttgaactagaaatttcaaatctgcaaaattgaatttctttttgtaataagctcttagacccagttatagggggtttagaatgattaccagtttgtctacaaacccatggccagtgaaatggtaccatgtggaccaccagttattggagaggaatgtggtgatagttacatctatcccatggacagtggtagtcctcttccctcctgttccggttgaaagagttctgtcattgctcaggctattcttgtttcaatgaacctccaactctgatgccaaatcaagaatcttcaaccattctgtgtacttgatagtggagctggttgaggccaccactaaggtgtagcaaatctgttttgggcttttcaaaccatcccaggtcccgacttgggaaatagtgtagcctttttggttctatgttcataaggattttcaagggaggtgtaggaggcgtggatgtggaaacaacctcccaccttatcatggtgggggttctcttcagtcgccttataaaatgacttttccattttgagatggataagaatacaaggaaaacatccacaaattgagggcttcctaggagtttgagcattcacctaagaaagagccatctacataccatgtcttagaatgggaagagatttgggaaagatgaccatggagccaattggagatgtagtggcatgtggctttatcccaaaaattctgcatagcttgggaccatctttggcatggcctcatgactgtctacatgtatcactcgtcatatcaaaatgcattcatgatacctatctataggttcatacgtaggagcaaaattaaatatcaacaaatctaatggaagaacagtaatgattcagaggaattccaaagtgactgcagaaagaatcaggaagggttttagtattttggaggctactttttatacagcacaagaagtcatcttgagaaatttggggaaacaaaaagaagggaagaataaacacttccttttggtggtttcatagaaaatcttcagaatggtttaatagcctgatacaaaagaacttgaatatatattgggttatacatccaacacacctggtagcaaatgcagaatgacttgggaagattttagagtggggtacacatttcttattaagtataagtttctgaggaaaattcctgtatatggtttgtctcactgtcctaacattaggggttgatgaagttgggaccttggtacattctaacattcaacattcagtactcaagtccatgtagaatactcttgaatgccttggccttgtggaattggatttatgtggagtcatctttgctttccaagtttggtaagaattagcgttcatgcacttggatgaaggaagttgtcacaaccatggaaaaaagctttcttatgagtatgggttttagtaggtgcaagcaactaaaagggtctgacaggtcacagagaaggcataaattttataagaagcttctaattcatgtaaatgaatgaatatgtaaaaaagaaccttatttggaagcaaagatatggctatttgttaccacctgactgtattattttaaattgaaaatgatcacatcttttctgactacctcagttcaagttcaattttgtctgctgcttcctatttgaaccccttaaacattgaatcattattattggtgcatttcttggtctaagttgaaccatcataagcgttattccctcatcttgtatttatcaggtgctacttttagttttgtgtctgatattctctcatttggctgttcaggactcgtccatcttagcatcctaattctgtaagactcatttttgaatattttgtttcctgcagcccatcattcttactcatctagtgagccagttcttatacctgtcttttaaaatgattcatttccctttctaaaatttttatgtgcagtactagcaagtgtttaaaggtttctatacctaatttgtggcttctggtaatttttctaccaagcattttttttagggaataaagatgaaattttttggcaacaccttaagtttgcatttggtttgaggaatgaaggaataggaatgagaaagcaatcttcatttacaaattcttgtgattcatgcaaaccaatatatggtagatttcccatttcattccataacccctaaatgtgggtaatgaaactacctatcagaaaaaaaaaaaaaaagtgggtaatgaaactctatataaggaggtaatatttgtatacccttaaagtgcaatcatagttattataatttacaattataacatacccttaaatatccaatctcaaaaatacaaaatcataataatttccatattttgaagatgcttttttatgccttaattttttaatcctatttttgtcctttataattgaagaatcatttgaaaatattgttttatattaaataagaattgaaacttttttttttccttttgtcaaaggactatactcaaatttaatacttttgaacaatttttctcttttattttttctactcaaataaaagttagtcaaattttttattcactctgcagaattaggccaaattttcaaaatttgaccccaaaaaagggatatataactcctcatctaacattctgacttccctaaaaagatatagttgaagatgaagggaatgaaagagataaaaaaaaaaattaggaaaagtgattatgcaatataattaaaatcatgcttatatgtcatatcctgtcacatcaaaccattatttattttgaaaatcttataaggtgtatattacaaaatttaattatgtaatttaatgaaaatctctttgtgcagaactttgcattgttttagatccatcactaactttctaattttcagtcttatagacctatgttgtatggttttccggtgcaggtgttgggtatggatatgtgtctagttgtttgatcctttacacctacaaattttaggatttgaggattcgaccaaaaagaggtctcaataacagagatagacacttgggtatgacatgatacaaggataaaataaaaaaatatcaagtaaatatcaatagaagaaaaaagatatctttgataagaaatcatcttcttttctattttatccttatgctcatcttcttttctattttatccttattttttctttctcgcctctaaacatttttataaaatttcacctcaaacaaactctcttttcccaatatagctatcctttgaggaagttaattttaaaaaataaatcatttaaaatcaaatgttcagatccaaggcagagtctctcataggatgacatacctgtactctgtcgtgtcaacatggccaagctaggtgaagttggaggatccaggtatcatagttatacacttacttataaacgaaggtattaagaaagtgaccaaattttagtttttgtacaaattaaattgagtggcaatagaaacactctacttgtagaattgttcaggatctaaacactaaaatgggaatagttgattcttaagatattgatgctaggaatgtatacctcaaggtgccccattactgttcattgcattccatgaaccaagtggggccaaaatggtaagagcctagttctcttaatatagtaatatacaagtcaaaatgaaccttgatcacatgttttggagtaacttttcagttcttccattgtgtagttattattattatttttttgatcagaaacgaagaaaaatatattaatagaagaaaagatacaggagaaagaaaagatacaaaagaaagagaagaaactaagcgaaggatgagaggtccttcctacacaaactgaacaaaagagaaaactcccaacaatggaaatctaaaaacaaagagaaaccccaacattctcaaacttttgaagtgcaaattgcaatccagttgagttgtaaaacacttagaggaactcctctaaaagctgcaaaacaagaagcccatagagaggaatagaacaaaatcaaatcccataacatctcttccgttctccccttatcctcaaagatcttattgtttctctcttgccacaccatccataccaaagtaaggcaagcgatttgccaaagtgtcttgcctcttaatgagttccccaagcctttaaaagcaataaccaacatgtcctcaaaactccttggagggacccaaaccaaccttgctagattgaacaacttgtgccagagtctaatggtaacaggacaatgaagaaaaaggtggtcgatcgactctccatttcctttgcaaagaatgcaccattgaggacagagggatttgtagggtcttctcaattgcaacttatcattggtgtttaccttcccatgtgctactaaccaagcgagggtcttaacttttgaaggagcttttgaactccacaaaaacttggccggaaggaacaagataggatttgagacttttgacaaggccaagaaaaaatatttcactgaaaacaagtctgacgatgacaaagaccacactcttgaatctgccaaagaaggagagaaaagcactgaactaagggaggacattaatctctgaaggagatcaatttctgaatcagtaatattgcggcaaaaattaaaattccaagatagtggaaaggaattgccaaggacatttgagacagtgaggtttttcatagaaataactctataaagatcagcaaattgagagtacaaagtttggttaccccaccaaagatcttcccaaaattgttctttccattgtgtggttatcacccctctcttctcataattgttctttccaaatctttcactaagtcaattttctattcttttccctacaattgttaatctttttctttgttattcttctcactacacaatcataatctaacaattttttatgcatcatgaaacaaataggaactttagtattcgctaatgtttcatgtacaatgggcttagttgtcaaactctaatggagtgaatggaggtttttgcctcaaattttatttgataagtacttaaatctaaattttttaaaaatgatagattgtttggcttgatgtttcttggtaacattgcgaggacttggaacattcgtgtttgatttgggtgttgctgcatattctgattaagctttctatgctgcaggagaaaattgcc

SEQ ID NO: 10762 - DNA, 404 bp, Vitis vinifera
  Intron number 2 from transcript GSVIVT01009299001 (locus G SVIVG01009299001) derived from phytozome v7.0 (chr-ID chr1 8; pos 7088032 to 7088435)
taccttttctgccggagctctcagacccaatacatgtaagttggtaaacaaaagatgtgctgtgtttcctctttaaacaagatttgctttaatccattttgatgtagagattagccgcatactatctctgttgttggggattcaattctgtagcattggatcttctgttggtgatcctgtgttgatagtataaataatcagttgttgtgccccacctttgttgttcacatgcggcaaaatatctttttattctgttttgaattttatcataaaaccaaatgtcagcaacacataaacagtttctgtacctaaacgaaaatttggttccctattttgagtagattttgtattcttcattgtctttcctgacttgggtgttctttctcttgtatgtttatagtggg

SEQ ID NO: 10763 - DNA, 5913 bp, Vitis vinifera
  Intron number 2 from transcript GSVIVT01005670001 (locus G SVIVG01005670001) derived from phytozome v7.0 (chr-ID chrU n; pos 21085397 to 21091309 reverse strand)
ccccagttgctcaggtttgtttcttccttttgttttatgttgggactttctttctgtatatgtttttttttctttatatataaactgttggacactttttcttattttgaagagtccacatctgattgccctttaatttacatgtcaatggttcagttttacgctgcagtttgaaaacaattagattgtgctatagctcagttatgttgtgtcctttgtgttcatgaactgtctttcattcttcaatgctttcaaccaatatactctggtgctaagctttcagaataagtctttaattgtcaaattattctcaaagattgcttcaaggtctcttagaacttttttcctgttttggctataacactcccaggaacttctttcagtgtttcagaatcttttaatttctgaggattttagagattttaaggaatttctactctgtatttggtgttctttggggtttttcatcttaatttagttggctgtttgaccagtttgggttcaggaatagtgataatgtcttcattagatgtgttgtgcctccttgttctgagttggtggattttagattcatttctaagtagaccaaagagaattctaggagcctagtattaaggtgttcaaactcagaagatttggttgatggtcaagtttgagctgaccatagaaaaccatgttcaggtttgtctttgtatatataatgagctactcaaatcccagttcagctcaactcagcttgtcaattttatggctttccctgttaaaatctttgttattttgatttcagcatttgccaagaaaattcatttgtcagggtcaaatgatctgatgattattggtctagtctgtctatttcaaatcaatgattatcttattcttgtggttgaagatcacttacaagattgtagttctggacttattttcacaaattagcaaaagtacatgttctattagagtttaaacacaaagttattcattgaaacatgataaaagtgccgatttcttcggtggaattcaagtttgattgatgtcccaagatcagaatgatatatatatatatattttatcagaatgatatttcacgcacctttaaagtctcaagatggggtttttaccatagaatggttaaaagccggtgtcatagcacaaaaggctttgtgaatagggtttgctgagagagcatttgctcactttattttagtttgtgttttttttttttcactcttttttgtagtgggagagagtctacctcaaatagagactgacccatgttcccttaacatgggatctgaagtgggcagttttcagaagacaaccattcctatctccacttccctaaaatttagtacccttaacattactttaaatggtttttttaggtcggtcaatcagacccatgggtgggtcaaagtgcattagcccaaaagcctaatatctcccactcgcacataggtgtggatgatcctaatgagtatatttctgatatagagctcccagcatcccacatgcaagtgttctccatggttgcaaggtccattgattatgataatgatgatgagaataataattattataaccatcctcatcagcataatcatctgattgtaatcatcatcttggtatgccttaaatccaattggtcatattggttcaagtatctctaatccatcaaagagtaatacttgaagctcaagatccaacaacatacattcacacttgtaccgcaactcacttaatgcaacataatttgtgaaaatcagttataagtgagacatgatactaaatgatccccatcacccttccatttagttcataactaattgggagttgagaattagttctttacctcatggtataatcaaaggtgattaagggcataaaatttattattattgaacaaaatgatctttaggattcacatggtgaggaagtagcaattcattctctcaccttcatttttggtcacttagcacatgcagtatgacgtataagctatggcggactacatcttcctagagtggaaaagtgcatatcattgactcttactttgtaaagatcttatttgagtcagtacaaaagtgctgaacctgagttccttatgtgctcaccaccctagacatctaaataaggttctcaatctaactatcattataggcatgaaatataatgggattatccatttctgattttctactgtaaacctcatgttggatcttacaaaggtgacacttttagttaattaatctaactctttaacttagcggaattggttaaatgtgtcttaactttgctcacttcccaagaagtgctaaaggcaatcatttaagtaagtgacccaacctttgcctattgatagacctctaatatgtgttctaacttacatgatatatgaattaaatagtaggaaatttttttttgaataacatcaatttaaataatatcctaaagtttcaaatacaaggaaataagtgacaaaatgaggagaatgcatcaatcacatcctacgtaatccctttgccctaacaagtgtcatatatgcctatttcctaataggcttagttaaaggatccactactatgcatttggtaggaatgtatagtctaagaccactttgttttttgcaacatctctaatgaagtgatatttcacatcaatgtacttagttttgttgtactacgtaaggttctatttggattaatttttgagaagccaaaagctaacttgtttggctaactttgttaaaagagcttatggtttgaaaaaaagtttaatatgaaaatcaagaaaatgttatttcttgtaaaaactctattttggcttatgcaggaagttgttttatatttaagtaaaattttaaaatatcaatattatcttttgaaaattatggctttggctttggcttttaacttttaactaaaattaaaaacaaaaagctattctcaatgggccttagggtctttggcataagcacatgcaaccatgctatcacaatggattgcgaagagtttgaagcatgtgtgacaacataagatgctaaaacaaccttgatgttttaaaaggctaaaggtagctttgaggtgttttgctcaaatgagggaaggtgtaagccttgagacataacttgatgtaagcctcaacttaaacgagagagagagggtaagatttttaaatcttacccttgtttagatttgctactatgttcttggctgccatatcctctttttttttttttttataattattattataaacaaatatagttattcaataaatggtaaattaaaaggaggatgagcaatcctttcaaaatatgtaattgtcgatcagacatgtatactactccacaaaaactaaaactatgtgcatggataataagtagaaaaagcaatgtgcacatataaaaaacttatgcaccaactggtttgcagcttgattgacctaacgaggaacccaagataaggggcacccacctctctagcaacatatagaattttttgagatccaattgtcactcccatgagcctctccctataagacacctaagatattacaatagttgaatctctctctatggttaggttgggtagacataaagccttagcctgcagcaaacctccaatggtgctagtatctctgttgcaataactgaacccattcttgtaggtttagtgtaagctctcggtactgtacctaaacgatatccacacctaattgtccaggattacccaaggaacactcatcaaaatctaaccttattgaatctactggcagaggtaaccaatcaagcatggccttttcatttaatctttttaagtagcaaacattcttccaatttaataatagaagatttaaagaaatcctggcaaaaggctcaacgactaaggcctaaagggaggagaaaaactaaatcaaattccaaatggcatccacatatttctatacattgtcaaatatcctaacatttctcttcaaccatagaaaccatattgaggataagacaaccactcaccaaagaactttcccttttagctgactgtcaaagccccagaaagagtttaccaacatctttcctatgcctctagaaggcactaaatcaatcatggaaatatggaacaatttaggtaaagatcctagtccacttccatactccatttttttttttgtcttttgatgggtcatatatatatatatatatatttttgatcagtaagtaatatgtgtattcaaaagaggcgctaaagaagtgactcaaatagttacaatatagaacaactcacccccttacaaaagaacccaagccactatgaaagcacaaaaaaccctctcccttaacacatgcacatccattctataaacaaaaataaaaataattgggatattaatgacaaataccgcatgaaattttgtggcataaaccaaaaattgaacaataatgatatttaacaagtcacaagatcaaaattttattaaacttctaattatttattgtgcacaagtgattaatatttttatttaagttaatccatgtgcaaaaatacaaccacatattcaacatattgaatttggcatttttaggcatcaaaatattaatggtaacaaaaagaacatgcttttataaaaacattgaattatatagcttattttcaaaatatgcattattgtggaatctaaaaaactaacaaataaaatgaccacatcaatattcatgaaaagtaaattagtttagacattttgtcatgccactttttcatagtctgatattagcattgcaatcacataaattctagagagccaattaaatcatatttgaatttgtgaattgcagctgcatggcagctgcactcattctgatgcagtgcacctgctgtgcatgggccctgcacctgctgtgcgtgtggcttatgccctcctccccttctattttttttttctttttgaaaagcatgtcatgcttaaagaaaaaaagctgcatagaaatatcacaaattttatgcgtcaacatctaattatctttcggaaccatatcaattttatcttgtattattgtacaaaaaattcagcatctaaatatctctcagaaacacatgatgcttataaaaaagttgcttcttaatatctcaggatattaagcaaaaaatatgcaagtattttatacaacattttacatttttaagcaggaaagcatcctaatacagctctgataccagtgttagggtttgaacgccaaatcgttcattatgacataaaacaaatgcatattactttggtgcctgcagctctgattgatggcccaatatcagaaagatgcttcatgtacttctgaaatcttttgatgggtttttaccacagaatggctaaaaccagttcaccgcacaaagagtgaacagtcaaatctaccccttttttttttctttcttcttttctttttcttttttcacacacttcttttttgtagtaggggaaagtcttcttaagaacttggaatctgtagtgagtggtttctggaagataaccatccccaactccaacccctacaagaacaaaccactgatcatccataagacaggttggtttggtgggtgaatcagaccctcgggcaactaaatttaggtccaagccaattagccagaaacccaatatgttcaacgtagttgcagacagatagctctaatgaaacatcgtttcctataaaaataaatacagtaataaagcagctttaaagtttgtgatgaacatttatttgcaaatagtatctactttttattttctaaggaggatattgtgctttctggatccttatttctgtgtttatcactaattgttctattctctttttattccttttcatctgtattaaacctgtgtgataccctgtctttgtatcagaaaacagcctggctggcaatattctac

SEQ ID NO: 10764 - DNA, 12590 bp, Vitis vinifera
  Intron number 2 from transcript GSVIVT01035367001 (locus G SVIVG01035367001) derived from phytozome v7.0 (chr-ID chr4 ; pos 795030 to 807619)
aagttgcacccctgcttcgaaatggcacttaacccaccactcacaagcatagcgacaagggatcagacaacggagatgacgatatcttggtttgaaatttacagtctgtaccttaatctcataagaaagcttgtaaattaagccaatggctggcttccctagcaaaatccatggtacaaatgcgttgtttcttcaatggagtctcacgcaattttgtttcttcgatggttgaaggccactgtgctgtctaccaaagaatgtcttgtttactgtaaaaaaataatcaaagaaaattaaatatgcctattgaaattatttattctttatgtagatagtaaataaatgaataaaataaatttaaagaaatatataaaataatttaataatattaaacatgttttttatttttttattttctttttcttgtattttcttttaaatttttaagcaccaaacattaaaattacattcttaaaaaatactaaaaaagaaaaatatcaaataaaataattcttttcatatatggtttactataaaatcacacacaaaaaaaaaatcaaatataattaataactagtaaaaaaacttatatattttaaaatttatttattctttattttaaaaataaaacatataaaactaatttattagtatcaaatctctttttggtttatgtttttctttagaaattctagaattgaaagtcaatatcaatatttgagatgtataattgaattgttggtttcataattgaagagtagagaagaaaggatgtgataaacaagtggtttgaactcaacggacaatgacaaaattttacccttttttgtggtgcaaaatttgtagcattgttgccaccaataattgggggtagccaattttctgcccaccaactataatagaagaatagataaccgtgaatacaaattcaagcaaaatatatatatataaaataaataaataaaagatgaaagtgaatattttattatagttgaatgaaaattaaggctttgttggaataaaattattattattattattattattattaaagaataagggtatcaagattttattatagttgaatgaaaataaatgttttgtttggataaaattactattattttctgtttttttttatagaaattctagaattgaaagtcaatatcaatatttgagatgtatgattaaattgttggtttcataattgaagagtagagaataaagaatgtgataaacaagtgacttggaccctacggacaattgattatgacaaaattttaccattttttgtggtgtaaaatttgtagcattgttgccaccaataattgggagaggtcgccaattttctacccaccaactataatagaagaatagataaccgttaatacaaatttaaacaatatatatataataaataaaagatgaaagtgaagattttcttatagttgaatgaaaattaaggctttgtttggataaaattattattattattattattattattaaagattaaggatatcaagattttattatagttgaatgaaaattaaggttttgtttggataaaattactattattttctgtttttctttaaaaattctagaatcaaaagtcaatatcaatatttgagatatatgattgaattgttgatttcataattaaagagtagagaagaaagaatgtgataaacaagtggctttgaccctatggacaattgattatgataaaattttacctttttttgtgatgcaaaatttatagcacaataattgggagaggtcgccaattttctacccaccaactataatagaagaatagataagcattaatacaaattcaagcaaaaaaataaataaataaataaacaaataaaagatgaaagtgaagattttattatagttgaatgaaaattaagactttgtttggataaaattattattattattattattaaagaataagggtatcaagattttattatagttgaataaaaattaaggttttgtttggataaaattactactactattattattattattattattaaagaataaagatatcttcggaatttctttttagactagttgttaaaaagtaaattttttactaccattttttaaaatatatttgataaatatttttttatgaaaatagtttttagagattttttttgttttttaaaacaactttgatatgtttttaaatattctttttataaagtattcccaaaataataaaaaatatgaaaaatattttaaaaacttttatattaaatatattatatgcaactgtttttcatatttaactttttagaaaactaagtgtttctttatttttccctttgagaacattaaaaattatttttatatgtttcttgaaactcatttaacttatttttctttatcatataaaaattaaataattttaaaatgtataaatttttataattttaattatatttggttttatttcatatttttcatagtgaaaataagcctaaggaaattatttttttttaatattttttcctttttgtaataatttttgggtaccaaatatagcctataagtggaaaggtgtttcttcaacaacttattagttttgctaacaacaagtttccaaattatgtctttcaattaaaaaaaaaaggttatttataatttaaagcaagctctaagaacttggtatttatggctagattcatattaatttaggttatgtttggttttagaaaatttgaagaaaaatgtaagagaaatgaattagagaagaaaagtgaaaggaaaaaaaaattaaaatcaataaattatttgtaaatattttttcaaactcatttcatttatttttctcaattatataaagatcaaatgcttttaaattatataaatttctaattaattttaattatatttaatttttttatatagtaaaattaaacaaaaaatcattttcttttcacattttttaaagtactttccgggtggatgggttggttagatgtctcaatttacacgacttgacccaaatctttaataggcccactgggccaggcccattcagaatggtttggactccatgattggtagtcattatcaatcacataatgcttcatcatctacaatttacacttctagattcttcattacataattatcattccttttgttttcccttttttttttttttttttaatttaatattttactattcaaggatttttttcaccacttccagattcttcgtttcactattttttattttttattttaacatttttctactgaaggaattttacaccacttctagactcttcctcacattatcatcaattcatcattcctcttgattttagtatagtattattaaaagatgtttttttaataaattttcattaaaattttaaaaaatggcggctgagtaacaagagtccatttgtaattatatgaaacattttttgtataaaaagtatttttttgaaaaaaaaaatttaaaagtgtgtttgattgtgattatagaaagtattcgataaaatttagaaaatatttttaaaattttgaaaaattattcatagtattagaaaaccacttataaagtccatttaagagtgattcttataagtgtatttagtcttttaacactttaaaatttttatcttttaaatattaaaaatataagaaacacttcctaaaatcactatcaaatatgagcatagtatttttttagaaaaatactttgagtgcgtttgacaatgattctgaaaagtgtttatagtctttttaacactttaaaatttttatttttcaaatgctaaaaaaactaaaaacacttttcataatcactgtcaaacgcactcttaatatatgattctcctaaaaacacttacacaaaaaatattttcactcaaaatatttcgagtagaaaaaatgttaaacacactcctaatttttaaaaaaccatgttatagtatttttctagtttatatcttaatactaaatgttttttcttaaatacatttataataaaaattctattaataaaaacatgatagtttaaaagcatttgaatcataatctccatcaaatgtattaatctatgatgcttttgttagtagtattttctattagaaatcctttttaagaaaaaacacttaggcctatttgacaactcttttgaagaacatatttatatccttcaaaacaaaaaattcgtttgataatcaaaaattgttttttatttctattattttaaataacatcttttaattattttataagggctgtttaaaaaaataattatacaaccatatagaatgattaaaaataaaatactaaacttaaaaattattttaaaaatatattcaaaaatattaaaaataggttaaaaacattttaggtttcaaacgagcttttgttttcaaaaattattttcaaaaattattttctaaaattatttttgaaaataattaccaaagaggtccttattactcatatatgaattaaaaaaaaaaaacaaaatgaaaatgatttttcaaaaagcattcattgagtgattatccaaaaattattttaagctattctccaaaatttattaaataattcacttttattgaaaataaaaaataaaacttctaaacattaagactatgtttgattctcataatgtttgaaggaaaatacaaactatatatatatataatgaaagaaaaagtaaaagaaaataaaaattatatttaaaattaataaattatttttatatattacttcaaactttttaaaattatctttttaatagataaaaactggaatataagataagacatggatttaaaatttatgatccaaataaaatatcgaaaaaatatcaacaatcagatttcatatatatattttcaaatatcattatttacattataatttcattaaatcttattatttataccctaattccatttgcttataccattttactttagtctcatttgttcatatgctcatccaacaacctaaatttcattatatatatttagtaatttagattttttgttttatatgtaatactataccttaatattttctcaaatatatatatatattagaagtttgcttcatttatccctccgaataaaatacctatccttgagagtcaagaccacttgaacctgaactcgatgatagatcttcggccaccatctcttgtcccttaataggagaaatattattagtgtttttttttttttattctctgacccactttaaacaaaagacaagatctttttatttatttatttttttcaatgggaaaaaggttcttttcttctttcatttccttactttcaacttagtacttattaaaatattatgaaaagacttacttatctttatttatgatattttttttaaaataattcaactttattaaagcttacattcttccaaagttagatataaattcagattattccaaatatactagtgagtaaaataactcaaacaaaacaaaaaactaaaaagacaaaccaagtaccagttaaaatagggaataaataactcaaacattttataagacatacttaatataaaaaaatgaaaataatttttttttttaaataatcattgctttgtgtgaaacaaaagtactattatttttacattatcttatgttgtccataaaataacacaataatttcaatggtttgaatgctctccaatttttaaaattcattctcacacttccaatctatatttactaaagttatttgttcaatcctaaaaacaagagaatatgtaagttaatggatgaaaatttgctttttaacataaggatctggttcaatactcatacatgtacaaaaaacgagaccaatcatatggcatcacataaacattttaagttttattactttatacataaatttaatattattattttatatattgatcttaatcctttatatttgatcttatctatttatactttaatttcatatatctttatttttatttaataacttaaatcttatgataaattctcgaggacaaaaatggatgtcgatttgatacctaaactttttctgatattagtaaatatgatttcacaaatttcaattttttattatctttacctaaatccaacgggattgatcacttttttttacattccatggtttgatagcatgaatatgattttgccaccaatcatatactaagttgtgaatcttgtgatacccatttttctacaccaactcaaaaactccactttgttgatcatataaaaaagtcaccttccactcactcatgttaatcaattttaataatttttatttgcataaaaatttacatgaatgtaagtgcttttgttgagtaatttcataagatccaacgtggccaacatttcatcgtgcgtgtagatatagcatgggaataaggacaagtctccttttttactattccttgtttggactatatgaacacttgtgaaagcaaccttccctcgtcttattcaagcaagctgctgctacttccacgcccttcaacagagcgtgcaaacacccttagtgacgcacactccttttttatttttatttttgttatttgtttattctgttccctgtttttatttttaaagaaaataaaaaccataatgcttgctaaatctaatcttgtaacctagtgttttgttcttagagaatttgagtgaaatgtggttaaaaaaaattaagaagaaaaaataaaaatcgatttaaaattaataaattataaagtaaaaggagaagaaaataagaaagagaaatcaaaatataggaaaactctcttgaatttcattaggggtctctcccttttatagggagttacacaagatatttatggatgatcatccacaagttactatagtggtacaaaatctcatgttttataacactccctcttggatgatcataagaatatgtctcattaaaaccttactaggaaaaaccctatgggataaaccctaatgaaggaaaaatagtataatattcttttggattactataactaactcgttaaaaaccttatcagtaaaacccaatgggacaaaacctggacgaaggaaaaaaagagtgcagtatatccatattatcattatccccctcatgtaaacatgattacgatttcttcaatatttcaaatggtagatctctcaatcttcgtattccaaagtcatatcttaactttttcaatgtggtcaaaagtaacgcctttgtaaatagatatgctagattattattgcatgaccgaatctgttgaacatcaatctcacatttcttttggagctcatgaatataaaagaatttaggggagatatgtttagttctgtcaccttttatgaatcctcctttaatttgtgcaatacaagcaacattatcttcatgtaacacggttgcattgcctttgatggaaggtagtccacatgtttcttgtatatgttggatcattgaccttagttatacacattcatgacttgcttcatgaattacaagaatttctgaatgatttgatgatgtgaccaccattgtttgttagataaatctccatgagataacaataccattataattaaacacataccatgtttgtgacttacatttatatggatctgaaagatatcctacatctatatatctaagcaattgtttctttaattcccttgagtaaaataaacccatataagtagctctacaaagataacgtaatatatgtttgataccattccaatgtcttctagttggagcggaactatatcttgctaataaattgacaaaaaaaacaatggttggacatatacaattggcaagacacataagtgcaccaatagcattaagatatgatacttcaggaccaaagaattcttcatcatttttcccaataacgaaatgggtcttttttcacatcaagtgatcagacaaccattggagaacttaaaaaatgcgttttatccatataaaaacgcttccaaactttcttaatgtatgttgattgatgtattaaaacttcatttggaaaatgctcaatctgcagaccgagacaaaattttgtttttccaagatctttcatctcaaattttttttttcaagtaatttgttattccaaactttcaattttttttcaaatctttcatccaacaagatttaagtcatcaacatacactgcaataattgcaaattcgatttctaatttcttaatgaagatgcatgggtatataggattatttatatacccttcttttagcaagtattcgctaaagcgattgtaccacatgcatccagagtgctttaatccatacaagaatcgttgtaacttgattgagtacatgctacgaggctttgtacaatttgtttcaggcaacttaaatccttcagggattttcatgtatatatcattatccatggatccatataaatatactgtaataacattcatgagacgcatatctagtccttctgggactgccaaactaattaagaaattatatgtgattacgtccatgacgggagagaatgtttcctcatagtcaataccaggtttctgtgagaaaccttgtactactaatcacactttatatcttatgatctcattattctcattgcgtttttgtacaaatgcccatttttacccaacaacctttacatttttaggtgtttgacaataggtccaaaaacttttcattttgttaatgagtttaaattttcctgtataacttctttccattttggccaatcatttctatgtcgacattcttccacattttgtggtttaagatcttcatcatttcttatggaggccacttggaaagtgaaaataatattattttgatcccatttttctcctatgtatacatgacttactgagatctcacaattttcaggtacctatgcctcttcaagggtttctcatttaatatgtgtctcttcaagggcttcttgttcaatatatgtgcctcttcaggggcttcttgtattatttgtgcctcttctagggttatagatttttccattttaaactgatcagttattttttatggcctcttttagagtgccaagtttttcttgggttctactcttttggggagttacatcctttaagctaacaggtccactgtgtttcaggagtatcttagattaatttgttaactatcttataggaacatcaatctgagctggagtatttgtagccaggatatatgactttgtcactttctttgtatcaatgaatgcattttgtaattgatttgcaagattttgcaaatgaatgatcatttgaacttctagttcacgttgatttgtatgagaatcaagatgagtcaaagtcaatgcattccaaataatttcacgtcgttcttctggaaccgactcttatcaccctaacggtgaaaaaattgtctcattaaaatgataatctgcacaacatgtcattctaccttttaagtgtataggtagactaatcactaattaaaaacttctggttttgtaatatatatcaatatgaccttttaccctgggagaccaagttagtcttaaaagattcttctggatttatcatcatataaagtgttattcacatggaatcaaatactactagtgacatagtataagctcttttggagcctttaattaggtttctatcacctgatatagtattaacattgtttgacatcaatgttgtgcaattaatgagacaagagtttcgtcaaaataacaagtcataaaacattgtcataaagacttcgtctttatagatttgaataaatattatcatagagaaaaagttaaaatcaatggaaaaatattagtcattgatgataacttagcttaataagttgtgtaaaagcaatgagagcatatataacacaataaaacaaatatgaaaagataatttaaaattatatatttcgtaagtatctcacacatttgattttgtaagtatcaaactaactgtagtgatggataaaggtatgagatagattcatgcatcttcaagtataaataaagaaaataatttaaatgataaataataaaatgtgaaataaactataaaagatgaataataaacaatgtgttcaaagatgataacaaagtaaacctatttgcaaagaactaaataaaagcataacgtttaatcataacaaacattttcatcaccaattagatagtcaattttcctattaggattctcaaagaaatccgaaacatctaaatgggttagatctacttggccatcactatcaatgaagttcatttcaacttcctttccttttgttgatgcttggtaaaagtcggccaaatgtttgggcatacgataggtacgcaaccaagacccttcataccacatctataacacttattttcatggttcttaagaggtttatcttgtaaacacttcccattttcttgttttacctcagtattattccacttctagtggtgcaatgagactttccttttctgagaatttggtgaattattactataagaatcatggtatcggggatttcttccacgaccacgagtttgggacaatattgcattcactttagggaatgattcagatctagttggacgagactggtgatttctcatcaaaaactcattttttgttaaatcttcatggagatgatgatgaaggaaaatcaatgtttttgcgcaatcttgtagggatgcttgatttccttctttgatcataactccaagattcattgacaattttgttttgaataacttctggttatataagaaaattagaaattgtatgcataacttctggttatgaaacaattgttaataaaattgttttccataattcctattgtgaaaaataaatgagtacgaaataaaaattaaatccaatatttttcataattttgaattatgattattttgtcaaaacaagaaaatattcaaatttgtacatagcttcagactatgaactatttatgtataacttctagttacacaatattattaaaagaaattaaaagttaatatctttcataatttcaggccataattattttgtcagaacaataaaatatttaaatttgtacataacttaggctatgaactgtttttttatataaatttgtatatagcttcaggctatgaactattcattgggtagatttgtgcatagcttcgggctatgaactttcattatgtagatttgtacaaaacttcaggctatgaacattgatttatttatttattttatagtttttagctatataatattgtttggtataacatccaattattccgtataattaaaaacaaataattagagatcatatacataacttctggtcatgtatctgcaattctgtaatagaagttatgaatttaccccataatttatcatttaccccataacttttggttataaagattatacatatttatgtattcacataaaataaatgaaaatagaaatcaaagggtaataaaatataaaatcatgatataagtttatcacatacctttttgtaagattagtcatgctgatgacatgttataaaattataaagtaaaaggaaaagaaaacaagaaagagaaatcagaatatagaaaaattctcttaaattttattaggggtctctctcttttataggaagttacacaagatatttatggatgatcattcacaagttactatagtggtataaaatctcatattttataacatttatatattaaaaaaaattatttatttttccttatctatataaaacttaaataactaaaaataaaaatctaaggtaacaaatccacaccaaccaattaggtcatttgaagtgtacggtaaaacatgagtaatagaaaaatgaaattaagataaataaaaaaaaagattaagatataaagtaatagaatcaagatattaaagtgtgcttaatgcgtcggagatgaaaaggactaccaataaggtatcaatggtcagatcaaaattatttgatccgtgtgagtaacacaaaacaccgattccattggacgtggactcgtggctccttcgtaattaatctcaacacacaggtcagtttgtataattcagtaaaataaattctgacaccccctagattttgaaattgaaccgttggtttccatctctttcccggccatcttcctccctcatcgagaagccggttacgaactcaacgccacaaaaatgccgaaactaacctttttatttgccaaaattccactccccgctctgtttctcctcctcgtcctctccttaccctttcaagtaatttcccaggacgatgaacgatcaatcctactagacgttaaacaacaactcggcaatccaccgtcactccaatcgtggaattcctcatcctcgccctgtgattggccggaaattaaatgcaccgacaataccgtcactgcaatttcactccacaataaggccatcagcgagaaaattccagccacaatttgtgacctcaagaacctcatcgtacttgacctctccaacaatgacattcccggcgagttcccgaatattctcaattgttccaagcttgaatatctgcgcttgttgcaaaacttcttcgc

SEQ ID NO: 10765 - DNA, 804 bp, Vitis vinifera
  Intron number 2 from transcript GSVIVT01001319001 (locus G SVIVG01001319001) derived from phytozome v7.0 (chr-ID chr2 ; pos 5286212 to 5287015 reverse strand)
gttgcatttcaagacatcaacccttccgccttcaggttctattttttcctcacccttaatttcgtttcaatttttcctatggatattgattctcgtattttttgtgcgttctgtttggttctgcattgtagaaaatcgaaagcttggaaacccgtccctcaatttctttttgttttattattgaaacagggatttcgagattgtagatttcatttgaaataaagcatatgatcaaatgccgtagataatcaaaagcacgaaaacctgtccctcaaaattctttttgttttattatatgaatagggatttcgagattgtagattttcatttgaaatagggcatatggtcaaatgtcgtagataatcaaaagcatgaaaacctgtacctcaaattctttttattttattattgaaatagcgatttcgagattgtatatttcatttgaaatagggcatatgatcaaatcaggattggtacttgtgaaatataattcaaaacaaattaaaggacgacaaaatgatttcatttaatgtggtggaaggttaagtgttccatggagttgcagaattttcaggtgcagttacaagccattcgaacaaataccatcctgtctcctttttgaaatgccatcaccttcatcattgccctactcattcatttgtgttgatagctcccttctttgtatcatttgattcccagggggtgtcaaaattcacccatgtggttttccattggtaaactgacaaattggagttggtcaacttgataggcattacttggtaattcctgtggagcacatcgcaa

SEQ ID NO: 10766 - DNA, 5106 bp, Vitis vinifera
  Intron number 4 from transcript GSVIVT01012514001 (locus G SVIVG01012514001) derived from phytozome v7.0 (chr-ID chr3 _random; pos 397176 to 402281)
atacaaaaagcctcaaaactagtatatactaaaaggtagaaacaaaaaagagccttcaaaaaaaccaaaactatccacagttatggctatctacgaattccatcattgaaaaattcttcatttccaaagaccacttcaataaagatttaatgaagtactccttcaacctttgaactgatagttgcttcattgaaattcctacaattatgttctttccacattccctagaacaagcataagggggagccatataccagctagttcttctcttctcccccttaaactttcactttaggaggactttactaaagttgactgctaaaagaaatgttcatagctcctttttcctttcacaatgaatcaaaatgttgccaattgactcttcactatatttgtaaagactatatctcttcattaaaataaatcattttgaggggagcttgagacccccaaatttctttggttaggaatactagtagtcttagagcataagaaattgtagtataactttacattgaaacttcctttccaatcctctttccattgcaaagtatcttcttcttgcgctctcatagaataaataaatttcaaaacttgggttaccctctatttcccaatcttagaggatcttctaaattgcactaaccaatggcctccacttccttccccattaatctacacctttgatattcttaatagaagctactgtgaattgcaaaggaaaggtctctttcaaccgattctaccttgcccatgtgtcctaccaaaattttgtttctcatacccacattcactcgtccacatctatcccatatgcatgagcatgggtactgtcctctttaggcttattcttagtaaaatctttcttccacactttgttcaaattatcagattcaattccttcccattcagtcaaatttatttggaaattaaaagttccatttaaggtcaagacctttacttggttagtggcacacaagaagatatttaccaatgacttacttcagttgagaagaccttccaaagcccttagtttggattggtttatactatgtagggggagtggagagacgagtgaccacctatttctacattgtccattcactttggggttgtggcatagactttttatacgggctgggatgatgtgggtttagcctaggagtttttttgtgatatgatgattatttcttatatggcttttgggaattccaccaaaggcaagacactttggaggattgcttgtcttactttgatttggatagtgtggcaagaaacaaatgctaggatctttgaggacaaatagaggatgtttgagacattatgagatttatttcatttcttttcttctttgtgggcctcttgtactgacgattttaagggcattcctttgaatgtcattaagtttagttggcttttggtatgtacaccactagggttgggtcaccgatgagaggagcttagcagttttttttttttttcaggagaggttttcccttatacatttttttgtgatctatcttttctacaaatctccttgtatagtggaggttttttagtgtttagatccagttagtattttttgggaaggattcctcatccctctcatgaactccttatacattattaattcatctcttgtttctgatcaaaaagaaaaagaaagaaaagtccaccattgttgacctaaataattatccttactcttgagactaaagttctcccatcatttctaatgtgtttcctaagattcatacgaaaaggctccttaacctcttttgagtgctccactccccatccaattccttgaattttcctatagtgatcttcctctacaagctgcccttctcaagggcaaacctccacaaccatttgcctagaaaggccctattaaggacttccatattctaattcctaggcttccatacttcttatctttgcaaacatttggtcaattataggatcatcctttttccttagcactgatttccccacaaaaattttctaatttgtttcactttgctgggaattgtaaaaagggacatgaaatagattggaaggctcaagagtgttgttacaacccaaattccggacgacccaaaatttggcccgtgaccccaggtcaaaggtttgaccctaagggtttctcctattccacgttggcagtcaactaaaacactctgattttttttttttttttttcacatataagtcccactaggttctcaccgactaacaatatttcaaaccttactcaaacacattaagatttaataaacatcattgcattcccaaataaaatttcataaaaaatccccttaatcaaattaaggtcttattacattatccataattcacttattacaaggtcttaataccacaaacacaataaaaaataaaacacattccactaaaccgctccaggggcatccttaagtcctctctgtcccacctgtggatcctcaagagtgatatctgcatctaaaaatatataaaaaagaaggggtgagcatttccacattgctcagtagggtgcctaacactcaaagggttaatggggaattactatattttgagaacccaaatgcaacagttcaccaatataaatcaagtcacacaatttaacatataacattaaactcaattccacaacatctaatcattaaatgaatgcatataaacgtatgacacacaatcatacaatgcactatcgttctcgggttttcaccgaaggatacgcatccgcacccaaatatactccccattcggagtcttcccggggtaaacttttgggtctttcaccctagggatctctctcccttcttagttcgcctcacacgggctttcacttttcatcactattttttttttttttccatttcatacacttttcacaattttttttttcttcatacaaccatgatgcaaatgaatgccacaaactccaaaattcctcaataatttcaacaattccaataattccaacattctcaataatccattaaaataaaattttcacattaaaattcccgaaaatacaccaacgaattttcaaaaattcacacatcaacatgcttgaatttatatcacaatttcaaaaattttcaatacttctaataattcataatatttggaaataactaatttcccacaataaaattaccgcaattattccaatcagttttcaaaaattcataaatcactagatttgaaatcttgccctaatcccggaattttcctacatttctaacaatttttaacaacctaaaataattatttatcaattacaaagaattccggaaattacaaaaaacctagaaaaatctcaaatcattccagaaaattcacacaacatcacaattacctacttaactcataattatcagatttatattttttttcaatgaaaaatacattaaatttgagttttaggattagttttcctctaccacaaatttgagaatttggccgttaaaaacaaaatcagccaccgtagacttgttcctctagttgaatagagtacttccttcgaatttgggccgaaacggagatcgtttggccgtccaaacgaccggtcaaagctccggcgagaaccccaaaattccacagctgttgctcctttccttctccccgcgttttgcccttttcaaaaactcctcattttcctttttttttttttttaacagcccacttttgtattcctaccactaccagccactaaagcccaacactaagtgaattatggataatgtaataagaccttaatttgatcaaggggattttttatgaaattttattttggaatgcaatgatgtttattaaatcttaatgtgtttgagtaaggtttgaaatattgttagttggtgagaacctagtgggacttatatgtgaaaaaaaaaaaaattcatagtgttttagttgactgccaacgtggaataggagtaacccttagggtcaaacctttgacctggggtcacgggccaaattttgggtcgcccggaatttgtgttgtgacaagtgtgctatttataagaactaatcttcctcccttggaacgggacttcttgcaagaggtcaatctcctgttgaatctccctactgcatcccacacagcacaagaagatactcccaaaggtagacaaagatgagaagcagcaagtctcctggccttgcacccaaataaagaagctagtttgtccactttgtctgcttcccccactgggataagttcattttttgaatatttattttcagacctgacacaacctcaaagcaaattacaatccatttccaatatctaactgaattgtgttaacctcccagagaaggagagtatgcctgcagacgataggggagagacatagattccttctctcatgatgacttgcctttaagcaggtcaaactctcaagtgaaattattattagcatttgtatgataataggcgttgcactctaatataggcacattactatgaacaccatccaagatctgtattgtctaacacatgccttcctcttagacttctcatatggaaagccattttgcactattttttttccattaatcatggactcaatagttattgattttgtgctgtctataagacttgcaagaataggatcaagtcaacctatgatggactcaatggttattgattttgtgttgtctataaaacttgctagaataggatcaagacaatgatatatagattgacttgatccaacttaggtgctctatatgtgaagagtggaaggaggtttgagcatattttgtgcttaacatggggcattcagtgaagtttaggagctcttaggggatactttagaagcttcaaggaaggtttctgtgattgccatcttctttatatttgacaaactttgaagcatggaaaaatatggattttggcctgtcccaggcatttataaagtattgcaccataaaattctgaattttttggaaattgcttctttagtaaaggatcatatgaatattcagaactaaacgtatcaaaatgagtgttgttgcttagtaaatcttctttacgaaatgactaaaaggagagttagtaccttgtaaatctcctttctaagtgctcataataag

SEQ ID NO: 10767 - DNA, 2901 bp, Vitis vinifera
  Intron number 14 from transcript GSVIVT01009071001 (locus GSVIVG01009071001) derived from phytozome v7.0 (chr-ID chr 18; pos 4707114 to 4710014 reverse strand)
tggccacattcttgatttcagtgatctgtctataggtgactacttttcagtgattcagttagttttccatgctacagttatataaaaaaaatttatggctactgtttgtctttgaaagcattgagctagttgaaagtcttatatcatgaaggaaaccttttcagcatgtttggtgtctaatggttttatattctaaatcaattgtttttaaacaaccaattttgaaaaagctttaggtggtgtttggttttttttacttaattctaaatagaatttaaaactaaatagtgtttgatagtgttaagtattaggttgtttgtttttgtaatattttatttttattaagcattaaaaagtaaagaaaaactaacatgttactttttctattcaaccaaaaatttatagtaagttatgaaatagtagaaaaacaaacaacttaaagtctagaagcaaattactttcagtaaaaagttaaaaaaacaaatactctcttaaacttgggcatttgcttataattttgtttattgtaaattagattttaaatcccatgtattgcatacgttattttatgcatttgaggttctttttgcttggttagagatgttagtttttccttctttagttgattttatttacttctgttaaaatctatggatcctttttggtagaatgaattggaaattgttatttgttaattctcttagatagagatcaccaatcagtttcccatcgtccatatagggatttttgctgagttttctctatcaaagttactgatcaaatgaataaggttggaaatttattctgtcaaaatcaattactgttcccataggcaatgctcctaaaattaaaactaggcaaatttgatttgaggcataattgttaatttatcagcctgaataagaacacctgtttttttaatcttcttttccataaaacttcatgttcaaaccctcactgtttagacacttgatataatctccattttccatggccatgttacttctatgggtgtgtattaaactgtttgcagttagatttaggtgcctgtttgcaaactgaaaatgtttagatgctttttgggaccatgtgtgaagaaattcaggtttgagtggcaattgactggagatgatctgttcatcatttttgcagttgaaaattaaacaaaaagcgcaatccattatttgaaccagaccctcagtttgctgtttcttcaacatgacctagtttaatcccaatattgtttctgttcagttgataccagcaaaaatgctttcattataaattactgtaaaaattctctgtttggtgaagattcagaacctcaccagcctttcactctgcatctaagaacactctgatactataattcatattactattgttttgatttcttttatattgcatacagaaaaatgcactatgttgtcttcttaaattctagcatcagtcatgacataaacatcttatatggtctaaaatgtagtttgtgatatttgttgtactaccaattttcctaaaatcttaagcttgtaggatttggattttaatactcgcccatatgtgtggcacccccatatatagagagacacataggcttgtaggcaaacaatgacaatcaacctctttgggcttaaatgtgggctcaataaattagggaaataaatattatgcagtgaggcttgaacacatgacctcccgccatacaatgctatgataccattagggatacaactcaggtggatgggcttgactcaacccgaacccaacccattgtttggatggacttggaaagtcatttccaatactttttttttttttgataagtaaaagaagtatattaaacgaaaagagggaacaccaaaaaccggtgtcctctaagtatacagggagtatacacgccacctttcctaactaggagcctatccagtctacaaaacttacaagagaagaatgactctctgctagggaacccttgacccaaaaccaaagattacatacaaaagaatattttaacctttgaagcaaaaggtcctcatccccaaacgctaacctatttctctccttccaaactaatcaaaaaatacataacggcgccatttgccaagccttcttgcgtctttttccaatacttaacttggactgggattaagttttttcaatctgaactcaatttgggttgtgctcgagccaaggtttggacaactcgagcctaacctaaatctgatttaatgtttttataaaatttataatatatattatcctatgtaataatattcattttcttttgagatttttaagaaaaaatatcaatttatattatattatattcgttttcctttttttttttaagatatattttttgttactatcttgaaattttgttctctttactctttaaattttcatataaatgtacaaaatttaaaaaaaaaaaaaacattatagatgaatttggaattatgtaactgatcaacctgatcaacttgaactcaacctgagcttagagaaatgaggttaggttggatttgggtttagtatctcgagttagaggttgggttgggttaagtctgttttttaatttagattaggttcaagttagccatgaacccaacaaactcaaccaagttacaactctagataccatgttgaactaccaattttcctaaaagtttgatcttgtaggattttgattcacaatgtatatcattctctttgataatatctatagtttgtaatactatcttcttgacttttagcatcagtcatgacatatacatcttatatgttctaattgtagttagtgatgcattaggtcatctttatcaccctaatgtgaaatctgattcctatatttctttttcaggtgaccctatttgggacttgatccccatacacctt

SEQ ID NO: 10768 - DNA, 4816 bp, Vitis vinifera
  Intron number 1 from transcript GSVIVT01013486001 (locus G SVIVG01013486001) derived from phytozome v7.0 (chr-ID chr1 3_random; pos 1555915 to 1560730 reverse strand)
ggggaaaacccagaaaatatttatcacgaaagtatttattttcctttcaaataattgattgctgccatcctaggctatgaacctactggtctcaaatccctagtgattgtaacttgtcccacttgtgtcgaactctgaccaaatcaattcaatgggtcggcttgggcatcacagacaaggaacaatcaatctttatcttatttattatacattattcttattttttcaattatttatatctttatttaatgatttagacttttatatatatatttttaatagcaaagataaaagttcaataagtatttaattaattaataccttacttttttttctagatattttatttgcatacgttgggtgaaatttcttaggaggtgtttgcatgtcattgaaagtcaaaccattaatccatgatttagaaaagagacaatagaaattttttttgcatcacatgggtagctccgagccatcactaaagttattctgaatttggaactagttgaatttttattcttcgtagaatcttaagaatcgtactaattcacggttgtaatcatatcaaggaaaacactagttgaatttgttcttagaatcctaagaatagtattaattcatgtaatcatacaaaggaaaaggaaaacactaaggtatcaaatcgatgtttatcaaatttttcgtctcggttattgaatgtgtgtcgaaatgtataaaataaaattataaattgagattatattgaaaatattctcgaaacttctcttttggtcacgctataattcactttatttctttataaaaaaaataaaaattaaataaataaataagagagagagagagagagaaaatgacatactttggtgaacttttattgcaaagtcgaaattgtagcggtgaagtagatgacagagagtgcagggcaggatcgtgtgctcactggctactctctgtatccccataaagcttcatgattgcaaatgtccttatgaagctgttctcgatttataaagttgataaatgcaatggtgatgaaaggttgtccactttgattgcatctttcgtcagaatcaaaagctagggttttgtcttgtcttccacttctggtgcgtttggtgcattgccttcatcaataaataaaattctttagcattgcaatttctattctataccacaattattagacacccagtggccagtgccaaagcaaacccaaaaacaagaaaaataaaaaatattatgaatgtgaggaaatattaggccttatttgaccaggttgtggctaaggtctactatgaatttggattcttttcatgaaattgcaaattagaatttacatttagaaatttaatttctcaatccccctggtccccacctgcctaccaccctttcttccattaggctctccagcccagtaccccacacataccctcttcggccccacttacactatagtgtggcaaatgtggacggtggacccgtaccctcccaaaaaaggcccaatcatatcctcacaagatcatcccacacccaatcgatgtcaaccaattttactgactccctaggatgcccataggccgctcaacgcctccaaaaaattgctcctttcgaggtgacccgtggccgtggacccatttttattggctcgagaagacttttattttgaattaatgaatattaggaccgtaggttagtggcgtaggcacttaggataggttggagtctgtcccttagaccctatagacttttttattttttaaattttttgtatttttcttattggcctcctaccaaccccatgcaatgatgattgataattggcgatccatattattctctttaattttttttttatttgcaaggtgggtctgctaattgggtagtgcttcgtttggtagattttcattaatccttcttgcattataatattgataggaaaaaatctataataattcatttatgttattgtaagtgattgagaatattttagattgaaaaatattcattaagtagaaattaattgctttattaaatgaaaatggtgtaggaggtgatatagaagacaaaggacagttgtcccttgctttaaaggaggaaaaaaaatgccttgcatgctcaagaagcaatctaaaaagaaattattattattatgttgagattcggacaaagttgaaaatgaggagcaatttatgagtgtagttattattaatgtttttcatcaaaggtatccatgagacaacgagatagttttttttgcatctttgtccacttttatcacgtctcaatgagacgagtttagaattaaaataaataagttataaaaggatttagggttttttttttttttaacttaaagtgagtttatgtattgttttattacatatcactctagattattataaaattaattttaaaaataatttaattttaattttttaattttcatacatataaaataattaaaaaattataatattttaattatttataaaaaatatatttatttttaatataattaattttttttaaacttaattaaaaaaaaaaaaaaaaggttcaatggggtgggatgggtttgggtaagggaaattcacatatccatcatgcttaaattttttttcctaggggtagatgtgaattatcttaaataaatgggaaagatttgggataggagtaacccgttcattgtcattcctaaatattaattagctttgagatcggtacaaagtttaaaagcttaaacaatttgtgaattttaataataataattatttttaataaaggtgtttataaactctatggagatgttattggttctacttgtaatgagattttagaagtcaaaatttatttttttaagtttaataagagttttcatcttggctaattttgttctaagcgcttattaattttaaaaaattaaatagaaatcaagaaaatatacttcttatacaaactcaattttatgcttttaaatttttataatatccatatttttttggtaggattaatggtgtaagtattgttaaattactaattagatatatgacgttttgtcttttgtaagttaaaaagatcgataagtaaggtggtgtttgtttttttacttaattctaaataaaaccttaatacttaataatattaaatattaaattgtttatttttgtagtattttatttctattaagtattaaaaagtaaaaaaaaccattgtgttattttttctatttaaaaaaaaccacatattttggctttttctatttagtaaaaagtttataataagtcatgaaaaagtaaaaaaacaaataacctaaattctaaaattaaatggttttcagcaaaaagccaaaaaaacaaacaccacctgcctcctactctttttttttttttttttttccaacaaaaaaatttctagatatgaaacattttgaataaagatataaatatgccttatatacctttcaaaatcactttcattttttttttaaatttgaagtagtaatttaaaaaaaaaattgaactagtaaaaaaaatttaataccttaattttttttaaaatagtttttcaaattattatcttttcagtgaaggtttatataaaaattattatttttattttaaaattaaaaaacataaaataaatttttaaaaaaatgatgaattgatcgaattattttgactatgtttggtttccaaaaatttgaagagaaaatacaaagaaaataaaataaagaggaaaaatataaaaaaataaaaggtaaaataaaatgaaaaataaatttaaaatagtaaattatttttgtattttatttcaaactcacttcacttattaaactattttatataaagattaaataatttaaaatatataatttttttacttatattaatcacatttgacatttttcatatttaaaaaaatatataaaaaaaattaaacttttttcttttcttttcctactctttttcaaaaccaaacctctcctagcagcagactggagtcgagcgtaggtgccggattcaaaaggtcaagtcttaatcaaccaagcaccggcaacaaatggctatagccgaagatcaaagtatgccaccaatcatctaaataggggtggaataacttgactttgaatgaatgtagatgattgcttagaacccatctcccgtgcaatttgatctctctcccatttgtgaagttgggttatcaccaagcctttttgttagcaatcaatgaacttccccctcttataatagaaggaaaatgtgaaatttgtactagagtagtgtttggatgatgataaattaaagggtgtaattgtactagttcctcctgtgtgtttttataaggatggatttataattttatttatatatatttttaatttaatttttttgtatttgatccataactatcacaagggattttttatttatttttaaataaaatatgctaaaacaaatttcacacaattggaaatttggaaggggttgagagaagtaaaattatacagggaaaggtgatagatctcttcggtttatattaaaaaatggaaaacagaagagggagaaaagacgggcatttcctgtacagagaaaatgattgcagtgggagagagagagagagagggagtagaggccagaaatccagtgttctgagcatcagaactgtttaacaccagttgcacaggcccatcatcgcttcacacttaacacctctctctctctcaaattcatcaaacattcttgctctctcaatcctctctttttagattttctctctctctgcagttgtggctaccaccaggactcgtcttcttccgcac

SEQ ID NO: 10769 - DNA, 2844 bp, Vitis vinifera
  Intron number 7 from transcript GSVIVT01008024001 (locus G SVIVG01008024001) derived from phytozome v7.0 (chr-ID chr1 7; pos 6573534 to 6576377 reverse strand)
gaactgctcttccacgtgcacccaaaaatcaacttgtaagaactgtatgaatgtcttatttctttttgaggttgtcagaagtctccacaagtaaacagaaagggatatactaatggcttaaagaaagggatagcacatggagtacttcttgacctaatatctgatggttaggatccatttagtatagattctatacaactctaatcacatttgttttatatatatatcatctcacttacactttggtagctattttgaaagtaggattgaatagcttttcaaaattgatttttcaagaatcagaatatcttctgactttacaatcaggacaagaataaaatagaatactaacaactaattgatattttacttttattttttttaattagcaacaaattttttaatgttgtacataataaataaatttgaattatattattaaatattttgtatcaaattattttattagttatgttatatataaatacatattgaatatatgaaattattttatatctatgaaacatttgattaaattttattatatagaataatattacccttttttatgggcaaatagggatatattaatcaatgctcaccagggccggtggggcaaaccatagaagtatacattgggaaccagaaaaaaaaaatgatggttagattatatagaataatattacttttttttttttttgataggtaaattttttttgtccccacttgaacctagaacctcccacaaaccctctccatctctttaccacttaagctaagcctcaaaggcaatattactttaaattatgttgtttcttttttcccaataatttaattttttagatcaaaattttttatctgtagaattaactactaatagtctaatatcacaataaagaaatcatttaaggaataatacttttgtaacttaatgagtacatgatattgaatgttagttgaaattgttttattgttgaagtgtaatgtctgttggtatttataattgatggtttttgtctcgtaatgtaaaataaagactattattatatatatttttatttgtgtaagtgtgttatcaacttattgattcagggaatgggggtgaataggtagttcataatttatgtcaaactatcaactctaaactcaattttcttcaaccatgattttttattaatttggttcaatcaattgattgttttgatgccttgtagattttcaatgttaaatttgatcaattaatcgcacacctgacgtcagatatctatgtggaaaattacctacaaagattgccttaaacccctacaaatgcaaaagctgtgtgtctattgaccatagtaaaaatccactaaatatgaaagaagagtgcatatggttttacctaatctggatgctacctaccccatgagacttataccgacacatacacttctttttcatgttcatgacacaatattccgcatactccttaatagagatctaaaaacgatattaaggctcggcaactcaaacccttgatctctacttttcctccctaaattcaagattttcttgggcaaattttgatctgagagtttaggaaccaaggcaaaataatggcgcctattttttcaaggctcttccaaaaatatgtttttctaatttgttcttatactaaaaaccttaactttagaaaaatacaaattttttcattattgttaaaaaatattctagataaaaaactttggagtgttcgagcaccctccaaggtggtgcttagggtgcttaagcttcccgtgttagacattcttgtgtctacagttgttttcttgttttgcatgcaattttccatttgattgcttgcagttacttttccagcgttcattgctcacctctcaatctcaactatggctaaatgtgtattttatcatgtcattactttgccctagattcaaacttgcaagctacttatctgagcttcacctttagagtcttcaactcaaatatgatgtgtataagtctcagtgatactgaaataactttgaatcagtgattttttggatcaaaattgtcaacctaaactaatatattaactatttgaattcaattaaaatagaaaaatggaagcacttctcttaaaaaataatgaaaaaaaaaaagaaatgaaataggttttttaacatctctatatgttttcacaatttaacaatctagtttaccaaatacttaactgctacttttgaaaccatagtttgccgaatgctctattgttttatgacacaactaacaattctgctaaaaatgtattcttctaaaaattgcagcaatacaaaattgacccttagttttgggaaggattcctcatctttaatcttacttttaattcatataaataaacatttgtttctgattataaaaaaaatgacccttagtcacaagaaaatttacggaaggattttagatgttcataataactgttctgattgcagttttgttctatatctttaaccatatttcttctaaccttccaaatttatgataattggatgatgttgaacaaccaattttcttaaaagcttgagtttataagatttgggtccacaatgtatatcaggctctctaacagatgatggttcaatataaggttaaaaaaagagatatatcttctgtgggaactcactgctattacatgatgggtactatggtcttattggtgctttattgttctatccattactacagctacacggtcattgacatagctcttattacatcgtagtaatatgaaaatgatgagtgtggtttttactaatatttgccactagaaattgcttgggttgatctgctgcatttttctgctgcagt

SEQ ID NO: 10770 - DNA, 6584 bp, Vitis vinifera
  Intron number 7 from transcript GSVIVT01017573001 (locus G SVIVG01017573001) derived from phytozome v7.0 (chr-ID chr9 ; pos 10811891 to 10818474 reverse strand)
agatatactcagttaactcattaaactttcatccagtaagattctgtttccttcaaatttcctttttgtcattcactgtttttgtttgaaggtaggctctcattgtttatgacaatcttaaaatagtttgtctctacattggccagagcaaggctttggattttactaataacaagttggttggttcagttggatgtttccttctctttctttggtaaaaaatgggtaatatcttttctatagtttgttgcatatgttgtagatttttttcaaccatatcaacagatgatataaagagttttatgctcattctcaatcaattatctcttattgtcatgacccaaattgcctcgaactgttgaggttctctctctctctctctctctctctctctctctctctctctctctctctctctctctctctcgctcgctcgctctctctctcgctctctctctctctccccctctctctctctctctctaaatttaatttaaaattttaattattattaatttttaaaattttgctgcttgaacagtttttgtccatatactttgttgaattgtggctttaagttatttctcatcacaattgccttatggtgctttaagacagatgcttttggcaaatgagctgaacttgaatgcacaagcgtttgattaaatagttgtgtaacattttgaatgacattaatttgtgccaaattaagtaatatttcacactgcagctaattaggttgttccttcatcatttccataatctttttgttgattcatttggtgccattcttttgggttgactctacagttgcaaaattagaaatatctgcatgaaatatgaggatggtttaagtgctcaatattctgagaaatatagccatcgactagaacaaaaattagatcatggttttacttgtgttcctgccatgaatcaatattataacagcactatggctaattgaaaccaattatgatccaaatttcttcttaaattcaatttatactaaggcaagtaaatcgcaacatacagagtaataagcagaaaataaagcaagactcaaaacacaagggttttacatggaaaccaaaaacatatgactcaaaacacaagaaatccaaaatacatgtattcacattcaatcaaggtccatggtaattgttcttcgtgaatcctactctccatgatcacaagtcatttgctttctttccttgaaccggagttttaccagaaaaatatgcttctcacaattaagagccaaatactaataagagacatggtttgaatggtatctgtcttttaaaaacttaattcaaaataagctcatgcaaaagtacaattttgatgaaagtagctctaaaaatctttctcaatttgtgagggagaattggaatgtgaaacaatgcctttgggtttgtttatattgaaaagtttttctctgttgtgcaataatatctttcaaaagaaattcaagcaaattagaaaatgtttccaaagaggtttgaaacacttcaggatttttctaaaaagttagttctttgtaaaagtagttttatcaagataggatgctttacgaaataagttaagagggctagaagtttttcaggatattatttctgcaaaagtgcacactaaccaaagatacattcagaatctgtccccctctccatgtccccctttctctctgtcaagagggtccttcatcatttaagggccatgttggttgaagaggaaatctattctctaatggattgcgctgaataattggatcagtttggcttctgcaaaaactttcttaagcccgatgtaaacagcttttatattttttcaaatatgaaaacagagtctctgaagtccctaccattcctaaagatgagatcaaagttgtcattgctaaaggaaatttagtcaagggtgttgtcagttgttatctcattgatatgtcatgcatggtgcatgaacctagtcgatcaggaatgagtgtgatcacttatattcctattggattatggaaagcggaaatagtggaattatgctttaatttttgtacatggtatgtctttccagcagataaaagtattctgagaagtttttaggttgtgtaaactaactaattgtatcattggtttcaaagtgggatgttgaaaaagtctcctctgatgtcttggctactttatttgatgtggcctcacattggcaatggctatatgttcttgtgaatgactgggtagattcaacttgcagtggctcaaacctattaaaaaaaatgggaaaataagagaaattcactagattatgcaagagaagtcacacacatatatttctccatgttaagaattttgctgctgatcattcaaagaatcccgcaaggttaagatgataaagcaaatcagatcccatgctctggtggaagtttgggtttttggctatgatgcatttccaacattgaccaggtttattcataactacacattagggaaccagagataggctatgctttagcttctgcctccaaagaagagcagcttttcttcatatcgtgatacttgctgtgggcagttcatttgtgttggtttgagatatggatacatcaatctacatgcgttgacaaacccccacataataagcttgtgaacagcaacaaactggcactcagtggaagttacccttgctctttactccatgaatgtgcccaggaattatttggccttagtggttcttatgctgctaaccacattaactgtacatcttttagggtcttgcactttaaaacttcatctaaaactgttgtttttatgtccttgtctctctgttaacaaattgatttttttctttgcatatcttttgatctacattgacaagcattcttgaagtacactatttcctgaaacatgtgtgctcattggtttctctcctactcaagggatacaaatgctatcttccagctacaaaaagaaagtttgtgtttgtagatgtcatttttttcaaattagtgcatattgtgtgtgtgtgtgtgtatgtctttatagtgaaagatttggaaggagtttagtagtggttttccctttgctttgcctggttatttattctcttgatgatatgctttttggaaataaatacagagactgccagttataaacctaataaagagaattatcatcccttattggaacattaggtgtcttactatttggtatttcttggtttccaattttcttgttgcttgcaagttgcaacccaattctcagctgtgtccatttgagaggattttaagagaggttctgttacaaactggaaagagataatcagatgtctgaaaaaaatggtacatgggcgtttgttgatttagctcttggaaacagacctgttagttgcaggtgggtcatggtggccaataggttactgaaaccaagttatttctaatcagagaaatgtcagtagcaaaaatcaatcctattcaggttcttctgtctattggaaccacttatgatttacatcttgtattagtttgatgttaagaatgtctattgcattttgagtagaacaaatttatgtgaacatgctttttgaccttgggctttgttcacctaaaaggaaattttgcctaaaaaataaagtattgtatgacaaaatagtctccaagagctcgtttgagagatgctcagtgtaggtacaagaaaagccaagcaaaatatattctgttcatcaaatactcttgggaaatactgctgtatttagtgtttatttggatgcgatagtcattactggtaatgactaggatgagatgaaggaattatatcaactagttacagagttttaatctaagattttggaaactcgagctatcctaatggcattgaagttgcaaggtcaagtaagggcattttccataagttaaagtataccttagatttgttgcatgagataggcatgctaatatgtaaaccacgtgaaactccagtggatcagaattattttttaggtgaaaaaactagaactctctagttgactttagaagttattggagacttttgggaagactaatctatcttgcctatttcctactatggtatctattatatgttgttatcttagggagattaatttgaaggttgttgattggaattaagaaggcttttcttttaattttatttattttttattttgggactatcgttatttgaggatagtggctgctgatgtagaccgggcaggagctatttctgatggaagttctacttctggataatgccctcttataggaggtaatctgacatgattaactctagtctatgatgagcatctgcttcttcttgactatcaaatttccttttagttgttctgtgcctccattcttttgcaggttttctttggttggtacctaacaaactctgtaccctgttggttactacctttgagagctttggtcgggggaggggttggagtgtttagtggtgtgctcttcttgtttcaattttggtcatccagttggaaagaggtatcaggattttggagattaaagggtctacagatgatacatcatatattcatgcgttttggcatcatttaggttttgtgatgaaagacttgcattgtctcactgttgagcttcatttctttggattggatggcctgccttgcttgggtaagaaaggaagaaatgaagtttgtttgatagttgttcctgttagtggctttttagccaaacttaactagttctgctaggcctggttcagttgagtatttctatgggttggaaggcctgcttgcttgggtaagaaaaaaggagatgaagttattggtatgtattattcctgttggttgctttgaggaaaactttgatggttatgccaggcctgcctcagtggagtattgaggatgctgtcagagatcagaaggaataattgatgtgtgtttcctccaaatttgttgggcatggatgggctattgaagtttccgttttggcagtgggtgtatgggtattgtataccttgagtcgctcttttggcgcctctttttaatttatattctcctttgtctatgaaaaaaaaaaaaaaaggatgactattgaagttgacctctcagaccttttggaaattttgatttggcttctaatttgggcgtcaggaacctcatttggaaagacactgatattagttatctcctgactttcttcaggaagtgggatcctggaacttatttgttggttgaggaggattcagtctcttttgggtgatatcttccaacgaggcggctccatcatccaatcaggtggcttgcagtttggccaagatcaatgctattggttcttttgtttaatttggttttggccaagatcaatgccattggttcttttgtttaatttggtttagtgtttgttgtgttttgttctctagtttcagggtttttattagcctaatttgctgggttgttgggcctttttattttcacttcctctaaaggatatctcaattttttttttggatttattctctttattcatacaattttttgaacacctataatagataaaaaagggaaacagcagtctttggtggctaaatcatgctgcaaggtgaattatggagcaaagattcactggccttacgaaactttttggctgatggtcttgctggttgaactggggttcaacatcaaagatcccatgagattgtaatgttggtttgtcacagaaaatcaccaccaatacagcacataatctgatccaacatcatagcacaagatgcatttgagattgacaggcatttttataaaggagaaatcaaactggacttatctatactcttttaagaatcgggcttgagaggtacacatgcctcaacttgaggaagggtgttaagtagaagggaaaggctttactgtggaacccaattttgtgataaagctcctgattttactagggaatcctttaagtggattttggagtgcattggatttgtgatcaattccaattcatagaaaatatacagaaaccaaattctgaattttgcattggggcctacacttcccatttcaaggtcttaaatatataagatatggcttaaatgtaatggtgccattcagcccaaattattctgtgttcaatattattataaaatgggagtgtagccgtcttaatccttaggaatggaattcaatttcttacagaaatcagacaaagctctagtaatagagtacagaaatgtttgatgcttattttacttgaggctcatttttatttgattactcctggtctttctactctcaggaaatttgtgtaatttttgaataattatactgggtttactttggatctaacatatgtctaaacttcctgggttatggtgaaagtcaattactttaagagttttatgattattgtataactgtctgtgaattaacatgttgtattctcacattttcgaatttgatttctaagggtaaatttgtaagtgacaattggcaaggtctatactgtgattctaaaacactcgtttgtatctttacattgagctcagttgctcaagaccttatttaactgcccttgtttcaggtgcatcatacatttgcaactgcagggtctg

SEQ ID NO: 10771 - DNA, 7630 bp, Vitis vinifera
  Intron number 14 from transcript GSVIVT01024571001 (locus GSVIVG01024571001) derived from phytozome v7.0 (chr-ID chr 6; pos 8710035 to 8717664 reverse strand)
atttgaaggctttcattccgaaggttctttcccaggtatgcatctacatgggcatattgaatttttgtattaggtctaatgcattaaattcttcataccaaataataccattttcctaccaactttattcttaaatcctatgttgtttgctgcctcctttgttcttttactcacttgatgtgtagcttgacatagatgcagacctgttggccccattgtgtaatatgcttaacctaggatatgttcctcaacatgatgttacagtctcaataccagtgaggacattggccaacttcaagtcttcaactctgaagtggtaaaaacctattcaaatcagaaccaccttggaatatggagaaccaatcataaaaagtaaaagggaaaaagaagaggaaatataaacaattgaatttaaaaatatgtttgaaggacttatcatttgttatgtatgaatactaacttttttagattgacaggtatgagaaatatgttgcatgtatgtcatgataaaaatagttaaaaataacttaggcttttgtcaaaggccatttaccagtgctcgtcccaccacagcaggtcatcagagggtgagttgtgcactttcttatgccacattttgacacagaatggccacctctcagacttgaaacttgagcatttctactgtgcagctgagagatttaccattgcaccaaagaatgcccccctaaacaaggcttttaaatagtctgaaaataggacaatgccagatcataaaatgaatatggcaggcgttttcttggttgagggagctattgtctcttctttttttccctaattgggctatagtaagttttgaaaaaagcgttcatggatcttctaagtaacatggactttgataagggatgtttattgacacaatatacacttgtcaacacagaaaattgtaaaatagtagaggggatttttcttatggggaaataaagagggaaatgtgtgataaaatgtagcaacataaacatatttaaaaaaagatgaccaagttttttgcttttcaactagaaagaacaaaataagttttatttcacattttgatacactaggttatgaatataatgaccaaagtgcccccatttttacacttataaatttgaaaataaattattggcaaaaatcacacatgtatgtcctatctacgttctaagatctcaaaataaaattattttagagaataaaaaatttataacttcttttaaggagatttttaaatcttcctaaattttaaataaattcaaagatcaaatattaactaataatgactgtagaaaacctaaaaaaactacaaaattacctgaatatccttgatagaataatttaggatttctttatttcttttcattcctttcttgagtagactaggagattcataatcataagtcctcttgcttccataaacagcatgaatttactagtccacccgtatctcataagctggttggttgtgagtatcttatcctagactgcctcccaagcaaaaaaatgtactaagagttcttctccattgaattactaaattatgtatgcaaatcttgcctacatagaagcattttgacgaaatccttctaactaaagggggtaaacagaaaactctaacaataagaatttctaatctttttaaactctaaatagaactcaaatttaggaacagatagctaaatagcaaagcttataagaagccaggacttttcattaggccaggttgctgttccttactcaaattttgaaaacaaaacaagtaaaatactttctactaaccaaatatggctgcagcaaacctaaagttgacagaatccaccacaaatagctgctaactttgatgctacagaactaaaatatgattagatatcaatttcaggtccaaaatttgtgtatagaaggaagtagtttaaaccatacctcactaaagatactcctctattgtgtgagccatatggttgcacccattggtccacttgcatagatcacctgaaaatcttcccattcttccttgcacaagcataagcttttaataggttgggcctcctattttgtgcatgcaaaaagagcataatcacaaagtcttgaaagatgtggagcatattgatcatctttgaattccttacgtctttctttgaatggtaaaggaatcctccaggtgaagccaatctttttttatagttcattgatggcttggagatgaactagttgttatagggctcctacttttctcttttgttgtggtggtgcctttttgtatacttttggtgtacggtttgcattctatttttgttacacttagtaatactatctcttttttgcctataaaaaacccacctttcatcttcttgttgggaaagataacagaaaaagatcatgcatgccacacatgattgtttttgtgtgattgcaacatcatgcttccatcttctatccatacaacatgtgactttaaatctcttttatagtgatttttcctttttcaaactcatggtcatagatcattttcctactatctctatgtttttccttgtagttttatggtgaaagccctattgtctgaatttttttataaaattttatttaaaataaaacaacatataaaaaacttaaaacttttcttacatctatctttctctcctttcacaaaaaaaagctcaaggttttttgttttattggagggattttctttgtgtctaaaagagtgtctataacaacaaagaaaattcataaaagagagagagagagagagagaaggcttcgatgttgagggaatttttttatttgctagtgttaatgcataattttgtgttgaatgcagaccttcaaatatgaaccttgtgtccatcatgatatgtagaactagtagcaagtggatacacttctggacgccatttccatataggattattgatagagcataatgtattattcttttttcaggtggcccatacagtcatgaacttcttgatatattcttgatgctaggacatggtggcaaccaagtggtgttacctaccccttggtggatgctcacaaaatgtggatgatcatctgtgatggatgctgaaagaagttcttctgtccatctcaagatggtagcattcactttataaggtggataaatgaggggcctacctcttttaggatggatatcttcatgcaaccattcccaacttgctaggtgggtgatcaccttcaatcccttatatgcccttttcatcccattgagaaggtgtttccactgatttccataacccttggatggggatgggagtagtttagtttgtggagggtgtcatcggagcatctactacttgagccaaagaattcccctacgcttccttccaaggaggctggtagcacaaaatttagatgtgttggagtagtcttagagggccaacatggatgcggtgctttgatgatggatttagcctgtacatgagatggttctaggattttcgtttgatgattagaattggaagcttgttgaggtaggagtgacctagcattgccaagttcgttcctcctaattgagcattgggagtccactttaggctacatatattttgtatctgcatttccacctaatgagttagttagttacacacatgccatgtcttattgactcgttgtcttttacctctcctaactcttgtcttggaaactcctataaatatgacaaagagctcaccatagagaaggggaatttttattgatatgtttccttgaattttccactttagagactcactctttgaaattttctatttcaaatcttgtaaggctattgttattccctcctatccttgtcatatcttacttggatttactttccattaaagcttaggtacctcattgtttatgtggccaacctcctttgaagaaaacccttgtgtaaacagtatgaaaattttctgaaaagtttggtgcagattataatgtcttctagtatgcctatttactttatgtccttgttgagcatgtcaaggttcattagattgtgattagagcaggttcagagggatttccattggggtaagggggctcttgcgtggaagccctacttagtaaagtgggggattgtatattcaaataaaaggaaagctggtttgggtgttagatgtctctctttgcttaatagggctcttctttgtaaatggtgttgacgctttgtgaatggaagaggggctctttggaagcaagttattagtgggaagtatggggtagaagaagggggatggagcttccatgaagtgagagggatttggggtggtgggcctttggaaagctataagtaaagaataaaatatcttgagttatagaattgcatttgaagtgggtaatggcataaggatgggtttttggaaggataagtgatgtggtgacaaggctttgtgtgttttgttcccctttctattttctctaacggcttcaagagaggcgtgagtggcaaatgtatggaactccacagttgaggatggtggttggaattcgagtttctctagaccttttaatgattgggaggtggatattatggagtagttcctttcaagaatctaagaaaagagggtgtcatgagacttggaagatagggtgctttaggcagtgccgaatagtggaaagttttatgttaagtccctctatgatgctttggagccaggtgatgcagtcccttttccgaggagtgtcatttggagtttgtgcgttcctcccaaggcgggttttttcacttaggaagcagcggggaagaccttaactttggataagatgaaaaggaggggatggtctttagcaaatacatgcttccttttccacatcgaagaagagaccatagatcacattctacttcattgcgttaaggctagggttttgtgggaattacttgttgctctctttgaagtgtcttgggtctttcccttgtcggttagataggctcttcttggttggtatggctcctttgtgggcaagaagtgcaaaaaggctcaaaaggcaaccccttcatgtgttttttgtatagtttgaaaggaaaaatataggcttgcctttgataacaaggagctttcaatacaaagtgtcacaagatgtcaaatgaccctccccatgggcttatataggaggagggaagcttctggagactcctagagccatctacactaagacattggtgggaagagtgtggaaggttctagagatgcctagagatctccacacatctctacactatggtggaaggcatgagaggagtccaaggctttctagagaattctagagatctcttgtatattcttgtacatagggttgtacatagattagtgtagggagttctagaatattcttgatttataaggaaccctccaaggtttcagagagttccattggtgcctataaataggtgaggccctcatttggccaaggtaccacccaaatcacttcctaaccaagcaagtgagcttccaagcacttgtaaaggcttccttgagttaataagagctttcattctttaaagagttgcctactaagcttcttaagcttttgagtcgtgagtgtcttaacctagcaagctaagcatcgggaacaaggctgacttagcaagatcaagcgtcttgacttgcctaagtgccgcatgagcttagtgaacgactaagtccgtgacaaaaggctgaaaaactcttttgcttatactttttggtcttgggcaaagtcatgtatagatgaaggtcctcttcctttaattaatttttttgattggttaggttctagataagggcgtgtgattttttttgaaacccctcttttttgtagattctacaactgtattattcctgtatgctttgggacactttttgggtgccccttcttttttcttaatactatcttgattttccctatcaaaataaaataaaataaaaatgtctcctagagttcaaagcaatgagttcaaaatggtcatagttcaagtggagaacatgtcatttacctggaaagtatgtgtaataacaagttaaacatttattttttgttagtttatttaaaacattacagttatattttttaatatttaatgatattgaaaattaaatttgatgggagtatctctctccaattatgattcatgaggctatatagtgttttgagcaattaccctcatttatacaaccttttatataatagtatctaataatgatattttttagaagcctttgttgatatttattttcaaatgacccccatttttattgttttgtaagaaacttaggtctctctctctctctctctctttctttcttttcaagatgttgctttttaacccaacaaaatcctaaacttattgggccatgttgcaagaatattatatacatgtttctaggtttttttttttttttctttttttgatagtcaaagttgaaattcattaaaaatagcgatagcacaacaaagtacaccagaattatgcaaagagcgccaaatataacatcaaaaaagagccaaggagcgaccgaggcgggattacaaaaaatacctccctcacttaataagaatccaaccactcaacaaaatcaattagacattgagtcatcacttatgcacaactttagccacgagaacatgactaaggaacatacttttcaaactttggatagacaactcctctttcttagacaaccttcgatttctctctttccacatagtccaaaaaatgcacaaaggagtaactctccataccttcttccatttttttcccccaaaagatccatgccaccctagcaaggctatcacctatgcatgtttcttaagatagtgaatctataataattctttttcttatttcttttattttttagttttagggttttgtatggcatgtctctgacaaccatcagaccatatctgatgagtatacatgttaaatttgtattcaatacaaagcaccttgtttggagaactcattctccggagatttatgatcagttgaggcaagaaattgatagtcattaggtaatgaatatgttgtttgacctcagggtttggagagttgatctccattctgtatacaacccaaataaactttaccagctaatagctgatgaggccatctttaaaaccaaagtgtcaatttggttggcatttattcctttttccttttagtgagtgtttcttgtgtacttcgcttgtattctggatgcacttctctttggcaccttttctgaaattgatcggttgccttccaatttgaggtcatttactttctctgacatatccatgtgctgcagcatgatatcttgatctcacaaaccaatcaatgagagaataactcaaataacattggggaagagaaataggaaaatgtgagaagagtgctttctaatttgagctactatttctccatgtggaccataatggttgtatgaaccataaataatgttatctccctatgatcatttttcttgtgatcactaaggccataaatctaccaagtcaggctatttcaagggttcattttgattcattattcatattttactaattattttttatcagaatggcagtcaaggagtgattattcttaacttctgcctgcattttttacaggtacatattgagggtctttgtc

SEQ ID NO: 10772 - DNA, 9667 bp, Vitis vinifera
  Intron number 6 from transcript GSVIVT01018298001 (locus G SVIVG01018298001) derived from phytozome v7.0 (chr-ID chr1 5; pos 11537132 to 11546798)
tcatattgttgacattgcgttttttccgtattcaggtgcgtactttattttgttttcaaccttctttatttgcatctatttttatttttattttttatatttgtttacgaatgatgaatgcttctgtgaaaaccaaaaagcctaaataacctcttacttgagcaacttggtatatctggacgcccagaagatttattaaataggctataataatgtttagaatgtgtatcaggattctaccatttaactatctagtggtaaaatcaaagtggcttgatgatttgacaaacttacgttgtataggttatagataggctttatcatattgcattcaactgtacaataatgttcaatttgcatgctcagtgtttttgcatttcattgattcgagggtaggtccagcaacatgattgtatttggaagcccttgaggcctggatcgagtgctaaagggatgggagggtttgtgggaggttccaggttcatgtcccaatggggacaaacattaacctatcaaaaaaaaaaaaaaaaacaaaaattgattgtatttgggctgcattttgaagctccacatgatgcctgtggtttaaattggattgacactactcatattacaaattgactttgctgataaaagttgttttatctaacttgtcaaaataaattatgcactccaagaacaaaggtaatcttgatggaaccactgggcagtgactgcttatctgaatatgatgctgaagcttatatggatgcaatctcttagctcgcttgtgcagtgacattaaaaaatgttgttgttaaggcttcatttttccaattatttttaaaatgcttcatgagtgccttgagaagatcctaggatgcatcaataagcttctgaatccaggggcaacatcgactaaactaaagccaatatttatacttgctttagcatatgcttagaatatcttataattggatttgtaaaactaagttgcccttcttaccactgaaagcacaagacctaatgtcaaggaaatgattaattttgtccttgatttaaaatggctaatagtgttctaatatcagaaggatatgtttatcatttaaactacattaggtccatatgtgagtcctaccaagaaaattgtgagtggaggaggtggattcagtgatgcctttcatttcttaattcttttagtgcctgttaatgagaatgccaaggatcagtttggcgcctctagacaactttggcaaggtggttctctatcactttcttgttctatatgactaattgattgattactagggctaagcactatagtctactggagatggattcagggtatttgtcatacattaccaaaaaaaaaaaaaaaaacacttcactgttggtgtcccatatgcaaacaaattaataactatatgtttttcataggcaagtcgtggatttgatcccttagttttggacctttgaaagaggatttttagtagcaccacctgtgaagagtcagattctgaagcagtgggaatagcttttccaaagctttcatgtggtgggttttctccttgacgagatgggagagcagtaaaccaaacatcgtactcttcagagggaccgtgtcatgtcgctaagctgaccatccatctgccctaaaagcaagagaaaatattcaagtgcaagtattaaactaaataatagtagtgccgcatatgatgcatccagaatttcaaatttcacataccaatttttcataatataattaaaggttactggagttttatttatttatttttgtaaaaaatgcgctaattttagttgattgaaattattcatttttcaaatttagaaaagaattaataatttacattttaaaatttagttatcttgaaaattatgagaggggtcaaaattaataaaaattttgaaaatttaggaaaggttgttgagattcattgagcatactccttattaccaacatctaatattaaaaaataaaatgagattacacaatagtgaatgacattgttataaatatgtcatagaatgagggcatataggagttacaaaaaaacactacatctcctcactcccacttgtagagtatataaatgtacaaacattgggcatgtttggttcctgttttcaagaactgttttctgttcttgaaaacaaaaaacacaaaaaacttgtttggggaaaggggtgtgtttttgttttttgtgatttccgtgttctcaaaaaccacttttttgaaaacaataaaaagatgttttcattgttttttcactgttcaaagcatagattgtttttcgtgttctttttttttttttttgtgttttccacaaaagtgagctccacccaactaccacacccccacccgcaggccctttcttcttccttaaattattgaaattaatatacttacacatggttacaaaatcattatttgtttaagaaaattataactggtataaaaattttaaaattgaataattttttttaatttaaatgaattgtgcatatgaaaattatttatatatttataatatcaagttaatgaaagaaaacactttattaattaaaaaaaataacttttaaatatgtttttttattttacttattctaaaaaacttttttattgacttaactaaacatgtttttttttgtttttgagaacaaaaactgttctacagaattcaattcctaaacacaatttttatttttatttttctgaaaacacaataaactgttcttaaaaactgttttccagaacagttttaaaaaatagcaaccaaacagacccattgttttttatccaaggagaaaagagaaagatcatatcatcacaattttaacattaatgacttttgaagttggctagacactttgaagttgaggtgaaatatgttaaccatattttatattggcacttgagaaaatatgtttgattttgtcatgaccttgatcacttttatccagagtttcattaagcacacattctcatatactcacctctccaactgttcatagttgcttgtgcatgtgagaccatgtcttttaatcagaaacatactgattctcgtgtgtttttatttcatcatgacctagatcatttttatctagagattcattaagcattcattctcatatactcctgcaactgatcatttgttgcttgtgcatattggacctatatatttttcatcagaaacatactaattcattgatatgaatttttaaatacaaatgaaggacaaaaatccttccagaatatccaaaagttgatcaaaagaaaaagaggaaagaatttcctgaaagcaacaagaaaacaacaatatagttcaaggatataacatgaatatatataagtcagagaaactctaaacaattcagtggggtaaaaatcccctacaaaagaatcctgctgctaggcttctcatttcactaactgatctgtgtcatgataagctaaaaatggagtttaagagaatgaacaaccaagttacccaaatagcaacatctaaaatttggggaagtctagagctttgaaaagttttgatggttgtcattcaaaactgtttttgaggttttgaaaagtttctcgaatggaagagtcaagaggactttcgaaaggtggtaagtgttggtttgcaatagaatccaagacattcgaaatatccattgaagtggtccaaggtataaactttaggttggattgttatactaataaggctggtaggtttttactctgttcggtcagagatgtggaagctaagaagttttgtcttgtatttccagaaggaaaaggtttagtagggggatggtttttgttggctaagaagggcccttggagtctccactctccactctagctgtgaggaaattctttctggaagttccaacctctgataaggaagggtgtagtgtcaaaggctcagagaaagggttaggatcgtttgttaaataaggcccacccgagcctttttggggggcctttctcttctagggcttcctttgaactcgtcgggagcgctgcggggctggagcaggagctcctagccattgaaggtgccaacatcgggggatcgtgtccttgtcgtctgatgctcaccgatgaggtgctcttggatgaagcttccaggtattcccttcatcacaaacgctctcttgtatctttggggattggggttttttcttcttctactcctttcttggggcccgtttatgatgtgatggggacgtagggggcttctagtggttcagatgggtcagcagaaggggcgaggagtagggttccattgcgagaagagctgtttgaagttttctcgacacgcgaaggtcggaaagagtctctgtgggcttcgtttggcagttctagtgcgactgagctagctattgttctgtttagatcgggatttgagagcccaatagcggataggatggcccttcaacaggaagagggggggcaggatgaaggatggagttctagttatcttgcgaagttcagtcattgtctgggtatgccgacggaagggtttgaagaggaaattttgtatcttttgaggagaatgaaggggagaattgaatttaagagccaggacggggtgtatagaaagacgaagtcttcggcttcaaaatctagcaaggaactaaagaaactagagtggacagtaagctataaaaaagctagggtggctaccaatacaggtatgtctggaggagcttctggatcggggtgcaaatgaagataaggattttatcatggaatgtaagaggggcaaatgacagtaataagagaagggtcattaagtcagtcataaaatccaataaagtggatgtggtatgtctacaggaaactaaaatcaaggaaatgagtatagggcttgtctgtagtcttggggtgggaagacatctagactggagagcagtcagttcgaggggtgcaactggagttattctggtgttctgggataacaaattggttgaattggtggatgtggaagaaggggagttctcaatttcatgtcggtttaagaattgtgtggatgggttgatgtgggtgttcattggagtgtatgggccggtgtgtagtagggatagagaggatttctaggaggagcttgggtcaataaaaggtttatagggtgacccctagtgtgtgggaggggatttcaatatggtcaaatatccaaaggagcatagtaggggaggtgggctttctacttcaatgaggagattttcaaaagtggtagaggacttggagctaagggattttcctttataagggggtccttttacttggagaggcgggttgaataatcagtcccagtctagacttgaccggtttttagtgacagataactgggatagtatgctcaatggggcgatgcaggggatctttcccagaccagcgtctgatcactttcccattctcttagaaggtggaggcatgaagagaggtccttcccctttcaaatttgagaacatgtggctggatgagaagggtttgaaaggaccaaatgaagaagtggtgggggagcttaaattttactgggaccttcagctttattttggacgcaaaactgagagccttaaaagatattctgaagaattggaataaagaagtgtttggtatcattgacactaaaaagggtgaaactctcagacaggtggagtattggaatgaaatggagaaatattcaactctgaatctggaagattgtgaagcaaggaaggaggccagggagtcttataagacttgggtgttgagggaagaaatatcttggagacagaagtctagggagttgtggttgaaggatggggacaataacaccagattctttcataggatggcgaatgctcatagtagaagaaattggttgtccaagttgaaagtaaatggctgttggtatacggaggagaatgatttaaaaaatagtgtggtggaggcgtttcaaaagctgtattatgaggaaggggggtggcttccttgtattgaggggttgtctttcatgaggttagcgagcaatgaggctgaggggctggaaattccttttacaaaaggagaggtgtatgcagctcttacagatctaggcaaggacaaagcccttggtccggatggctttaccatggttttttggttgttttgttgggatgtggtgaagattgagactatgggtttttttagagaattccatgagaggggcagatttgtaaagtctctaaatgctactttcctggttttagttccaaagaagggaggtgcagaagatctgaaagactttaggctgattagccttgtgggcaacctctataagttgttggccaaggtgttggctaataagattaaaaaggtgatggggaaagtgatctcagcatcccaaaatgcctttgtggagggtagacagattttggatgcagttctgattgcaaatgaggttgtggactcaaggctgaaagacaatgtagggggcgtgttatgtaagttggatatagagaaagcttatgatcatgttagttggagtttttttatggcagttcttaaaaagatgggttttagggagatggataaagtggatagaatggtgtatctcaactgtgagattttctgttttaataaatggttctccttccagttttttccaaagctcgagagggttgagacaaggagatcctctttctccttatttgtttgtgatagccatggaggtttttagttgctcattgagaaaggctattagtgggggcttcttatctcggtggaaggtgagaggtaggaatggtgaggggttacaaatatcgcatttgttatttgcggatgatacgctggttttttgtgaggagtctttagaccagatgacttatctaagctgacttctcatgtagtttgaggcatgttcagggttgaagatcaacttagagaagaatgagttaatcctggtgggtagggtgcatgatatagaggatttggtcttggagttgggttgtaaagtgggtgggctcccttcctgttatctgggtttgcctttaggggcacccttcaaatcaatggttgtgtaggatgatgttgaagagcgttttcgtagaaggcttgctacgtggaagagacagtatattcaaaaaggacggagactcactctaattcaaagcactctttctagtatgcctatatactttatgtctctcttctacttgccaagaaaactgaggctaagattagagaagatctaaagggattttctgtggggtgggggagctctagtccaaaagccacaccttgttaggtggaacttgatttgcttggataaaaagaaaggtgggttaggtgtgagaaatttagctctaatgaatagagctcttttatgtaagtggaattggcggtatgcaaatgaaatagaggctttttggaggcgagtcataagtcacaagtatggtgaagaggaggggggatggtgcactcgggaagtaagtgggagatacggtgttggactttggaaagcaattaggaaggagtggttgcttttaaatggtggattggcctaccatgtgggtagtgggtagagagtgagattctggacggacaagtggtgtggagatgagccactttgtgagtcattcccctctttattttccatctctttgcctaagaatgcgtgggttttggatgtttggaattccgttggtgatggggatggttgaacccctctttttgcaagggcgtttaatgattgggagatcgaggaggtgtagcattttttgcagaggatccaagccttccgggtgcaaagggaggaggaagatagagtgttctggacaacttcaaagtgtggcgctttctcagtcaagtctctttattttatgttggagctcggaggctcttctttgttcccttgtgatagtatttggagagtgagagtgcctcctaaggtagcattcttctcttgggaggcttcctggggtaaagtcttaactttggagcaacttcaaaggagggggttctctttggcaaacaggtgctttctttgtctatcggaagtagaaacggtggatcaccttttacttcattgtgtcaagacgcaggtcttgtggaaccttcttctctccctttttggtgtgtcttggactcttttgtgtacagtgaaggaaactcttcttggatgaaatgcagcgtttgtggggaaagctcgtaagaaggcttggcaaatggctcccttgtgtattttttggtcagtctggaaggaaaggaattttttagcttttgggaatggggagctttcgcttcaaagattgaaatattcttttatatgtaatctttggtcttgggtcagggtttctttagttttgagtccttctcttgtaagttttttagactaattaggctctaagtaagtgaagttggtgtgttgctttcctttccccttaggggtgtgtctttggccttgtttatatactccctgtgtacttggagggtactgttttttggtgcttcctcttttcgtttaatatacttcctttttatctatctaaaaaaaaaacaaaaaaaattggggaagtcagctgtcatacatccagggacctctctctcgtctaggcatgcaagagatcactatcactatagcagaatccacttcaaccaacaaactagaaagacacaaagctctgacatgcagccagccttctaaaaacatataagatccatctaaataacatatttcccagttatgctctggatctaagaaggttatgtaatcatatgtttgataattatgtctgttcttgtacaattcctatactcttgtactgtttttgaagcatcatgttttagtcaaatgaaaagaaaacaaaaaaggaaaaaaaaaaaaaaagattattttgtcactccactgaactcaggaagaatagttgtgatgagaaaaagatattcagattatcattttactttggagaaaaggaaatcagctaatgtaataattaaaaagtaagatggaataaaatcttgagttttaaggtttttgataaataagatctgtggaaacaagtccttaccacagaaatgagtatacaatgttggatatagtttatgaacctgaaagaatgatgaattacattgttgtgtgggacaatcaagctttccttatttatcctttttcatctttagctgttaactgaaagaaatatattctaatataccaaaaaacatcataaatttgttatatgaataaatatatattataggttatataaatgtcaaaaaaattgaaatatgtatttcatagtggcaagtagatgatcttggacctaatggtcatggagatttgagagtgggaggaagtattggaaactatcaattaacatcaacagcagtttcttgtagtacatatgtggactttcttaataatgcagcctccaactctacttagccaatcatttgcctctaaaatacataagatgctctttgtgaaccaatatatcttcaaatatataaatgtagataatttgtcttggattattagccaaaagtctccaaatatgtaactcgaaatcactatcttgtgtcattaaattgactggatctctgaacagtttattgtctcttaatctccaatccatactattgagtgactgaaaaaagatattgtttgcatgagcaggtcaggaataagtttggccatcaagtagaagcttt

SEQ ID NO: 10773 - DNA, 14046 bp, Vitis vinifera
  Intron number 1 from transcript GSVIVT01021308001 (locus G SVIVG01021308001) derived from phytozome v7.0 (chr-ID chr1 0; pos 3794969 to 3809014 reverse strand)
gaaattaaggccgaggtcttgaaagtaggtacatgaacatgctgttatgaatgaaatacaagaaccaatgccctgatgacagaattggttttttatgccaggtaatagaatttgccatgatttgaagctcatgaaactattaagcgacccttgcccatctaagtcatcaacagaagtaatatgatctttgatcatcatatagaaaacagatgattgatattcttatatttgttgtacacgagatccagggaactctacctgtaatatcttgctctgttgtgttgttaattgcctgtctgcttccctgagcaaatccaaaaagagaagataaatatagggatcgagagaacatctctttgggcgaatggtaggaatggtagcatggcctgtactcttctggttttgccatgtttcctgtgtccaaatatttctaatttgttctcttcctagattagcatatgctacggtccaagatggcagaaaaatgatttgtaagtcaccataagaaggcacaaacagttttagaatttctttttctcactaactgagcaacaggctaaatttatcttgtttttgccctcctcaaggcacatgttcatggagttatgtttggtcagaacagagaaatttaaggagaaaatggctgagagatcatctatcattaagagaaacagaaacaatttacaaattcacactagtctactttatctctttcgatcgatctttttatcaaacccctctctataacaatccgaagaagcaattaggagtcgtcattcgtcaatcgtcatcgtaattctcagctccctcttcagtgatggtctccagtccaggagaatgagaagtcttacgtgggcaaatgatgggggcgggagcaacttcaatccacgaatccaaatttctacgctccttggccattgtagatattggtctgaattatgaatggaggaagtgaaactgggagtcgggacaagcaagctgatgggctgcaggcctcaaacctcagaggaaggtgatggttctctgtcttgagtcttaaccttacggttcaacgaacgaaaagaggggtggtggacagagggattggtctcgtgctgtttctcaaagggcttgtgagaatgagagatgggttaacagagatgaacacggaggagtacttatataggagactggagatgaagcaagcataccagaaatatgaaagaagaaacagactggttatgaatcagtgcaaattaatggtatcaagcaagtccacgttgtcaattccaaaccaatccaactgaattccttcaaaataccagctttccaccctggaattacgcgttttttttttcttttttaagccaaaacatacttgtagacttgtagttgcaatagtagagttatttcttaatattgctgcagtgcaatcctcggttgtcggaaagtattaaaagaagagttttttttgttttatcttatgtggaaaattttgaggggaaaaaaaatcccttatttaaatacttttttgttttctattttaaaaaatagaacataataataacctccaacataaaatataaaaactcaccccaaaacttataaaataaaataatgatttttaatatagtaatgtactatttaaaataattgaagtatcaattttttttttcacttcaaatttaaaaatttttaaaagtgatttttaagaatataattgttcttttttagattttttatgtatgcgaattatattattttttatttttaaaaacaaaaaatagggagcatattaaaatcaactctaaggagttgattttcctttgtttgttgtgaaggtttggcttttgggcagaaaatgaagggaaagtaaaatcaagataaaaattaacctacaatatcgatactttatacaaacataataaagatactttatacaaacataaaaaaaatattgggaaaattgtatatcatcgttattatcactattattgttattgttatttcactttaatttacaattgaaatgggcattttagaaaatgaagtgtacgtaacaaatatttattcttcacctataattactaaataaaatttatcatattcattatctatttatgaagtgcaaatgcttttgaaaattatgtattaataaaaaattctaaaatccaaaccataaaagattctaaattacatagcaacatacaatctatcatatgttaaaaagatattaaataaaatctttatattcaatcatcattcataagttttgatattaaaaatttaagtatagcaactaaaataaaactagagataaaaataatcttcaccacaagctagacataagaaaaatatgttcaaatttaacttacaaccaagttaagtttgcatcaatcaattaggcaagtaagaaaagctcaagttgcactcatattatcaataagagtttgatacatttttatatgggatacatcattcatgccttcaatgttaacaaccttgtcaaacaatcgttcttttatataattttgaaaattgcttctattaatagcagctacaactacatcgattttaattataattgatcttaattctttacttacaatgttgacatatttttcttttagccttttcatttctttacttgattttgctatttaaaatgaatatgtctacaaataagaaaatgttttagttgttactttctcctcaacaagagtaaatgttttaaatttaatcttgtattgtgatgatactaaatgaatcatgtcatcaacatccaaattttcttcctaagtgcaacaaaattgtctttcttttgcacccacaataagacttcctattattgggtcttttacaagatgaacaaattgtaataattcctaatgaacttttatctatgttgagatgctttcaaacgtgcttaggcaattttaacattacaaaaatacaaatattaacaaaacttaagttgtatttgaagaaaatttaaacaacataggatcacatgttgacatttaagcatgcattgaacggcaaaaacggaaacgttcaccttggttaattccgtgaaaggccatttcttgctcttttctggtatttaggaagctcctccagtgcttgatgatgcgagaattacgggttaatgagctcttcccttctacacccagatttaatccaaaacgagagtgcgtgctctctttcaaccaaaagaggaaggagcagggagccagccagcgagaaaagcctgccgcatcttttatatatatatatatatatatatatatatatatatatatatatatcatacacattatttggaccaccacttgacttaatggaccagtaaagtgaattagggtgaacccataaaaaatcaagcaacaatatgtgtccagtcccattatggaccacaatgcaaaaataaataacactgatttatgacattattaaattgattatgtaagtccacacataaaaattccaacagtattgtggtaatgtctattagaaatctttggcttaatatgatatatagttttttttattttcaacaacttaaaaatcaacaacaatgaaaaataataataattattaacttaccttgatgtaagtagtttagcttcgatcatttgggttgattgattgaaatcaaatccattattactttgtaaaacttcttgaacaacacaaaaatttttattttttagttttctagatttttattttgttttattttattttttatgtgattagagttagaactcacgttaaatttcaatttttttgagctactattacataggtcgtctttgtaaaaattcctcctatctttttccatttatcattagcttcatcaaccaatcatccaaaaagtaatcaatttcatcaattcaagtcatttttttttccatttacaagttagtgtaattcaaagcattcattatatctcatctcaaaataataaacaaaaataaaaaatctgaaaataataaacagaaataaaatatgtttaaagtgcaatgtcaaaacaggagcattaacaagtttaattaggcaaactaaaccactagataatgttggcattgtccaattaatcaagcattcagttgattttcatatggtacgtaagctttatgcggtaattataaaattagaaaacaatcttcttgtttgagtagcgcatgattccaataagtttaagcagtgggatatctaataaattgcagtatgaaatgaagtccttttcagaacttgtatctgccattaaatctaccaactagattgagactgtggaaaaccaagcataattatatatcatgctgaatggaatacttattcgctcaggttgcagctgagcttctcaccttacatgcccatcgcaggtttcatttttacctgtcatttttagagacggagtaacattgttgcatatctaacaattctgctgttatgtaatatatcatgtccaggattttcggttttaattttctagcggttcagacagtggtaaatcggcctctaccagcggtttttagattaactcaaaaacctaataggaattcgcttctacaatccgaaggtatgtaaaaacagtttttgattttgttagaaatactgaacaattgtattgtatttcataggagaaagaatatacatcagtgcctttatataggaggcatatgtgtgcggtacaagtaacctaactgggcctaaagcccataacataatatacccatataatatacccataatatacattaatagcccccctcaaactcaaggtggatgtgagaccaacttgaggttgtcaattaaatcacgagtgcgtcttgtaggaagtgacttggtgaagatatctgcaagctgatctttggaggagacgaagaaaagcttaagagcaccatggacaagatgataacgaataaaatgacaatcaatctcgatgtgtttagtccgttcatgaaagacatcattgtgagcaatatgaatggcactctggttgtcacaataaaggggagtagcagaggaggtggacacacccaaatccttaagaagccatcttagccaaaggagctcagatgtggtatcagcaagggcacgatattctgcttcagtactggagcgggccgcaaaagtttgtttcttacttctccaagaaatcaaagaagaaccaagaaggaagcagtaacctgtagtggacctgcgatcagtaggatctcctgcccaatcagcatcagagaatgcacggagtacaagagaagattgagctgagtagaaaaggccatgaaaaatggtacccttcaggtatcgaagaatgcgcagaacagcagcatagtgagttgatcgtggagcagacaaatactggctcacctgatgaacagcataggagatgtctggacgagtaactgtgagataaactaagctgccaaccaatcgtctgtaaagagaaggattggacaatggtttccccccggagggtgtcagatgcgcattaagttcgactggagtgtcaacattcttactgtcagtgagtccggcttgagacagcagatcagaagcatacttggcttgagtaatataaagaccatctgtggaatgagtaatttcaagacccaggaaatagctgagatgtccaagatctttcatctcaaactgctgactgagaaaatccttgagttcttgaatgccactaaggtcattaccagttatgatcatatcatccacatatagaagaagcaaaatagtgcctttatcagtacgatgaagaaataaggcagaatcatacggactggcagtgtaacccaagagaaaaatagtggagttgaacttggcaaaccaagctcgtggggcttgtttaagaccataaagtgcacgtcgaagatgacaaaccttgtttgattcaacagagagaccaggaggaggttgcatatagactgcttcactcagatccccattaaggaagacatttttaacatccatctgaaaaaggtcccattgacgagcagcagcaacagctaagagagcacgaacagatgagatacgagcaactggagcaaaagtctcttcataatcaatcccatattcctgtgtaaagcctttggcaacaagacgagccttgtagcgctcaacggatccatcagagcgagtcttgatcttatagatccacttacaaccaactacagactgtccaggagggagaggaaccaggtcccaagtatggtttttggttaatgcatcaagttcctctttcatagcaagctgccataaagggtcagtagaggcctcacgataggcttgaggctcgtgaagtgtagcaagggcagtgtaacaatgatagtcaagtaggtgtggaggaatggatcttacccgggttgagtgacgaggtggaatgtcttgtggaggatcttcaggcagagtaggagcaggggacccagtctcaaagtagggtagctcgtcatcaatctgttcatctacaacctgtctaggagaagcatcaaaaatatctggagagaagtccaaaggaggatcaaaagtatttgtagaaggaacaagagactcatctggaaagatttctaaaacagaggagttagtcaaggaagaacgaaagtgagagagttcaacaaacaatcgatgttcccaaaagacaacattacgagaaacacgaagacgatgagagacaggatcataacacctataccccttttgagtttcaccataaccaaggaaacaacagagtctagagcgaggctcaagtttgttgtgctcatgagactgaagaagaacaaaacaagcagatccaaatgagcgaaggtgatgatagacagggggtgacccaaagagacgctcatacggagtctgattatggatgacagcacttggaatacggttaattgcatgaacaacatgaagagccgcttcaccccaaaatggggcaggaattttggcagaaagaagtagagcacgaacagtgtcaagaatatgacgaagttttctttcggctcgaccattttgccgagaggtacctggacaagttagatgatgtacagtgccataggaatgtaacagagcttgaaacgcatgttgagtatattcaagagcattatcagatcgaaaagttttgatacgtttggagaattgtgtttcaatcatttttgcaaaatttctatatattgataaaatttcggaacgagatttcatagggaaaatccaactataacgagaataatcatcaataaaaacaacaaagtatcgagatccaccaatactagcaacaggagaaggtccccaaacatcagaatgaattaactcaaaaatactattagaaatggattcactgttattaaaaggcaaagctggctgttttcctaactgacaagaagtacaataaaaaatgtctttagacacagaacccaatagacccctagacactaactgttgtacccgagaagatgatgcatgaccaagacgagaatgccaaagcgcaagagaaggtaaggaagaaactgcagcagctgcagtagcaatagaaacaggagcaacaggtggaagatgaagattgctcacgggaaacatacgcccaactctaggaccggtcccaagctcctgccccgtcctcggatcctgcacaatacacccagaatagtaaaaaataaggcgataacctagttcagctaattgtcccacagagcacaagttgtaggataggttaggaacatggaagacttcaggaacagaaagattagaggttgaaacaaaacatagactattcccatgcatggtggaaccatcagctatatgaatatttagaggatgtggtgcagggtcaagtttggagaatagggatgagtgaggtgtcatgtgattgcagcaggcagaatcaaaaagccaagtttgagacttaccaagtagaacagataaggcagtggaaagagatgcattaccagccatacgaacaacctgagctatgatctcctgtagttcagtggaggagaggttgatagtagatccagaagacttggactcaactgaggtggaagccattggcggagtaggctcaatattagcaacaacagcagtagatttgttacgacggtaacaagtctcaatggtgtggccaggacgcttgcaatagttgcagaactttttgttggtctgcttgcgacgattgctagagccataagaatcacctgattgctggggttgctctatgagtggagtagatggagtaatagccaaaacattgaacttattctgggcttgaagggttgcaagacgagcttcttctctaaccaactcatttacagcagtatcaagagagggagcaggactgcgattgagtagctgaccacgaatgggctcaaagtccttgtgaagtgacatcaagaattcatagaggcgaaattcatctctaatggaagcatattgctgagcatcttttgagcatgtccaagttggatcagaaaggtcaatttggtcccaaataaagcgaagctaatcataatagtcattgatggattgccctggttcttgcctgagttgatgtaattcaaccactaactgatatttcagggatccatgagtagtggagtaccttttggccaacatatcccatgcagattttgcatcatcaaagctgcccatcatagagggaatggaagtgttccgaatccatgtgaggatcatgtgattatgactatcccattcaatcatgcgattaagaaaaacaacatctccttcacttgctcccttgacaggaatagtcattacaccagtacaataatgtcagagcatgcgacccttaagaaaactgcgcatagcttgagaccaagataagtaatttttatttccctccaatacagtattgatggggtgagaaagaaaaatatcatttttatccatttagagacacaatatgcaaaaacaaactgcaaaagtgaaatctacgcgaaaaattgggtaaggagaacctggtcaaccctggaaaagtcaacggacaaagtcaacactggtcaaagtcaacggccaatgctggtcaaagtcaacggtcaacgtgggtcaacggtcaacgctggttgacggatgacgtggagatgatgtcagctagggctaacgtggcactgacgcgtcagcagtggtgacgtagctagggctgacgtggcgctgacgtggcagagagaatgacgtacgggctccgatggcgacgaggtttccacgaatgtgtagatcggcgctggacgatctcagtggtactgtcaaaattgaaatcggagcaatatttgcagcggtgatgcgaaaaacagtgatcttgtgtggtgtgaaactccttaaggactgcaggttcggaacccaaggacgacgcctggatgacgtcggaggttcaacggcaaaaggttgcggcggcagttgtgattggcggaagcgttaaaaagaaaggaagtcacactaatgaagacagactgctaagaaagggtaagagcagtggctctgataccatgttagaaatactaaacaattgtattgtatttcataggagaaagaatatacatcagtgcctttatataggaggcatatgtgtgcggtacaagtaacctaactgggcctaaagcccataacataatatacccatataatatactcataatatacattaacagattttattggcagggtgatcggttttccatgaatcaacagtagcaaaattaccagatcatagtgtcgcagatcaccgacattctacggaatgcgacagccgccatgaatttcctaagcaagtgcctatttacagttggaatgggcaccgacgatcatgttaacgactattaccttccattgttgtacccgaccaacagacaacatacccctgatcagtactgattgatcaatattctcagcaatggaaggttatgctccagttctctctctctctctatccaaaaccattgcatgaattattttgtgcaataattatggttgttcgtagttgaatacatacaagacgaattattttgaaaaattattactataatgaactgtattcatgattatttaaaataatttacctttcatacgtgggtaaattattttaattgaaataaatatttattgtttaagtaacttttgtttcatttaaagccactatgattcaaaccagtatatattattttagaccttgattaattaatttgaaggatatgccccaaaattaattagagggtacatgaagtcaaacaaattaaaagaacaaaaataagctgaatatccactcaattgaataatagaaaaggacacaattagtgcattaaaattgattgaaaaataagatattacaatctagaacaaaatatcccgatgagaaagactatgagactaatgcaaccaaaactgattgaggagtcagacatcttaatcccaaaaaaaaattttaatgaatgctgaagagtacaccttttatctcaatctcacctgataaaaaatttggaaggtgttaagataaacaatcttattatatacttttgcttaacttgaagacaactacaatctaagaatcaagagaaagtatgaattcaaagctgcaccaactcaaaaaaatcctacataaatagtaggaacacatacgaatgattaaaataaaaataaaaatcataaaattaagcttaattcaccgatctaatttctaacccacttttaccatttaatttttcaaaataagataatttttttttttaatattaacattctttttaatccaaacccaacattattccaaatatatccatttcgaaaaccaaatccgagtttgcttccaatcaaaatccgtttggtcttggactacaaaatcagtctagaagaatttcagatctaaatttcaatgaattaatctctaaaaatatctagtctagggttcatagctaaattaaagaataaaaaatttaactcataatgtattacacgtaattaaacataaataaatgactaaaaaacatcaagttgaacaaattaaaccaaattataaggctaaagtttaagtcttcaagccaaaattgcagaaatcaagggtttcaatggcaagtattcccaagaaatctaaccgtaagaaatttccatttaaaaaaacttaaaacaattgatcttaccaacacaaacccaagatattactcagttctcattattctaattaaggaactgaattacaaagagagagttttcttacctccaaagctggactttcagtactcttttttcccaatcttttgcattttctcgcatgtcgaacacttttcttctcttgcctcacaatctctctcataaaagagcaaaaatgagattagcttaatcaataaattttcttatgaaaaatccaacttatttaattttacccaataatccctctaaattttctaaaaagtccctcatattattagttaaagtaattataccatttaattttactcatcctcagttgaaattaaaatatactatttttagacctttaatttcaataattacaatcatagttagtgattttttttttcttattaatgatacatgcatgcataacttatttcgaagcaattatagttgtaaacttgaaattaattgatattattttattgtaaagcattaagtatttcaaaaaattaaaaccataatagtttaaaataatacgtgaaagaattattatgaacaatagtgtttatagttgaaaacaagaaaaatgaattattttgaataattaggtgagactttattccaattaatgtcaaatgcattaaaaaattagttcgatcaattatgagtatatttgaaatttaactacaatcataattgttaaaaataatttattttgcatatcaataatacaagagtgaattattttggatagatcccttatacattaatgggattttgataaagttgaaaaaaaaataaaaatacaagaatgaattattttggatagatcccctatgcattaatgagattttgataaattttttatttttatttttggtgaaaagaaattgtgaaacaaactacttgcaaattcgattgaaggataaatcgtaacaattttcaagacctaactttgtaacattgttaggaaaatttgatctctgaataattgattctatttgaatttggataaagttgaaaaaaaaaaaaaaatacaataatgaattattttggatagatcccctatgcattaatgagattttgataattttatttttatttttattttttgatgaaaataaattatgaaacaaactacttacaaaatttgattgaacgatacaccgcaataattttcaagacctaactttgtaacattgttaggaaagtttgacctctaaatgatcgattctattttaatttggataaagttaaaaaaaatacaataatgaattattttggacagatcctttatatattaatcagattttgataaagttgaaaatgtaggtcttggattgggactttgatcattttatttgaaaacatctagtgaaggtaagtcaggttttatccttgggcttaataatcgtatattgcatttcaacaatcccttcttcaacataacactttgtggttggaatccatgatcttggttcttatattagttatattgcatttcaacaatcccttcttcaacataacactttgtggttggaatccatgatcttggttcttatattagttattgtatcgggttttgaccatctcatctaaaaataaattgagggatggtaaagatagactaaacatttttataacatttaaccaccataatttgaataacccattactgagcttaaaagtgatattattagaccctcataataggtttaattctatatattaagatacatattagtattaataattatttgtgttataaataatatttctctatttttagttattttccataataattcttagtcaattaaactaagtactaaaaaaaaaagccttcacttagattaatctatctcacttaatgaacttttatttatttaatcataaaaactaaagtaaaaggtatgcctttaaattcaattctctaggcttgaataaaacttttcatgctactggaaatcctatattttaagaaaagaaaaacattggaaagaggaaaaataaataaataacaaaaggtaatacaactcatgagctatttacttgtttaaaaaaaaaaaaaactctccttgtcccctttttattatttgactatgggtgtttttctcttttaaataaaaaattgtgatttttttataattatttttatatatttctccctcttttagtgtcccagatggagcaaatcgctacctccactcgataattattgatgtagatgaaatcatacaaatcatttcaaaaaattgttatcgggaatataatttaatgatagttataacttataattactcgaaataattcattttgtatatacaaaatgaatggttttgaacaattattgctatagttaaaattaactacattattgttcaaaataattcattttcggatcttattatgcacatcaatgatacatgcatgaattattttatacaattatagttctagttgtaattattatatagacctaatttactttcaagtaccttgataaatattctctaaaataatttattttaacaatatatgcatgaattattttgaataataatgatcctagttaaaattagtatattattgtcttggatgttttgttccatgtgcagctatgattgtccaaaaataactaattttgtaactatatacgcataaattattcaaactagttgtacaatttcaattattgaaagaaagatttacaattccaaccctccattaattttatagaaaatcttttgcatgatgccataatttctgtggatatttacaaagaattaaccacaaatctaattacgtgtttaagggtgtggattctgtggaatcatttttcttttgtccgcaattaaggtgctatatcaaattatcaaatggtaggtctaaatagtgtctaatcctctcagcctcacctttatctttcct

SEQ ID NO: 10774 - DNA, 2448 bp, Vitis vinifera
  Intron number 2 from transcript GSVIVT01028023001 (locus G SVIVG01028023001) derived from phytozome v7.0 (chr-ID chr7 ; pos 3248349 to 3250796)
ctggaggtttgttttcacttttccctgctgtgaaattgttgaaactaaggtgctgattttatgcagatgtttgttatgttttttcttttgtgtttctcctgagactttaattcctgcacatacttaccttgtctcataatcatgttttgcttctaaatgcctttacctttttattcttgtttcatttttatgttttcttctcttttatcatgattttttttctcaagttatttagttctcataattatagaagctatgctaccagtacccattgttaaatactttactgttttctttatcttttcattttattttggtaggcaagtgatttcaaaatgccggttgctttcattggtgaagagttttcaccctggtctgttggttttcctcaataaatgttgccaattgggaaacaaaatatcatataaggtcacccattttgatatttagtactataaaacattcactaggcttctccattttagtatttgatatcataaaatgttcaccaacttcctatagttcatctatccatttgttttttgctttttgataagctaacttcctgtggtatattggtttgtaaatgaagattctcttctgcattctatcacttctttttcactaacaaaactaccatcccaagaagtaaggttggatttagcatgattcttcaggtagtatttacagctatatatttcaatgatcctttgaaaggaatggtaggtgaggggtacaggcttgtggtaggagagtaaacaatcataacttgaagaaatagttaagtacaaaggttgaggtttttattagagagggaaattatcagtatctcacaaaaaatctctctacaaggagatggtgagatggggaccagacaattctcttgcctaagagatttggggtcctgtgtttcctattaaggtgacataattttgcaggggcagctgctggggcagaattttaaccgttgaccaagaagacagtaaatcattcaaaactactgttgcatgtgtagtttggatgggtaaaccctggatcattggttactttattgcatgatggctgatgtcttgggtccaattcttttctatattaagggttcactgggttagctgggaaacaagcaaatgttagtggcttggcaaggctagttcgttgggagagggaggagattctagatgtgaacctcatgggtatttcttttgtaggaggaggggagtatgggtggggggttggttggcatggaaagagaagtcccctttttctgcagttcttggcattgattgaggagtgttgaagctatattttagattttaataaagacatggaaaggattctgctgtaggacaacctcagggtggctctcttcaattaaatgaggtaggctaaagcttcactcttttatgaaaaatttaggatttcaggaaacatgaaccagggttatggcagcaggaaaaataaaataaaagtgagaaaaataaagagatgagaaattacaacttatgcataaagatatgtattattcatcatgaatctcattttgcagcagttaccatgaaaaaagaaacttgacctatataaaaacttattaggactcttaatgctttcctaaaactctttaatcttccaaataatgaaattgaaaagaaaatagaaactttgttttcagaataaaaaacttaaaccttaataaaaacttcttgtaataagcgtttatagtaaaaatgactttctagattctaaaaatgattcaaatagaaactttagaaaaataggattttagaaaatggaaagtttagaaatattctgcttcttttaaggagaaattttaaataaaaaaattctcaaattcttaatgagactcaaataaccaactatgtactaattacgaccctaaagaacctaaatcagaaaaaaatttccttttcttcctttcatgactggaggactcatttccatcaagtttgaattgtagttcattgtttggagctgtgtcttttgtttttgttccacttttggatgtttctttctgtttttacttccattttccctttgggggtttcttgtatacactgtgtgtactaccactgccctgtctgctcgttcagtaatgttattgttatttttgcttgtttgaaaagctctccatttgtttgtgaaaatgtagtgcaatcctcacttttaatgcattaagacctgatagccaattcctcttttgaatctaggtgttaatggaatgcattaattcttgcatttagatgttaataatacatcatttaaccttgtgatttgtttgtctcctagtctagatacatcagcaagttacgcatgtgtgatctctaccaattggtgcactttctcatacatcttgtttacatatttctgaaattctgtattatcatctaacctataggtttgggtcctggaacacttgtcggttctgctgca

SEQ ID NO: 10775 - DNA, 2199 bp, Vitis vinifera
  Intron number 7 from transcript GSVIVT01024544001 (locus G SVIVG01024544001) derived from phytozome v7.0 (chr-ID chr6 ; pos 8989966 to 8992164 reverse strand)
tttctcggccagataaaattagtgctgctgaggttagcttattctgtatcttatctttacagttttcttgttgtctgagtcctcaatttcaaatgtagtactagaacttatgttcactgggggaaattttgtcgcattaattgattcttttgcatttttagctatttgctacttgatttataagggttaagattttaagcattattgtgaaaacactgtgagtaaccaaataaatcttgagcaaaagatttagtcctattgaggtttctctttgaaagaatcttgcaaaatttcctttgctcaccctaaccatcatgagagaaatgttgctgtcctataaccccaatttctttgtaacaataccttgtcttttgtgaaactttttttttttttttaaataaaatttaattacattaaaaataaatatatttttataaataattaaaatattgtaatttttataacttattttattgaaaggtaatttttttattttatatatattaaaaatggtaaaataaaatatttaacttaaattatttttaaaaattaattttatatataattgggttggggtgggatgggttgggttaaggtaatatccgaacccgccttgggtttccaaaaaagaaaaaaaaggaagaaaaaccaaattcgcacctaacccgtatattttaattccaaacctgtctccattagtggggtacccgagaaaaccccattgtcatctctaaatgagagattatttaggtgaagtggttactcctatgtgcacttcgtttataacagaattggtgactataacatatattactgggaatcttttgctttattttccctgaaatgataaataacaacataatggctcaaaagtggctggttgttttcaaattgctgttaatctgaattcctggtttgtagtatctgtgaaactgatttgtgccagtaccatattggtttcagtgggttctgagcaagcataaaataggttaaagtctcatgaaatatctttgacttgctcagtatttattgggccttgatgagttgtagactattgggtgacacatttgtgggacatctctctctctctagtgctaaaatctgcattatattttcagtcctttcacatatgatggtacagttttcaataatttctggttgcaatggaattagcatttgtttgacattcaattacatgtacttacagcctgcaaaacttatttaaataacatttagaactcacattttttcctgcacacattgccactcagaacccaaccccaaaagaggaaagaggcaaggagattatggaattcttttggtagcactagatattggtcaatacccaattttatgttaccatatttagtagtttgtgaaactgataataatctcacgatatctcatttagccctttttttggtagacagtaacattgtgtactcccctgaaagagcttccttatactaattatagatataattttttttttttttagggaaatggatttttaaaataaagttctcttctattctttttattaaaaatttgggtaaaagttaattttgtacgtttatctatgtattaggtttgcctaaattaaattgattggtgagtatttttcaatatacctagccctatctctgaggaattatctgacttagatttagttatttactttgaaacaaattgagtctaaatctgaaatggattccaaggcttattcctgtgattgggtctgtaatgggggaatatctcattccattatattactgtttttatttgttataatattaatgtgtcgaaattattggatgtgaaatttttttgggttttggtgtttaaacttcttgatgcatactaccattcatggcatgtggtataggatttaggaccatgttggttttcactctggagtgttgttatacgaactcctgcaacatggttatttagatgaagtttaatatacttattatgggtaagatagtttgtcacaccactatatttctttgctcttccatcaaatattatcatgttgggctccagtgcaataccttttctgttattgtgaaaaccagcggagaaactctgataggttcccaaggtttttcattatttcaaataaacgaatttctcatgtgagtgtttttaacacaatctgtacgtatgcagattgctgctatttgtcaagaagctggg

SEQ ID NO: 10776 - DNA, 3166 bp, Vitis vinifera
  Intron number 14 from transcript GSVIVT01021728001 (locus GSVIVG01021728001) derived from phytozome v7.0 (chr-ID chr 10; pos 10171851 to 10175016 reverse strand)
gagaacaaggtagtttatgattaacttaaatttatcttgtttctgtttgaactatttgttttaatcttagatatttgctgtgaaatgtgggcatttatattagagatgagttttggaaatcaaatgatattatcttaaattgaatatataaacatatcttcacataaatgtatcactatgtttgttcttatatttgtgtttggtagcctttttagataatgtattttctcttcatgggatttatatagaatcagcaagtatacctgttaaacaagctgctcaacctattggcatttggaagagatgcagtcgtcataggattatagatgcagaggttcttgcttaatcttagcaaacaaaggttgtatccttttagacactagcaacttctgtgtcaaaggtgattcggtgattcctctctctttggtttcctagagtaatggaagtcaatgattgacttttccaaaggagtgggattcttttgtttggaagttgaagtttgcataccaagtagtggatgataagactagaaagagatgcttctttgtctgaggagtttgtcagggtttcttcaccctcaagtttaatgcttctgcatgggatgtcttttttcacttggtttagtttttattattatttttttattttattgtttctgtatttatgtttttttttttaattttaattttattttccttgactttatccttagttcatttttccttcctttttttttccccctgaataaattgtttcagttacatgttttaaaaatggattcttgttctccttgaatagtctttcttgtgctccctcatccttatcaatgacatgttgagagaacatgcgcgttcaagcatgtttgaagaatgttcaatgtactctttacttatttttaaggtctttgttatggttatgtctaggattgagagtgttcaacattgacttcccgcactccagatttgggggtagggaacagagatcacttgattggttggaattaggtcacaaactaaagtgtgaaggagctatgtggttttggatggtgctatgacactgaggaatataactcttatatgtaagtgattatggagattctctaagatgagtgaatcattgtggcacaaggttatccaaatcataaatggtctacaaccccataaatgagacaaaattgttttgattaggtggttgaatggatgtccttgtaaagttcttccctagagttatcatgatttctcttattttagttacttttcagttggggatggttcaaaatttgtttatgggaagatctatgatgggggatcagtctctttttatccaatatcctagcatatatattgtttccagtggtagagactagagatttcttatttccttgtttcatgacccctctattacaactctgttctggaaatcagaacctgaaatcgacaacatctctttgcttctgatatctatgtttcctgtttatttgtcatgctgtttccttaatttatttttgataggtaaaacaaggagtatttattaaagggaaatgcctaaacaatgtcctaaagtatattggaagtatacattggctgccaaaaggcttagtcaagtgggggagggagaaaacaaaaaaatcacctgccctcatttagaacttagccaatcaatgaagctaataagagaattagggtttatatctacaaacaccctagtccaagaccataaattaccaacaaaagagttttcatcctttggaccgataactcggcattatcaaaagcaagcatgttcctttctttccaaatggtccaaaagatgcataagggggcagcctcccaaggctttttgtgacctttacccaaaaaagacccatgccaccgaaggagcatctccttaactgaagaggggagagcccaagacaccccaaagagagtaaacaacagttgccaaagattccttgtctttgtacaatggagaagaatgtgatcaacggtttcttattcagagtggcaaagaaagcatctatttgtctaagaaaaccccctcctctggacaagattcaaagttaaggcttccccccaagtcgcctcccaagcaaaaaaagccaccttgggtggcacacaagagctccaaatgatgcttgtgcagtctggggactttggaccattggcggattttgttggaaaggatttgtcaaaagcttagtagattagtggagatcttcaacgtatttgtggaagccatccactacctcaggtccttctggttttctgcttctaaggaatttctgggtgcttccttggttatgatggattgggaaagacttatagctatatcaggggagtgatgggtacctgcatagagtggtaagcccttcctcttgattgccctaatttggtagcgttccttggtaaccaggggcattgggggattgttggtgtatttagaaaccattgtgacactgtggtgtgaggtgttcttcaagctagtggctctcatgttagccaaaaggtagagatcgtaaccttgtgattgaatgaggtgaggtcattaagagttaacattcttaacgctcttgtagtggaaggagtctcaacaatttttagattgtccaaccaagttgtggagtagttgggcaagtgacaagcaattgatgctaggggcctttctcgaggattgcttaacttctagagataatttacttgttgatcttgttgtgagcctgtgaccttgctatatatttgttgttttcctgttctcctgtacgctcctaatgacttttgggtcctcataattctagtaccaaatatcttttttttttttcattgattttataaattattttctgtctattatagcatggaagaagtatacattaacactcaattaaagtatccagttaatcaatgccaaacaatagggcttttagaatattcttaatgagtctgcataggtatccagttgatcaatgccactgtgtagaactgatctgacttttccttcctaattgttagttggattaatatagtagttattcatggacggttctgacatgcatgaactatttgatgaattgattgagatatctttcaacacagtgtcgttcatgcatgcaactttctaccaacattcatgcttattcctgtccaatttggtttttaggttcgggagc

SEQ ID NO: 10777 - DNA, 15464 bp, Vitis vinifera
  Intron number 2 from transcript GSVIVT01022344001 (locus G SVIVG01022344001) derived from phytozome v7.0 (chr-ID chr7 ; pos 18752172 to 18767635)
gcttacaaaattctccaggtatgtgttgcattttgtgttgtaagagtgtttttccttttgcttaaaagttggtggttacttctgctttcccccccccacgtttttttccgttttaatttggtagtaaactctgagcaattcttgagttcttccccatgataaaatatttccattggagactagagtatggtttaattaggttgggtttcaaatggagtggaaacttgcttgatgtatgggatatgtgatcaaatttgatattcaatgggatgactgatgagagaggcttacctttctgttacattagtttgaatcagaggcctctcacatgacttcacaacactcagaccagctgagctactacttgatggtttgatccaaaccgtccttcttaaagttgcattcacaaaaacactgtcatgtttatcttatgttgatggatttgatgtatcctttccatggaagcttataggacatttttcaaatcttttttgctaagatattattgattgaatattttgcttcaactccaaaaaccttattaaacaattatctcacatgactatattttgtgcttagggtgggggatctaaaaaccatttttgcctctgttgtcctcttgctctagagttattgtaaagacttttctcaacagtagggatagcttaggtagctcttatatgtgatttgttgtgacagtcatatctttgtgaggttttggtaagagccccaaaggcagggccttgttgtgtgggtgggttcaggagggcctcgttgtgttgatggtgggggttggggggaggactttgctttattggtggggtgggggagggccttgtgtctgtttggttagaaaataacatggggatctttgaggataggaaaagataccctgaaggcaaggccttgttgctcaactggggttggagtagtcttgtggattgtttgactagaaatgatattaagttcattaaggataggaaggaatcaataactgaattgtggaagtatatatactctctcataactctttggttgctagttatcgaggagttctccagaattttcttttttctttaacgtaatttacaagattggagtttggtctgcctcatagtttaggcaaggggtgctcgaaatggttgtgttttgaagcgtaatttcaatgatgttccttgggcaatttggaatagatatgtattaattggactcattcaaagataatagtgttgggtttctttgatctttaaagagatccctgatgtgggctagcagttgaggtgggaatagtttctaacttgagggtctcaataaaagagttgaatgctactgatttactagtggaagaggattcaatggagtttctcttgggtaactaatggttatagagggtcttgagatataaccgttggatgtgtgggattgtggaccttgtagaagattgggttgctctttcttatgggaacctatattagctaatcaggaagttgccaggctaaccaagccaacagaggaatcctttgtcttatcattttgtttcatatgccttaagttttggtgctttgttttcttagggatgggaaatcaagggtttcttattgtggggacaatgtttttctcttttatatactaatgcatattttccctttttaaaggatatcgcatccttcctttgtatgcacaacatgatatgaagcaggttctaattaaaaaggttattgatctaaactatttttattttatatttcatttttggttgcatgagaacttcaccacaaatgattgaccaaggcttgctcaaacaacctcatattattcaaacaaacttggctataggatagtgatcgattgatttttcgtcatttcttgtatcaaaacaaaatttataacctaatttaactatgctaaggtaactcctacccgatcgaaaagggtttttagcaaaagttaccataatatagcagttttaggtgttgtccactaggatgatgaatgtgtttagcaatcaagaaagaaagtggggtgaattgagatgataacgatgatgaaaaaatgagatagtgaaaaattatagatgaaaagttgaaaacaatcaaactttgagaaagaaattaatagaaaaagaaaatcttgtagttagaattttctagaaaacaaacaatatggtaaataggagttgagatctatttttcatcaagttagattgaaaatctaaattctcatatggaccaatttttatttagatttaagtctagatttaatttctcttcaaattaggtgatttaatccaaaagatcaatttaaattatatattcaattcatcttaaatcatcttccaatgattcacataatgcaactattcaatctcattaaatctagatttaagaatttaatgaatctacctagcttgcatcgtagtagtcattcaagataatttaaagagaaaaatctctaaaattcaattaatcaatcaattggatcaaattacctttgcacttaaaacttatttctctaattcaccatagatcttgcctttagatcttccttcgtccaagaaaaacgagatttagccactcatgcttagagatttggtcttacaagacctgtttggctactgagaaaatgagggaaaatgaaagaaaataaagaattgtgttgagagaaagagtttctagaaaattccaaaattcaaagtgttaaaaaggttgtttaaataagagtgtccaagtcctatttataagaagattacataattggatacttggcatcatctaagaagtctttcagaatcttctaaattcaaagaaacctagaaatttaacattttgcatgaaatttgaacattttgcacaattgcaacactttcacatgagatattcccatttcgcatggtcatgcgaaattctaaggtgagtcgtagtagcatgtttgaaacactttttggaccatttcgcatggctatgcgaaatcaattcaaacatcctccttagcctacaacatagtttttctcctctagtccaattcgtacagtcatgtgaaatttttgcatgatcatgcgaatttgcaatatatggtttttgagctcctctatcatttctttcattttcttcttttgactccaagttagctacctccaatcagcccaaatgctgatctaaactaattgcattgcttcttcttcatcatccacattattcaccctcttcaattcgattcacctcttttgtcactcaatgcatcaaaatcacatcttgaaatgactccaaacctcacaaaaatcgttagtaactcttgtaagggcaacaacgtattaattgggcattttaggcataattactacttaaaagatgtgaaatgcatgacaattgttgtctataatatgctctttttgaattgtaattagttagtgattgatagaagtatccatgataaggttgcatttacagaatattagtgtgtttatctcaaacactgaagataggccaggaggtttggattaaagcctatgtttaaagggtatatctcagtaattttgttgcctattcactaatgcgaagttaaatcctagtgcctaccttttaaaatttaatctagctcgaagatggatcctattagctccctgattataaccatagtcaaatgcaaccatatttttgtgtagtttttcaaggaattgttacattgtggtgaacttttattctttatgggtcaatatgatcttatttttgtttaaatcaaaatgtttcttgttcatctaaaacatcttttgcctattttttaggaggaagtttaagttatgcttaacaatattattgcttgtgtttttctgttattagttcccgaatgctgttagttcctttgcatacatggctttggggctttaagttgtttggtacctgtgttagtagttgacatttttatggaaaatttgagaagaaaatctcattcattcttgaatacaatacacatccgattatttacaaaaggataagccataagagtgttatagaaaattgaaactaccttaaatcaaatccctaaaaattagtagactaaatctctgtaaatcaaggattaaatccctatgaatcagggattacattatgtggaagtatgaaatcagaaggtcatagttgtatagtagtgtaattgggaagtgaattaggataatactgtaatcaaagggattttgtgtaattaggttaaaaaggttactaattttggtgttaggaatatgtgtatatatatatgactctttatactgattataagagaattataaaaaggaattccatacccttttattccttcaaatatctcttttacatggtattagagctttaggctagtaaatttgggaaaaggaaaaaaaaaaaaaatttttttttcagccttcattgttgatcttagagtttcctcttgtctaagttgagccatcacaacaaatcagattatgaatgcaacaccgaagccgtcattgtcgtcacgttgtagtcatcatgcctgcaccactgacatccttgcaaactcatcacgaaacatagatcgcacccttaacttcgcaccagtgaccttagcaacaactgtcatcgtcacattatagatcagagattgcatcattgctctttgccttgcagtcgctcctcacaaaatgtctcaacttcatgccatagtcatctccaccttgcattaccatcatgtcatcttcaccctcgtaacggtcactacaggtacaaatcacgaagtcattgtaaagcagccgaagatcgatgtcgttctacattgctgatacaattggagattgggacctttacttgctgtccagaagagttataacacgactcaaacctgttatttaaaccattagcttcctttttatatctctaaaagaaaaagttttaaaaagtttgtttttatttctaaaaaagaaaaaaaaatgtctgagatatcagaaactatcgttgtcattgctcaatctgaaggagtgatcattagtcacaacataggagagttgcagaatattcaagcagcatacaggtttaatgggaaaaattatttaaaatggttgttgcttgttcatacctttctgaaaggaaaagggaaattaagtcatctcttaggaatgggaccaaggagaggagactctcgatttgatgcttgggatgagcaagactcactgattatggcatggttgtggaattcaatgacgcctgaaattagtgacacatatgttcttgacatctaggatgcagttcactaaacatactcaaaggcactagatgtagcacaagtgtacgaaattaaagtcaagatcggagcaatgaaatagggaaacaaaacaatcatggagtattacaatatgttgaaaaacctatgacaagaacttgatcactatcgatgcattgagacaaaatgtcctaaggatgtagcaatcttgaaaaattatgttaaaaaagatcgagtctatgatttcttagttggtctcaatgctgagtttgatcaagttcgagttcaaatacttagcaaaaagctttcaactttgaatgagactatctctattatccgagcggatgaaagaaggagaagtgtcatgcttgaacctcagaatatggaaggcttgactatggttgctaacaaaggtagtgatcagaaggctaacaccactaataacaaacggagtgattggttaagggcttcaaaccgtgataatagggataagttatggtgcacttactgtcagaagcctcgatatacatgggaaaaatgttggaaacttaatggtaagccaaccacatctagtaaagagtggggttacaatggagggaaatagagggataatgggcaaacaagcttgtcttttgttcagccagttgaagaaaaatcctaggaataaggtggattcaatcaagaggagattgaaaaattaagagctttgttggaaactcttgtgaaaccttcaagtacctgcttattggcgcattcaagtaagtttcttattggattaagagtcttggatgaaacctttttcaattcatgggctatagatttagttgccacatatcacatgacccattcatcacacgaatttaaaaactattattcaagtagtaggaaaataaccataacacatggatcattaaccactatcgcaagtgtatgagatgttcaaattaggcctatactcacacttagaaatgtgctcaatgtttcaaagttgtccaacaatcttatttctatacaaaagcttacacaagatttgggttcccttgtgacctttttccctacttatggtgtattttaggactagggcttggggaagatgattggacttgctaaggaatgaaacgggctgtactaccttgagacaccaagcgagtcatccatatcttttctttttgagcatcaccttttaaataacaaaaaaaatttagcttcatcattgtaagcttggacattcgtcatttagaactcttaagatcttgtttccttctctatttagtaaattagatgttgagagcttccattatgatgtatgtgaacttgccaaacacaaatgttcaaccttccccatcaataataaagaagtttagaaccttttcctctaattcatagtgatatttagggcccttcctttgtccttaatatatttggggtgcattgatttgtgtctttcatcgatgattatgttagggtcttttggattttcttacttaaacacaaatctgatgtgagttttgttcttccaaagtttcataacatgataaaaaaaatcagtttggtgtcactatcaagaggtttcagtccaatactgttagagattatttcaatcaagtcctaactttatactttcaacatgagggaataattcatgggtcattatgtgttaacactcctcaacaaaatggagttgctgagagaaaaaatggccgcctcctagatacaacacaagcttttttgttccgaaaacatgtgcctaaatcttattagggagaagttgtcctcatcgtcacatatctcataaattgattaccttccagagtcttaggtttcaatcctcatcgccacatatctcataaatcgattaccttctagagtcctaggtttcaaaagtcctatgaaaatactctcatcattctatcctaatgtgagaactacaaaccatctcattcctaagatatttgatcgtgtatccttggtgcatgttcacagtccaggggaaaattggacctaagagcaatcaagtgtatttttgtgggatattcctcaactcaaaatggctataattgttaccatccatcatccaaaattttttgtctcagtggatgttacgttcaatgaaagtgagtcttattttcctgctccttatcttcaggggaagaattctattgagaaagacaaggatcgggattcctatttcattgatccctttctcattgaccttcctaaagtctctagtccaatatttgtacccattgagcttgtctctgaacctgagtcaccatccattgagcctgctcctaagaatcgaatgattgacaaagtgtactcaaggaagaaagttgtagtccctagacttagacaagtccaagaatctaaactagcttatggaaatgaagtaaaaaattttcatcctcctttacaaatcgagacattacaaattaagtttgagttagaacttcttattgccatcaagaattgaaccagggaatgcactaaacgtcctttgtatccactttcccatgttttgtcatttaaaaaggtgtctcaatcctataagagttttcttgcaagtttgaacaatattcatatttctaccactttatctgaggctttatctgatgaaaattggaaacaagccatgaatgtagaaatggaggccttggagaagaataagacttgggagttagtatatttgcctgcaggaaatagactagtgggatgtaagtgagtttatactctttaagtataaagcaaatgggtcgttagagagatataaggtgagattggtggctaagggatatactaagacatatggtgtgaattatctaaagacctttgcctcaattgcaaagatgaacacggtaagaattttgttatcattaacaactaactataattgggatctacaacaatttggcataaaaaatgcattcttttcatggagatttggaagaagaaatttatatggaagttcctcctagatttgaaagtgacctagtcgctaaaaggtatgtaaatcaaagaaagctctatatgggctaaaatagtctccaagggcgtggtttggaaggtttgccaaagtgatgaaaaacatgggatccaaacaaagtcaaggagatcacacgttgttcatcaagcattcaaattcaaggggggtaaatgtagacgatatcatcatgatgggaaatgacgaaaaggagagaaactttaaggcaatgcttgtctaaggaatttgcaattaaagagttaggaagttgaaatacttcctaggaatcgaggtttgcacatttgatgcagggcatttttatttctcagtagaaatatgtaatggactttctcaaagaaataggaaagttggtgtgtaggctagcaagcacaccaatagatcttaatcataagcttagagaggctgaggaaaatgctgctgtagatagaaatgtattaacgtttagtaggaaaactcgtttatctctgtcacacaagactgaacatagcatatgttgtaagtgtgattagtcagttcatgcataatccaaaagaggttcatcgacaagttgctaacatggtgttacaatatcccaaggagtctccaggaagaggcatcttgtttaaacaaaacataggactagtattggaagcatacacagacgcagattatgctggatctgtggttgacaaaagatcaaccatcgagtattgtacctttcttggtggaaatttggtaacatggagaagttaaaaacaaagtgtgatggctagatccaatgcataagcagaatttacgcaatggctcaaggagtgtgtggattactatggttgaagatcattttggaagatttgaagattcaataggatggcctaatgagactttactaggacaacaaatctgcaatcagtattgcacacaatctagtgcaacacaatcgaacgaagcacatagagatagacaaacattttattaaagagaaattaggtagtggattgatttgtactcttatgtgtctactaaccaccaacttgtagatatactcaccaaaggtttaaacaatacaatgtttcaagcaagtgtattcaagctgggaatggaaaacatctattcactagcttgagggggagtgtgaaagtatgaaatcaaaaggtcgtagttgtataatagtgcaattgggaagtgaataaggacaatcccataatcaaagggattttgtgtaattaggttaggaaggatactaatttcagtgttaggaatatgtgtatatatatgactctctgtacaaattataaagtgtttgtctacctccacatgtttggtccgaccatattgcacaagctcatgtgtaatatggattgctgatttgttgttgtagtagaatgttatgggcacttcccagttaatctttagaactttttttttttaatttttttttattagaaatgaacatttgtattaaaaaagaagaacatgagaaagatgaaaagtcctccccatgatgtataaacctgaccaaaaataaagtaaacctccactaaatcgagagggctatacaaaaaggacaaaaggcttatacacgaatgacaaaccttaaccctatggacccaacccaaaggtgtacaaatcgacaactagctaaattgaaattacactcaaatgatagggtttaaaaatgtttgtatagtaaacccaaatagaaacaaagaactgaagcgagtcttacatcaacttcggcgacctccaagtatcctaaaaaatcctagtgttcctctttctccacaacaaagagagacactatcctccaaagagtcttgcttctgatagaattcccaaagcacttgaaggaaatcaccatcatatcacgaatattgcctagctaaacccaatccatcccaacctgtgagaaaatcctatgccacaaactcaaagtaatcagacaatgcaagaagagaccctccccaaatgatgcaccaataaggactaagggttgtgaaagacgtcctcaactatagcatgtcattgatatttgccttcttatatgtcactaaccatggaaaggccctgactttagaagggactcttaacttccacaaaaaattagcaggatagaaaagagcaaaatctgagaaattggataaggcgtaaaaaaacgagtttacttagaaaactcctgaaaaataaggaacccaagctttcacatctagaacaaaaggagataaatgaacacttgaaagtaagtacattagtctttcaagatccacattctccacatcaattagattgcgatgaaaggtgaggtcctaagacagagaagtgttattacccaggatagctaaaataggacggtttttagttgtggtgactttgaacaatcttggaaattgtaagcaaaaaggttgatccccccaccatagatcttcccaaaaacaaataatggtcccatcacccattacaaagcgagtgtgtgtagaaaaaacttggagtatatgttcaatggccttctaggggcaatgatgtgaccatctgactatattattagtgtcttatccattagaatgtgccccatagatacttaagataacctgatgccaaagggcagaactttccttaggatacctccaaagccatttctttaataaagtttggttcctcagagaaattttcccaaaccctaaaccaccaaactccttgggcctgtggactaagcctcacttcaccaaatgatcctttttgccctccccagaacctgactaaagaaaatctctttgtattttctctatcctcaaagctattgaagttggaatcttgaaaagagaaagaaagtagttcgggatgtgcgacaaacacgattgaattaggttgattctaccacctaagtacttgaaagctctttcccaacctcctaaagactctatccagcacagggtcccaaaaggaaatcgaatttgggttcacgctagcatcattgatagtttccttgatccacactagcaacattattattattactaagcttgtgattgagcttaataggtgtgtttgttggtttactagctaacttcccagtttctttcaacaaatttagcacatatatagaaattccctattgtgaccgtgtcacctcaatacccaagaagtactttaactagctcaattttttaatctcaaacactttctcaaactatcccgttcgttctcatcattcctattcataattttatcgtccacatagactaacaaggttgtaaccccttctgaagccaagtgcttgataaataaagtgtgatcacctggactttgcttgtatctgttggtaatcatcaccttcgcaaatctctcaaaccaagcctgaggagattgtttcaaattgtacaaagctttcttaagcttacacactcttctaccttttagattcttgccaaatccaggaggaacttccatatagatttcttctttaagatccccccacccccccatgtaagaaaatattcttaacatcaaattttgcaaattccactcaaagttagtggctaaggataacaataatctcggccaagggtgcgaagatatctaaataatcttctccataagtttggttatatcccttggcaacaagccttgctttatacctcttaattaatccatttgccttgtattttatggtaaaaacccactgacaacccattggattctttccttttagcaactccactatgtcccatgttatatttttttctagtccttccatctcaacactcatggcttgtctccacttttcactatttaatgccttggatagggttttaggaatagtaatagtgtttaattaggtaagaaaggctcggtagaaaggtgacaatctatttttttttgataggtaaaatgtatttataaaaagaaaggtgacaatctatcataggatatgaactgagctaatgggtatgaagaatgtttggtacactcgtgtacctttcattatccatggcaacacaaaaattatcaaaaaaaaaaaaaaaaagataaacaaataaaaaacaaaaaattcaggtaaagcactaacctcatttccaaagattggttccaactcttggatttgcacatgttcaacaaaggattcttttctcctcgagtatacctgtagtggtccaaaaggatcgtgagctacactttcattagtcaatgacatgggactagaagagaattattgagagcaggcaaaactagagggtaactaggactgaacatgggcttgaatgagggagattgtgaaatggagggcgagttaagtaagaatgaatccttattcttatcttccatgaatgatgtctccccttaaagataaggactagtaaaataatcatctctttcaacaaagatcacattgacaagaacaaagaatttctgagaagggagataataacatttataacccttttgtattgaagaatatcctataaaaatgcacttaagtgcatgttggtctaactttcctttgccatgatcatgtatgtggacaaatagagacagccaatgactctaggactaagattatttgaggtatcgaagttgggaaaaaactaagaaaacacttggatttgactcttgaaccccaaaatttgagaaggcaaccagttgatgaggtgggcaactgtaagcactgcctccccctaatagtgttttggaacatttttctaaaacaagaaggcacaagtaacaaagaagatgaccattttttctttcaggaatcctattttattggggtgtactaatgcaagatgactcatcaataatcccttttttcacaaaataaggggacaaaacctaattaaagtagtctcgagcattgttagacttggacctttttatgcttacaccaaattgagttttgatcatgttatgaaagtttagaaagacactgctcacataagatttctgattaagaagaaagatccaagatacacgagtacaatcatcaataaacacaacaaaccatctagccctcaaaatattacgaaccttagagggtcctcaagtgtcattatgaatcagagaaaaaggaatagaggtcttttgttgctaattggaaaggaagcacgacggttctttgcatgtccacaaatttcacaatgaaagctctctatatccaattcttagaacaatgaaggaaataaaaccgagtctattaaaggaagtgtgtcctaaacggagttgatgaagccaaatcttgtccttattttagatgaagcttccgattaggtatgacaaaggaaatttgttctcgatcctattttgatcacctggtacatcaagatagtaaagcccgtttttttccttagcaagtctaatcgtcttccctaaactctagtcttgaaaaacactgagaagggtaaaagacttaacaacaattcacatctttggtgatccaatgtatggacacaagattagttgaaagttttggaacatgaatttatatgaatttttccttgactggctactactgtcaaagagccatttgctatggaaattttcttgttacttgggcaaggtgtgtaggaacttaatttcaaagcagagttggtcgtatggtccatggctcctgaatcaatggcccaagaatctgaaagaagagtgtgagacattaaatgcaggggaaacagagtactcacctgaaagtgctaaggagcaagcactggatggttttttctaatgatcccaacaatctttttagcctctcaatatcctccttgaactctccatgtgttagggtctcattctcatcatttgagggattgttgttggtgagatttgcatgtccttgaacatttttctgttgtccgccattaggcttccatcccttattattgttgttgaagtttggtggtcttccatataacttcctacagacatccttagtgtgtcccagtttcttgcagtaattgcaccacctggatgaatttggtcatttgtttcctgcattgggttgattttctgctcccacattcttcatatttctagcatttgatagcgtagttaagctctctaccataggtgtttcattcatcattacaccctcttcttccttcctctgtttgaattatggaaataatttcatttagagatggaaagtcctctttgcccaagacctaactcggacttgatcaaactctagatttagaccagcaaggaattcaaaatttctttctttctcaacaaatcttttcaatatgacagcatcctcgctatccttcatttgaatgcattgataatcatccatctcttgccacaaatttttcaggagattggcatattcagtcacagatctctcaccttgtttggtggttgaaatcttcgtctttatctcaaatatctgtgttgcatcacgcacctttgtgtaattttgtctcactgcctcctagatttttttagccatggaccaaaacatggaagtactactaatctcgggtagcatcaaattccaaagccatgacataatcctggaatattcctcgtcctaagcctggaatttgggatcactctgctccgtacccgtacccaacaagtgattgattttcctttcaccttaaataatgtcttcacaacttgtaaccactgcaaataattctatccattcaattgatatgtggcgtgaatgttttgaagctccccattggagtgatttggcagtgcttcaattagctgtactgcaggaatgttggtgggttcggttttcttagacatggtggacctttttctttttcttttggattgtaggagtaaagaaccagaaactcagattgaatgaggctcaaagaaccaaaaacttgattaaagaagactaattggtttagaagaaaaccaggttgacaacggacaaaagaatgtgaattctgagagcttaaggctctgataccatgtggaaaaattgagaagaaaatctcattaattctgaattgaatacacatccggttatatacaaaaagataagccatacgagtgttataggaaactgaaactaccctaaacctaatccctataaatcagggattacattatatcccggatgtaaacctatttacataaaatacaaagtcaaaacccctaaagaaatgtgtttctccacaattttcattttaaacattggacatcactattgataaagtattcatttcttcttactcttaattttttttcttctttttctttaatctattcaactgcagacaagctagctgctcaaagtgtaggctcaacaaaa

SEQ ID NO: 10778 - DNA, 9567 bp, Vitis vinifera
  Intron number 3 from transcript GSVIVT01030843001 (locus G SVIVG01030843001) derived from phytozome v7.0 (chr-ID chr1 4; pos 17440052 to 17449618)
tcctcttattcgtgaggtttgttgcatgcatcatcagatatttgaagttttctgggtggaactaggttaggctttggtattaggtttttgtgtatgagttgattagtattttaactggggaagttcctaacaatttaaaaatttagttcttctttgtgcttggcccaattttattcaaattttaatctattctttatttctatgttgcaaaagtgcttttttctcttttttaggtaatttactgcatttagtcatccgagtgagataaatatcctggttcacatgtcattttctttgataatttgaatacaagcttttgtcacaaccggattatgcattgtcgaatcagcttctttgtatagattcttaagttttaggattgttgggttttgatgggccctctttaggggtcagcatttgagatgttgcttttgctttatctgcctgttttctaggcctacaggaatgcacttaaattttggatgtagacaccattgaccttgactagaactggagcttaacttcattcattgaatgtcaaaagcccttccatctaagggttttttttttaattttttttaattgaatttggggtacctgattattattatcattattttttattgaatttgggcacacggtaacgtctaaacttctagattgcttagattttttggctgtagttatctttttttttactttgatgctggttggagagatcttttcatcacttcttaagacattgtttatgtggtatgctggggatttgggttctccttatttgtcctttttggactttgttgatattatgaggattagttagttgggtagtgagtttgtttttgttttatggtgctgcttgtatacattgtttgtacatgagatgcacttcctttttgttagatgcttttaatctatcgtctttattttcctactagaaaaaattcattttgcaacctagttcttgtaaaatattaaaatgattctctggaggttgttttatctttttaagtaatgttcagtaattttggatctacatatcctaaaatattctctctcatgggacatgatatcctatgctaatatttggtttattatgagacgaagattggattggaaaacacatctcatattggtatttggtagttaggaaaaaaaattgaaatctctctcatgttaaatattgtttggagatcactcacgaattattttttaatggatgattatttatttctttgtaaatggtattgctaattaatatttattttgcttgtgtaaaatattatatatgattataaataatatatgttaaactatattatattaaattattttgtatataaattaaaatatattacataaaattgttttgtatatttatgctaaatggaatatctgtatctcttatctccaatagatttattatattttatgtggaggggatatactaaagactcaggatcagttattgcatcacttgggatcgattattgcataacttattctatcaaatcatcaatctaatatgaaaatatgatttctttattctaccttatgttcttatcttgcttagcagacatggcttgtagcatattgtttctgaattatactaaattactaaaatcatctgaaatggaaacaattgcagccagtggactaacacaacgactgcaaaccaaaaatgctcattcttcctagttggacatgagtctatgtgaaaatgaggctgctttcctcatgctttattttatttcttgttttttccccatcacttgtgctagagggttcagcttttgggcggaaaacagagggggtggcatatatgcttcatgctcacaggtagttgttggttggggtgggggtgttattggtagatggagtgttgcgagtttttttttactgttgtggcacaggataagtaccatgagatgcatgggccaaaacaaaaacgttaaaaaatgtctaattagcagaaaggattttttttttttttttgttcactaacatattatcacatggtagtatgacaattttataaaaaattatgttcttgtagtccaaaactacaatatgcaagcccctctcttgtggttgatccatagtctgtaagtagtctattatcttttgtgatggtcaaagcacctttacaaaaatcctgaaaaaaattgaaaatagcatcatgtggcatcaacaagcaggtaaagtagggaaactagtacttggcttgttctccatttctcaattatgatgcaaattgtatgctgtggtgggcttttcttttttctaagtcccctctggggcttgaacctggaactttccacaacctcatcccaaccccttgtcacttgagccaggcctctgtttctcagtgcgattttgaggagagaacgggtggatatttgaggagagatgatcatgtagagattattctggagaggattgttttactgtttttttcaagctagttatggagtagttattgggtatgcttctatgagtatcatcaaggacattggaagactgcatttccccatgggaaaatactttattctgtttcaaggagttagatccctctcccaaatagttgatcaagctaaattttgatgaatattctcttggtaactgaggtagaataatggtgggaaagattatcaaagatcatcttgtggagatcatagtttactcgacttctaagcaatatggagatgctattagggttgaattgttaaccctcttggaaatccttctaggagctagttgcttgagcttgtcttctatcattgatggattcaagtggggcccagaggagggggcacatgacccccttgaaaaataaaaaatttattatgcaaaataaggttttgatcctatgacctcacttttagagagaaactaagcaaccaatgagccaaatgttgttttatgacttatttttgcccccttgaacctaatctcttttattttccccatagttgtgaaaggcatgcctaggctccgggcggcacgatgccacccttcggcgcctcgcttgaaggcaagcaacgccccttcatgaaggtgctgcttaggcacgcaaggcgctcgcctccggcaaggtgcgatgtggtccataagtgcgcctcgatcccctacctccttcttcttcttcttcttcttcttcttctccttctcttcttctccgacatcgggttgcaaagggtagagagaagccttattttttttttttgattttttgggaccaaaacgacgttttggagcttattcctttaaaaaaaaaaaaaaaggccaaaacgatgccattttggccccgttttcccttccagcccccttttttggttgttttcaacccgacaaccctcccaaatcttgccttagcctcaactgtgcagtggagaagtgaagaagacgaagaagaggaggaaaaatagtcacgtacctttccgagacctttgtatttttctctttttttcacttttttgcatttttttccgttcttgtctcataactctcattggcatttttttttaaatataaataaattttactaaataaaaataaacaaacaaaaaacactttcatgtgcatattttttgttaatgtgatatgcatttttttttttaattttttttcttaatttaattataattattttattatagtatagataatttgtttgcaagatggataatgagagtgaaactcaagtggactctagtgcaagtagaagaagagatcccaaatgagggtatgctcgtttggttaatgaaaaagatttgaacaccatcatatgcctttttttgtgataaagtaatcaaagaaggcatatatagacacaaacaacatcttgttggtggatatagaaatgctgaaaaatgtaaaaaatgtccggaacatgttatagaagaaatggaagagtatatgagttccaagagaagtcaaaaagagcaaatgaatatggggagcgaagatgttaatgaagatttgtttggtttggaagatgaagattttggtgaggagattaatagtagaatgaatgtcaccaacatttctagtggaggtagtaatcgaggaggaagtggtggtaggatgttttctttaaaaaaaccaagatagaaaggtcttatggatcagtttttcactcctaatgcagaggtggttgttcaaaatcaaaggagtgaaaagatgaatcaaactaccatccatcaatgatgcctacaaaaaggaagcaagagaaagagcttgtatgcttatcacaaggtggatgtatgaggctattattccatttaatgcagtcacacattcaagtttccaaccaatgattggccaatatgatatgggatgaagggaccaactcttcatgaggtaagagttattaaccttaagaaagaatcggccctcacaaaagatttgatgaaagatcatatggtagaatgaaaaaaaaatggatgttcaattatgtcggatggatggaccgataggaaagagagaacgttggtgaactttttggttaattgttcaaagggaaccatgttcatgcaatctattgatgcttcttcaatgattaagatgggaaaaaagatgtttgagttacttgacaaatgtgtagagtaagttggtgaggagaatgtaattcaagttataacagataatcattgaagttatgtgatggcaggtaataaatactatttcttgaatttttatttacttttaaaatttgaattatttatcttgagaacttatgtaaatttattatttacaatcttacataggaaggttgttagaattaaagcgcttgcatttgtattggataccatgtgctgcacattgccttgacttgatgttggaagttattggaaagctaccaaacatcaagaggacattggagagggctatatcactaaatggatatatttataatcgcttagagctactcaacatgatgaggcggtttattggacaaagggaattgcttaggcctgctaagactcggtttgcaactgttttcatgacattatcgtgattgcatgaacaaaaaaacaacttgaggaagatgtttacaagttcagatttgtcaaatagtaaatgggcaaaagagaaaaaggggaaaactatagccaacatagttctaatgccttcattttggaacactattgtgttttgcttaaaggtttcgggtccctaattcatgtgcttcgtttggttgatggtgaaaaaaaagctcctatgggatacatctatgaggctatgaatagagctaaggatataattgtgagaagttttaatggaattgaagagaagtacgaagaaatcttcaaaatcattgataagaagtgggagattcaacttcatcggcctttgcatgcagtagggtactttttgaactcgaaattcttttatgataaaccaaatatagagcatgatgtagagattatgagtgatttgtataaatgcatctcaaggttgacaagagaccctgctaaggaagaaaaggttgtggccgaagtgagtttgtacacaaatgctcaaggactattcgggaatgagttaactgttaggacaaggaagactagagcagcaggttagttatttagttttgtttatttaaatgattagattgtatttttgctaaaataggtgaattgtttcactaaattgttaatatttatactacagctgaatggtgggttgcatatggagcttcagctccaaatttgcaaaggtttgtaatgaaattcctcaacttaacatgtagtgcattgggttgtgaacggaattggagcatctttgaaaataagtgaccaaaataattacaagtaatagtctaatagagtcttgaatgtaacttaaaagttaaaagttaaaactttaaaatatatttatgagcttataaatttttgtagatttatagcaagaggagaaataggttagatcatcaacgcttgaatgatttggtatacattaagtataatcgagccttgaagagaagatacaatgaacgtaacaccattgacccaatttccttgaaagatatagatgatagcaatgaatggttgataggaagaatggaaaatgaggattctcatggaggtgcacaagacaattttgcatttgatgatgataatttgacatggggtgatgttactagagctactggagttgaggaggctaggtttgatactagagctagagctaaagcaagctcaagcataataccaccaacgagggggatagcttcaagttctagatctttgctttctcattcactaatagatgaagatgaagatggagaaatggttgattcagcagatggggaagactacaaatgtgatgatggaaatgatgataatgatttttttgatttagaggagtgatgattgcttgttgtggacaaatttgttatttaagtgttttttaatgatgtttttgaattgtggacaaatttcatgttttggtttggaaactttggatttggatatgtattaggctattagcaatatggatttggatttgtttttatgtttggagttctttatttttatgttttttgttgattaaattgaagttttggatgatatttgatgatttatgtgtttaggacaaataaatgattgttaaatttgattatattatataaaaatatatatgtaaattagggcaacctcacttcactaaagcccgtgccttaggtccgcctcgcgcctcaggctccaggactactttgcgccttggtgcgcctcgagccttttaaaactatgttttcccccctgtagatcctatttctttctctgcccttgtcttctatgttggtttagaggaatttgtctacgctattaggcaggctagtagcttgatttccagcacatggaggtctgcccatttccttggggaaagtttggtcatcatgctgccttggatgtggacaacaattggttgccaagtttggctatttaagatgtggatttcttggcacaaaagggagctacactacttttgtttttaggggccatcctagctatctttgataattgttttgttcatgccttgcttactcaatggagaatcccatatcaccataccaagcctttacatgttttccttgtataaaatcttaccaaaataggggctttttaaatgaatgacatgactgtattgaaaaaattctcttcaatagttcttcaatgttgtcacttgttctattatcctaatattgtgcttgctgcttggtgtggacaagttcggaaaagaattaactgaaaacaacaagttttggcctttggaattgacatgatttataataaaatgaattggaattggacttataggaatctgaatacttattttaatttcattttaaagcagtggaatgtggatagtattcatttcaatgcttgaaaatttgcatgtctgtatctgacaatgtagcctccattttttttttactgacactaagcaaaatgtgtaatagaaaaattttcatggttgggtcttttcttattgcaagatgtaaaattcatttcttttgctttcatgtccattagttaaattcctattcttcaacaattttctctcaaacaatgtgtgaatgttatccactttgacatttaatcaataatgcgtgatcatgtaggatttgactgaggaatggtttgttagttgcccagtcaatgtaatctaaaatattcttcctgttgtgaacttgcatgctaatggtccttaaaaatcagactctggccctcaaaatatttctttaaacttggaagggtttactaatgggtatgtttaagcaaggtttttatctatgttcaatcatgtctagaatctctaagtaaacctggccctggaggtcatgaattgactgcatttatttgctctgccttgtccatcgctttttgaatcacagtgcttattatacaagaagtttttttgtttgggaggcaacatgacttttagaccaattgcaaaggagagggtggtcattagccaatagatgttcccttagttatgttcgtgaggagtcgattgaccacatactcttgcattgtgtaaggtgaggctgttataggagctcttgttctcattgttctgggtgtgttggatgattcattttacagttagagaaaccctgttaaggtggcatggctcatttattggaagaaaggggaagaaagtgtggagagcaatgcctttatgcctcttttggactatttggaaagagagaaatagaagatcttttgaaaatgtggaactttctgttcaaaggctgaagtctttgtttttgtgcagcttattttcttgggctaacttgtttatagaacattcatctatgtcctttgctgatttcattaattggttggggtcaaattgagggagggagtatttttgtttcccttttctttttggtgctttttggcggccgtttgtatactcccatgtgtatgttggtgtgctccttttggtattttaatataaattgcatttacctatcaaaaaaaaaaaaaaaaaaacattatacaagaagtgatcctattatttttatgggtcctagagaggtaaatacttttggcccagagaatgtcatcaatgaggggattattgagtgtcatgttcaaagagtgtcacttgttgaaggggattccttaatggtggttaattggatgagagtgaggaggtggggcacttcgaaaacatgcctgccttaaggtgatatttgattaaacatctttgtgagattttgggattgagattgtctttgccttctgtaaaacctctaataaattgggaagaatcacacatggtaaatgagctcagacatgttatctagattggaaaagtgaaaatttcagcttgcttttcttttttgtttaaatgatagttgaaacattgcttccctctttgattattttttggttgccctgttagtggtctatttctaaaatatgattcatgcatcttcatatcccttaaataaatttatcttgggggaggactcctcatccttctaatgcacttttattcacttttaaaataattctgtttctgatccaaaaataaaaaaataaaaaaatgccttgtatggatttctttatggggaattaccttgcttttttcctttatggcaaatcaccttgatttctccagagaacctttttaatattagatgaagtttagaaactcaacagctgctcatcactgcaatgtcattccatcaatctcgacatgttttattttagtgatgcttctcacaacctttctatcaaatggtaagcataaactttcagtcttttttttttttttttttttaattttattttatttcgttttattttattttattaattttatttgcataaggtctgatggttgaaaacagttgtaccaaaaagcaccattcttttattcttgtaatgtgtcatgtaattttctttattttccttatttttcatattaacaatatttagctttttggaatttatttattgataaaatgttgcttatccattttggtttccttttaagtaatttatttgttaaatttacaggatacagtcttttgcaagtctattctaa

SEQ ID NO: 10779 - DNA, 3849 bp, Vitis vinifera
  Intron number 11 from transcript GSVIVT01024250001 (locus GSVIVG01024250001) derived from phytozome v7.0 (chr-ID chr 16; pos 190951 to 194799 reverse strand)
ttgaagcaaaggtatcttacaatttcatttgtgttcctctttattctcagtctattatcattcataatttcttccttgttgtccttaccccttattctgactttttttagtatcatttacatgtatatcttggcatctattgaaggatttgttttctggttgtaaggttgcatggaagctttacttttattgcctgcatggaaaatgagaaaatgattctttaaatatattgcatttaaaggatagtctgcaggaaaaaagccatggtactcttaatcggaggatattaggcttgttagattaggtttctcgacttcttgatgttggacttaatgcatgaggtgttgcagctgcatttgggtattattaaccaagcatgtgagcaacattccttttttgataaattatttcaaatgtgagcaaagatgtaacaaaaaaataaaaatagaaataaaaataaaatctcaactattagcgatggactctttgattttgctttaaggaattgttttgatggccacttgggaggtatcagccatacacagatgtatatatgttgatggggcacaatttggatttgtagttcaacactcaaaagtacccaattgcaagtctctggatgagttattttaggtgttgaactctagctttgggtgtataatcctcatttgttcctatgggaagtaagattctgtttaccccaacagagaataattacaaattgaagttgtatattttagaaactaaaaatccttgttttgtcttgaaaattcagatatcaacttgttgatagaatggttggagtggagaagcttctgggttttcaagaagacagtggctttttatattattgagtcaatgactgacacttacaggatatctttgtatttagtatatccaaatgttaatatagtggataccatattgctgttgccaagttgtattggtgtccagggattccatgaccaagaccaataccaaacaccatgttggggaactactcatctcctctctgcagaaatgattttgactgttgaggtatcttctaagggtagtggttttgggggaagcagtggtacctcatgacagagtgaacacaaacaaaatctttaaattggaaaaccatattctgatatgtgcttcttgtgtgatcatagtagctagatcatctctcacatttctttgaaatatcagtttggattgtgttatggctaaggatttttcacattgtgaaacttaagtgggtgctatcctagaatataagttcaatgtttatggtttgggcttgagttgttgttaaggttgataaagccagatcctatggtttttattctttcttggcttgatctggaccacttaggtggcaaaaaactttcatatctttgaggatgagttaaacggtggagagttactatggaaaaaggtgggtttcttgcatctctatgatctttaatcaatggaaattcaaagagttcctttcgtgagtatcttaagatattggatatttgcattagggataggagatcttgtctcattccctgaaaggattgggttaaatagaatttttatcaatttttttctagagaacccagccaaattgttaccaagggagtcttccaagaagatctgtatattctagccttgagttagggaagcaatccacgagacatggaataaattggagactaagaacaacttctcaacattgttaagcctctttgtatttgggttttgggaggatcagggaaataactaatcttttctcaagagtggagattacctttaaataggtctaagggctgctaaagagactggaatcttgccaggagaggaaccattgctcttgaggattttagagtgaatttctgccctctgatttaagggaaggcctgggtggctggggcttgtttgttttcttgtttttctttgtacttgtcttttgtcttatatgttttttaaggatgttttcttcctcatgtcctctctcttaagaaatcctcgattctctgaaaaagaaaatgaaaagagatagtgaaccacttttcttagaattgagtattctcaaatacacattggaaatatttgtgccaaaaggccaaaatattcactttgaaaaaataaccaccatgtgtgtgaaattataaatataacctcaaatgaaccaaagtatcccttatgtttttttttattttattttataaaaagtgctttgatatgaaacgagtataaaaagtttgggggaggatatttttgtccaaaaaggtcattcttcttgttttgaaaaattggaggccaattttacagaataaggtcatattttgaccctttgaatcaaatatccctgtggattataagtgatgaaatttatgtaaactgagagaacaattgaaatgcccatacacttctcctggttacttttcaagatttgggaatggcatattgcatcatgctactgagagatagtggaatggatgtttgaactttggaattttttatcatcaaaccagtgaagcaacataacatggttaacaccatgattgatttctaaagtctgacttttgaggatactcattcagctgtagatgaacataattttcttaagggaatattcactctgaattattttctctttgatggtgcttaagtggcagattagaatctttcttttaatagaagagattattacccattgtttgtctcttctatatttacttttaacatttgaaataagacattagcctttcctatggtttcattattcgcagaaacctgcattccgatccagaatttgcttaacataattattttacccttcaattaataggacatcctattttgtttaagaaaaggtattccagttttctgcaattctgtatagaagagaaaaatgaaacctcagggaagttttgtgtcccatttcaaacgtgagtggaggcccctataatttgctaagctttaggaaatgttttcatgctctttcctttcttttggtaataaattgttggcatctgaatgcattccttctataagaaggtttgcatgtgaatagcggaaatgcagatatagagccacacattaaatttgaacaggatgttctattagaatgctccacaatgtgttatgtagctggtgtatggagtatgaacatgaagtggattggatgacaatattttacttatatttaaaaagaaaccttttcctaaaggatttaatattttagtttttcactgtcattgtcctctagatcaggaaaactgtttgctattgatcaggatgtatatatctgagcaagatggttttttcttttttgtgttttctacttagttaaaaactgttgcttcagtacataaagacagagagttactttatcaataacgtgtgctcatgcaaacatgcaaattattgccatatcacacgattaagggtgagagtaggcggttgtaactggacattggaatgcacgtttgtgaacactaacttgcctatattctcttttttaatcctatttcatgctggaatatcactttcaacttttattagttagaagttagaatttgtgagtttatgcgggaagcatctacttactagaacatgagaaaagatgtaagttattgtgttaaacatcctggtttcagctatatatttagtaattaatttactgaagtttgatcacatatactagatttatctgattaatttactggtctcagcatggttcctctgtttcttttgttttttggttttgagatcttgatcagtactgtgctttattttgcacttttccagccaagaatgatgcaagactttttttcattttggtttttcctcaggctacagcatattactatc

SEQ ID NO: 10780 - DNA, 9317 bp, Vitis vinifera
  Intron number 2 from transcript GSVIVT01036514001 (locus G SVIVG01036514001) derived from phytozome v7.0 (chr-ID chr1 4; pos 22938606 to 22947922 reverse strand)
gagagaaaggttggtcatttcttcattcttttccatttcatttcgaaccatttttctttgtgaatgttttttcagattccagttatatcttgtctaggggacaaaagccttcctttttagatgttttgtactcacaacaattatggaaaaactataatttataggatacttatagtttgattgtgcttgttggagattaccggttcatgacatatgcttgcatataaattttattttgaaacattttgtaaagttacattgtcttgctaaggtgtatagcacatttgttacgtgagtgccttaataactgtttattttttttttctcatagttaagactttcactaccattataattatttttctaacctcttcctctctttaggagcaatctatagagtatcaacaatacatatatatatatatgtgtgtgtgtgtgtgtataatacaaacattatgtatatttatacgtttttttcaagcattttctttttggattttatagaaaggatatgtataaaatatgtaaaacaataataaaaattgttaagcatttaacttgaatcttataattcttttctaatcacaaccataatacttggttaattttaggaatttgtggttcccatcaaatctattatcactaacaaaaaaattcccaccaaatctatttccactctaaccaaaaaatctattcccatcctagagtttggttatttttggaattttttatgaattaataaaaatttattagtactttaagtgttatttatggaaattagatttgttatgaataaagaaagaataaatatagggtgcacatgttactttgatttttatccttggaatgagaattaaaggaaaaaaaaagccaagtctaatgcatgtaagaaatcttaaaaaattctgaaattatatgcatgtcacttattgtagtattatatttatccttaggttatcatggaaagtactaaggaaaagaaaaaaactgttaaggaaaataattttctcatgtttgattgtattataaaaaattctaaagaaaatcaaatacaattaaaattatataaaaacttatgcatttttaaattatttaattttatatggaatagttaaaataagtgaaatgagtttttttttttttttgataggtaaaaggaaattgtattgaaaaaaaggtatacatgatgtatacatatacaaaaaccaataggggatttatcatatacataaagcaacctcattctatggggatcctaaccaatccacaaaatctatcaaagaagtaacattatcccccatgtacactctaacccaatccgaaaatagatataagaaagaagtttgaattgtttgatttaagctttccctatccttaaaagctctcctatttctttccctctaaatggaccaaaaaaaaaaaaaatgcatagaggggcaactttccaagcctttttcctctttttgccaatcgagaagccactccaacttaagagcatgaaatagggtaaaaaccatctaccacaatatgcttgcttttggacagtgcaaaagaatatgaacttccgtttcctcttcaaccttgcacatgtagcatctatttggcatcttccataccttccttctgagttgattttgtttcaatatcttaccccaagttgcctcctaagcgaaaaagctagctcttgtaggggcctaagagttcaacactttactgtgctggaaaggctccgcactcctacttgccaaagagaagtagaaggaatgaattggaaaatctcctttcttagtccccaaccaaaccatggcgtcattagtacccaaaactacggagcagttatgcaacctcccaaaaaaggcatcaacatcctccaactcccaatcattgattgtctaataaatcttagaccccaactgcccccatcccaaacattgaccactcaagcatccttagaggaagcaatagcaaaaaggccacatcactcaaaggcaaatccttacactacctatctttccagaatttcactccattccctgagtgaacctaaagacttcttttatctttgaagaccttccatccatttctaattgccttccaaagctctattccataccttcctttcaccttctttgtgcaccatccccgttcctataacctatacttgccaacaattaccagtttctagagaggcttcctttccctcacaaatttccaagaccatttcctaaaaagggccttattgaagagtgaaaggcttttaaaatgcaaaccccctttttgtttctccatgcaaacaattgactaaccaaataaggcttattcaccaaagcccctcctccctagaggaagtttctttgaatcttttccaatctagccgtcactctttaggggataacaaaaagggacatatagtaaatgggtagactaaataatgtgctcttaatcaatgtctgtcttccatctttcgaaagttattgtctctttcacaaagcaagccttttttggaattgctcctccaccgcttcccaaaccctattagacttgtaaggagcacccaaggggaggcctaagtaagtggttggaagagtacaagtaagtggttggaagagtacccaccttccaacctaaaacctcggcaaactcctcaaaatttggaacgtccccaacaaggatcaattcacttttcttcagattaatctttagacctaagcatgccttaaaccacataaaaacccaacttaggtactctaaattttccttgttggcatcacaaaaaatgagagtgtaatttgcaaagaacaaatgggagacctctactcctgtctcatgcctttctttaaacctcgaacccctcaataaagccaccatcctttgccctagaaaacaagcaagaaaggatctccatccctaaaaaaaacaaataaggagacaaaaggtctacttgtctcaaccctctagagttgcttaaaaaagcagaaggagtgccattgaccaaaatagagaaacggaccatagagatacaccatctgatccaatacaaccacttggagccaaaacccattttatccataactgcaataacacaactccaatttacatggttgtacgccttttctatatccaacttgtataaggatcctctcaaattatcttttaagtctagaatcaatggtctcattagcaatcaatacaacatctaaaatttgtctcccaccccacaagagcatgctgaaaatccgagaccaaagtgtccaccacctttttgagtctattagctagaactttagtcaatagtttgtataaacccttgaccaaggtaataggcttgaagtcctttatctcttcagccccctcccttcttaggcaccaaaactacaaaagtagcatttaaacttctctcaaagcatcccgacttatagaattcaccaaaaaagcccataacctctctttttacgacatcgtgacaaccttgccaaaaggccaaagtaaaaccattcaaactcggtgccttatcttcgcccaaactagacaaggcagaaaaaacctcctcttcagaaaaaggaaactccaaggctactgaatttgccggtgaccgagagttaaataccaacccctctatacttgacttccacttccccgtctcaaaaagcattagttgaaaagctcctgctaccccctctttaatacgattctctctcactagtgaaacaccatttacccttaacttttctagaaaattcttttttttgtgtgttagccattttgtgaaaaaatctttttatttttatcccatttttttagccataactctcttgatttctgcctccaaaacatcttctcaaataatgccctttttttaaactcatctacgacactctttttaacctcaaattccttcgttgtgaggactctttctctttcctttgcatcctactatcccaattgcgctagagcctcaagttttttggtagacacattcccaaaactctccttgttccacactttaagatcttgcttcaagcttttgagcttaattgccaaaatatgactgtgagacctctgaacactatgcctcttccactagttcgttatgaggtctttgaaccctttcgcctttaaccacatattttcaaatttgaatggaatctttccatttcatatccctccaccatccaacattattggtacatgatcaaaggctaggtttggtaggattttttgaaccaatctactaaactgctcttcccaatcgtcagagactagaaaatgatctagcctaaaggctaaagggttatttaaaccaccacaccacgtatacttaccatcagataggggaaggtttttgaggcgcagcttgtcgataatctctgaaaaacgcctcatggtagctgaaagacttatataatctttcatttccttcgaaaatcttatcacattgaaatcccccctaatacaccacaagtcatttccaaaacctcaaataacactcaactcagcccaaaaatattttctctccttagccaaaacaggcttataaactcctgaaaacatccatacaaaattacccttgcaatttctaaaacgacatgaaactgaaaaaagacctacctccatttcaaaaagctccatccttcaagatcaaggatggagggccatttctaacacctgttaccagtggcgaatcctctttatctgacaacaccatgtctcctcagcaaatcaaacccatgtcccgatgagcctccctgaaagccccaaagagaggagtagaagaaagagtccttccccctgagtcgggaatagaaatagacattgtaccttgaaaacgcaccatctttgacatcaaaacttcatctacaagagataggacatctcccaacagccaccaaccatgctcttcaattggcgacaccccccacttaaggagtaaaataacaccactataagaacgagaacaaagttgggctttaaacccttccttctatgttgcttctgcatggattaggcccaatagactatcgtgggccaaaataaaagggtaaacttaggcctttttaaccaccttgggcccactaacaacaggctggcctagccacccttctttgggctggaccttttctccaaagggccgaaccgcatcacccatgggttccgtaatcaaagaagaattggcttttgcctctgtgaacccctgtaaagctggcttagcagtagacgactaaaaaccctcctcccatgctatgcttgcaatctcttgctcccgcccttcctgttgcagcctttccacgaaaggtactggagaagccgccccttctactggccttttccatagttttaaaaggctcaaggtgcaccaaggcgcaaagtagtcctagagcctaaggcgcaagctttagtgaagtgaggcgcaccctaatttacatatatttttccttttctttgtcttcttcacttctccactgcacaactgaggctagggcaaaatttgggagagttgtcaggttgaaaacaaccaaaaaaaggggctggaagagaaagcagggtcaaaatgtcgttttggcttgttttttattttaaaggaacaggctccaaaacagcgtcgttttgacctgttttttttaaaacaaaaagggccaaaacgatgttgttttggtaaaaaaaaaataaaaaaataaaaataaaaattaaggtttctctctgccctttgcaacccgacgccggagatgaagagaaggagaaggagaaggagaaggagaaggagaagaagaagaaggtagaggatcgaggcatacctatggaccgcgtcgcgccttgcacgcctaagcggccccttcgtgaaggggcgtcgcctgcctttaggcgaggtgccggagggtggcgtcgcgccgcttggtgcctaggcgtgccgcctttcacaactatggtctcgtcctatcaaaagacaacacctcttctactagattttgtccagtgatcctcacatgaacagctgcgtgtggttcaccactctttttctcccttgtcttcaatctctcaactcggcgaaccattggagcagctcaaggaggagtctcccaccacaaattcaccaaataacatagatctcctaccactacctgtaacttcctcattgacccctaagtaaccctcacaagcatcgcccagttgtttaaagaaaaccttatgccacagacaaagcgggagtctcactatactcacctagaaggaatttggttgagcgctctcacttagacagcctactgttggactgcatctttccagctttagtggcctttgcttgtagactctcaacccttcttgcaacaccttttttgcctcccttgccaactcgaattcaaacaaaatcaaggtctctcccaagaggaataacaatagattccctttcaacctccaatggtatctagcccaactctccaaagatgataacaacgggccctcctttgagacatcccccagttcccactaagcattgattaaggaaatgcattttgttaaaagaattgacatccccatagtgcaaccacactttttcactctctgttccctgcttagccaaggggatggcctccaatggcacacgactcttcccagctttcaccttaaaggtagcattccttctttctcggggctctattccagtggtcttaaatttttaagcaagaccaaaccaccccctcgacaatcccttcccctttagaaaaatcaacacaaaacaatttgctaacatagaaaaccccgaacatagcaagtatcttcctgcctcattgctgcgcaactgaagctaatagctccttcctccctccgcccaaaagtttttgaactccttcgagctctccttttggcaacattcttccactccttccaagaataaagacaaacccctctctttgaatctaatccaactagaaaagtttcgatccctctctataataactttagacaacttccctttgaatagttccattgaaatcttaaaggacttggactcaatcccaaaccaagcccttcctccaaccctcatctcttcaactcctataaccccccatttaagtatgaatcttttttatgatatcagaatggtatcctagttgatacagagtatcatcaagtgaaatgagcttgaagtagtatataaaaacaatttattgattttaaacttttttatttttcttcactttttctttccttctacttttcctctctattttcttttaatttcattttccctcaaatttttcgggaaccaaacataaccttagtgtttgtagcatagcataacataacatcattcaaaccaaggctcatgctataattacttagggtttcaaattgttaatgtgggtttcaaataccaatctctctacatgattattccattatgttgtatgtcattttctatcttactggaagtggactaagatcactcatctctttttggaatcttcatctttagttccacataacttggattgaaataattgcagctccaccaacttagggtgccttgtaagttgtatgcagagcttgagtgtgcttttgagagcatgtgctgaaattttccctagtaattccatttatcgtcttttttaaacattctgttcataagtaatttagaaattattgagttgctcaatagttgtccaacaatcgatattttttttataaataaaaaacaagagatgtattaatcacatataaagaattcatgagaaggatgaaaaatcctccccaaaaatacataaacctgatcaaagtacaaagaaacctctgctacacaagaagatttatacaaaaagataaaatacaaaagaatgtacaaggtacaataaaggagagtctacatcatttttttttaatgggcaagctagcataggtgggtaaagtaggacaacccttggttggtcgtctacaatcacaatgtacaaggtccaataaaggggagtctacattattttttttaggggggtaaaggaggacaaccctcggttggttgtctacaatcacatgggtgagctaaagcttcaatctattaagatttaatgagagaaacaagtataaaattacagatggggaaagtaaaataaaatatagagaaaaaatatatgaaactttagagtctcactaaaaccttttaggagtctcacctagaagaaaaacaatagtctcactatttaatattgcatagtatgcaagaaatttaatattattcatcatcaatcattaattttggctttcatcaattgaccttatttataggtttagaaaactctaaaatctaaataacactattaaaaaatggatctaacttatggagtaacttattaggactttattcctttcctaaaattattaatttgtttttaaaaattaaaagatatcaaaaacttgctttataaaaacttttataataaagtttctaacagagaagagttttaaatttgaaatacttaaatagaaactctaaaaagagaaaaaattaatttagaaaatagaaagtttagaaacttctttaaagagagtttaaaactttctaaattccaaataaaactcaaatactagctattgactaattatgatgttagaaaacctaaaaaactgcaaattacataaatcccttgataaagtaatttaagatttctttatttcctttcattattttcttagatatatcttgaagattcttcctcattaatgaatggtttgggggcttcttaactgcttttataggttgggggctaagtgttactcttttcttattttaaaaatttactatactataaaaagagaaagtatgtttaaatgttataattgacagtgttcttagttttggagtttagtataatttagcttcaaagacaatgcaaaagttatggagagatgctagtatatccaatcaatgacaatatttggtgtgcatgacttcttgggagggatattatatagtgatcgactttgatagaggggttctagatgcagttataagtggtgtaaaaatagcattgctttatacagttgtaacttgtgtgacacataaatggatacatacaacactatagaaacgtatgctttagattttgaaatgaggattttaaaatcaaaggtgtagtagaagagaagaatcatggaattttgcttatgtctattctgaaataatgttcttagttttggttgttaaatataaagctagaagaggcatgttggagatttcgttaagatcttcatcaaatgaattcattgttgagtttttataattttatgtttctcattttgttgcagtgaatccccgaagggtgcaa

SEQ ID NO: 10781 - DNA, 4032 bp, Vitis vinifera
  Intron number 1 from transcript GSVIVT01028687001 (locus G SVIVG01028687001) derived from phytozome v7.0 (chr-ID chr7 ; pos 12126909 to 12130940 reverse strand)
cttgagactccatttttgaaacaagaattaaagtagtggatcttttagctccttattgtcgtggaggaaaaattggactaggagctgaagtgggtaaaacagtactcattatggaattgatcaacaacattgccaaaggtcatgggggtgtatttgtatttggcggagtaagtgaacgtactcgtgaaggaaatgatctttacatggaaatgaaagaatatggagtgattaatgaacaaaatatttcagaatcaaaagtggctctagtctacgatcagatgaatgaaccatcgggagcttgtatgagagttggtttgactgccctaactatggcggaatattttcgagatgttaatgaacaagacgtacttctatttatcgaaaatatcttccatttcatccaagcaggatccgaagtatctgccttattgggcagaatgccttccactgtggctcctgcactcatgtttcagatgaaggttccgaaacaattttgggttgatgcagtttccacagcttattttttgatcaaccgtatgcccactgtagtgcttaaaggtgatattctgtacaagttaatagatccacagaaatcactctttccaattgaaccaagaatttttggatgtacatgctatgttagagatacaaggccttttgttactaaacttgatcctaaggcatcttggggtactcaagactacaaaagggctatagatgtttctcgactaatctcaataagtatctagtatcaacggatgttgtggtttcagaagacacaccctttttctcttcacccacaagttctgcaagtgagggggatgatgaagaatggcgtgtgtatcaagtggttaattcaagaccaactgttgggcaatcaagtatggttgattctgatgcgtctcttgctcatttgagtactgttgttgatgtttctcctgctctaaacaaaccaccaattgtacaggtgtactctcggcgcccagtgacaacagatacatgtcctacaccagctcctttgtcatctgatcttttagtgatcttgaccttcccattagccttcaaaaaggtaaacgacaatgcaagtctacccattccactactaactttgtgtcttatgatcacctgtcatcttcctcaagtgttttttagcctctatagattctattttagcacctaaaactattacagaggccctgaatcatcctggttggaagaatgccatgcttgaagaaatccatgcattggaggacaatcatacatggaaacttgttgatttgcctcaaggatagaaagttgttggctgaaagtgggtctttgcgataaaagttaatcctgatggctctgtggtaagactgaaagtcaggcttgtagctagaggatatgctcaaacatatggagtagactattctaatactttctctccaattgccaaactgaatttagttcgactatttatttctattgctgcttcccaacagtggatgatacatcaattagacatcaagaatgcttttcttcatggtgatctagaaaaataagtctatatggagcaacctcctggttttgttgctcagggggagtatgagaaggtttgttatctaaaaaaagctctctatggattgaagcagagtccccgtgcttggtttggaaaatttagtaaggagattcaagcatttggcatgaacaaaagcaagaaagatcattccattttctacaagaaatcaactgctagtatcatacttcttgtggtttatgtcgatgatatacaggaaatgatcatgcaggaatctctgatcttaaggcattcatgcattccaagtttcatacaaaggacttaggcgaactgaagtatttcctgggaatagaagtatcaaggagtaagaaaggaatgttcttatcatagaggaagtatgtgcttcatctgcttgaagagactggtaagatagaagcaaagccatgtactaccccgatggttcctaatgtacagcttatgccaggtgatggagatcccttctaccaccctgagaggtatcggagggttgttgggaagctgaattatctcatcgtgacgcaaccagatattgcatatgcagtaagtgttgttagtcagttcacatttgcgcctacagtaaagcattgggcagctttaaagcagattttgtgctatctgaagagggcttctggtctaggcatactatacagtagtcagggacacacttgcattgagtgtttttctgacacggattgggcaggtactaagtttgatagaagaccactacaggttattgtgtgttctttggtgggaatctagtggcttggaaaagtaagaagcagagtgttgtatcccgttcgagtgcaaaatttgagtatagggccatggcataggctacttgtgaaatcatatggatacatcaactcttatgtgaagtgggaatgaagtgcacaatcccagcgaagctttggtctgacaatcaagtcgctcttcatattgatgtgaacccagtctatcatgaaagaaccaaacacattgaggtcgattgtcacttcattcgcgaaaagattgaggaaaatctagtctttactggctatgtgaagactagagagcaacttgaggatatttttacaaaatctctaaatggaactcgagttgagtacttttgtaacaagctgggcatgatcaacatctatgctccagcttgaaggagagtgttagctgtatatatctgtacttaccataattaagttgtttcatttcttgtaggctaattatttgggataataccttcctaatttaagactctcaattgtatatatatgtgtattattcctctaatatattgacagtaattttctccatacctttgttgaattacacataacatttttaagtaacatggaataatcaagagttataagcaacaaatgtatcaagaaaaattatatacaaccacagatcatcaagaatcaaaactaaagatttgcataatatttttaaataacatggaaaaatcaagagtgataagcaacaaatgattttgagaaaagttatatacagtcatgcatcatcaagagtcaaaactaaagatttcaataaaaaattttaaaaacatggattaatcaaggattataagtaataaatgatttcgagaaaaatcatatatagacatggatcatcaagaatcaaaactacatacttttaaaaaattataaataacatggattaataaagagttataagaaacaaatgatttcgagaaaaattatatacagtcatgctttatcaagagtcaaaactaaatatttaaataacatggaataatgaaaagttataagcaacaaatgatttcgaaaaaaattatatacaacgatgactcatcaagaattaaaactaaagatttacataacatttttacgtaacatggaataatcaagagttataagcaacaattgatatcgaaaaaaattatatacaaccatggatcaccaagaatcaaaactaaagatttacataaaagttttaaataataaggattaataaagagttataagcaaaaaatgatttcgagaaaagttatatacactcatggatcatcaagaagaaaaccaaatacttcaataaaattttcaaataacatggattaataaagagttataaatgacaaatgatttcaagaaaaattatttacagtcatgaatcatcaagagtcaaaactaaagacttaaataaattttttaactaacatggattaatcaataattataaacaacaaatgattatttcgaaaagaaaagccctccacacgtaggcataatcatacaatcttgaagaggctattgaagaagctacaatcctaaaaacaaccatcctcaagagtttagaatgaaaagcataatcatacagatgattccacaaaaaaagtcatataaagaaaatgtttacatccaaacagtgataactaaaagtctgaaaatgtttactagtgatagttgcaagcctagcatccgtgatttggcgagcatccagattta

SEQ ID NO: 10782 - DNA, 8737 bp, Vitis vinifera
  Intron number 3 from transcript GSVIVT01022377001 (locus G SVIVG01022377001) derived from phytozome v7.0 (chr-ID chr7 ; pos 19315167 to 19323903 reverse strand)
gaaaaaggtataattcatttacatggttggaataacgattatatgaatgtcgaggataccattctctatcattcttctttctgttctcaaattttggtttattcagatgtcatttctttctttactatgttaaattcacacatgttaggcatgcactttccttcagaatttcttctggacaccatttatttgaccactaaacatgattatttttctaactaaatgaatggcttatatgataaatgtaagtttctgaaccaaagtggcagagagaatcaagcttctttttttcacagtaatagcatttgcttcatgttctttgtttatccaaaacatatgccagttatcattgctcttaaaagtaaatcgcaaaagacaagttggataaaaagctcactcctgtcaatcataaaataaaagcctctgtatttatcattggattctttcctgccacaccacatgctagcaacatgtgtatcactaaggaagcagttaaacctcctgtgttcattattccattatgtttctttggtaagaggtgtcttgtatccattttgttatcgggtttctggaatgtgctgcccctactttgaataggattatgtatggaccctgaaagcactaaatacttagtggcaatgggtcttgagggtcaacaactcttcattagatccccttttgttgtcgataatgtaatgtatcttgcaataaaaacctccaacgaatgtgtccaccagcaaaagtaaataaataaccagccatagacatcttggaatcaaggtttttgcatattctaaatcaacgtatccaacaacctttttagttgtcctttatcaaataaaatttctggatcacaggcacctacaaggtatgtaagaatccattttactgcattctagtgcccttttttaggattcaccatatacccactaactacacttactccatgtctgatattaggcatagcatatgttgagagagagagagagagagaaagaagaaaaaccttaattctcattcatgtaatctctacttacaattgagagatatatatatacaaggctaggagtcctaactaccatacatgtgacctatattaacaaggaaagataatatactataaatacattatattcaacactccccctcaagttggagcatatacgtcatatgcaccaagcttgttacaaatatatttaatcctaggacctctgagagatttagtgaagatgtctgctagttgatcatttgaattaacaaaacttgtagcaacacattctgatgcgatcttctctctaatgaaatgacagttaacttcaatatgcttggtcctttcatgaagaatcccatgatgagacataaacgaagtaaatggggctgaaaaatattccctggcattgtcactgcgtaacacacgaataaaaatattgaactgggtttggatttcagcataaaatttctggaaaatagagaataacttagctcgatttttcattaaaaataaccaagtacatcgagaatagtcatcaatgaaagtgacaaaatactgaaatcctaaagtagacgcaatccgacaaggaccccaaacatcagtgtggacaagctcaaaaggagactttgcccgattattcaaacgctttgggaacgagacacgagtatgtttcccaagctgacatgactcacacggaagcgacgacaaagtggaaaaacgagggaccatcttctggaacttggagagactagggtggcccagacgattgtgaatgaggagaggagcatcagtggaaatgcaaactgcaggagatgaatccgaggtgaggtgatagaggccttgagactcacgtcctatgccaatcgtcttccccgtactccggtcctgcaaggtcacaaatttatcagaaaaggtaatagagcaattaagagtacgagtgattttgctgatggaaataagattaaaaggacattcaggagtataaaggacagaagtgagaggtagagaaggcagaggaagggctaaaccaatacctttagccacagtttgagaaccattagctaaggtaacagtaggtaaagcagaggtagtagtaatagaggagaaaagatccttattaccagataggtgatcagaagctccagaatctagaatccagggtccaagagaagatgtgtgggtaaggcaagcagaggcattaccaggctgggcaacagaggcaacagaagcctgagatgcggaagagctcggaggctgaggcagcggagaatcagaggactgggccacatgggcagtgcgaggaggccgtccatgtaactaatagcaacgatcgcgagtgtggccaagtttattgcaataggtgcaatgaggacgttgacctctacctcaggtaccaccgcgacctcctcgagagctagtttgagaaactaatacagaagaatctgaagtgctatcaaatggcaaagtctgagtggaggagatacggaggaggcgagcaaacacatcatccaaggacggaactgatgaactaccaagaatctgatcgtggacaggctcaagatccggacggaggccaataagagtaagaaccatgaagaacttgtcaagctatgtttgttgaaccccaacatcaggagtaagaggcatcacagtcaagaactcctccttaagagaggcaatttggccaatataagtagatagatccaagtcctgttggctgatatggacaatagcagaagccaccttataaagacgttggatatcattcgtgtataatcctttggcctgagtccaaaatttaaaacaagttttgtaggcccgaagatgaagaagaatcttgggatcaaccgattgccataatacactacataactgtgcatctatcttccttcactgtacgcggtcaacctcagggatatctgcctcctgtgtaatcaagtgatcctcatatccttgacccataaaccaaagttcaacagaggcagaccaggaaagataattttcattgccaactaatttctccgaagtaatcataggagatccagatatgacagaggaaaaaatggaagctttagtagccatatccacctatctggagaatgaagtatgtttggatcgaagagagccctaatacggcttcagattgcggcgtggcaccaccgaaaaagggagacggcctcagatcgcggcgtggtaccaccagaaaggtagaagaacacttcccaaggcacgtgcagggattggagtggagaaaaagtagtcggagcttcgccggaaaaactgtttggagggccgacggagacaaaaatccccaaaagaggtacgtgcagggctcggatgggagaaccagggaggtagggaggctggtcggcgtaaggcgaagctggaggaggaggcgcgtcgccggaaaatgcctcacgcgccggcgcgtgagatgcagccaccggccggaaaatggtgcgtggccggcgcgtggatgctcttttggtgccggtgccttcacaaaagttggatatctcctccaggcactccttctggtatggtcggtgttggaaaaataggtcgccggaaagttcgccggaaaagttcgctggcggtgaatggttactaacgacgatccgactgaccggaaagtattgggagatggggaaggtgaccggaaagaaacacggtcaccggaaggtttcccggagttgatgacacgggaaacaggaaagaattaggttttcttccttggctctgataccatgttgagagagagagagagagaaagaagaaaaaccttaattctcattcatgtaatctctatttacaattgagagatatatatatacaaggctaggagtcctaactaccatacatgtgacctatattaacaaggaaagataatatactataaatacattatattcaacagcatatatcattaaatacatgagataaccaaaaacatttaaggggattttgacgtaaactccacctcgtttttgtactaggacataattgagatgataatctaaaatatgtagcaataggggtattcaaatgtttggcttcacttatattaaatctctacagtaacatactaacatacttctttagagatatccacaattttcagagcttctttattgatgtagttcaatctgatgaattttcttggcaaccccatgatttctcatatcgaactcattactcaaaatatacttcaaaatttcaatttctttcttacttttgacaacaatgaacatatgatcaacatataaaataagcagaataggggatccatcattaaatagtctaaaataaacacaatagttatactcacaacacacatacctgtgggaccctaagtgtcaaaatgcttatacctttggctaggagcttactttaaaccatatagagaccttttcaatctacatactagatctttatttcttaggtccagaaaatattccgttgtttcatgtatgttttctcctctaactcacatttaggtcattttcacatctacatgctctaattccatgtctaatatggcaacaataactcaaattgaatcatgtttcacaataagaggggaaaacatttcattgtagtcaattttttctttctacgataatcttttcattgccaatcaagtttatacctttctcatttttctttttctctctttttttttttttttttgaaatgacttcatttttcctacagacctgtttacatccaattgattaattttctttaggtaattttactaattctcaggtcatattattttgagatgattgcatctcctctaacataacatctagccactaatcatcatcatccaattttattctatcctaaaagcaatatggatctctacttcttgatgcacctttgcttagggatttctaatttattttttcttattgtctatctaaaaagaaaaaaaatatggacctctaatactcataaataatacaaaagaaaccatgttttcaaaaccataatttattgggtcttatgtgattgcctttctctatttatgacaatgctataagaattattgaatttcatcgagacatttttctgcccttttttatgttcattttcttctttagctactcattctttctcaaatttcatctcaatagttttttttatagttgaatgtgtttgttaactgtttcatttgtccttagtctttctttccgtacatgccttttatcgtacacatctttactcaccacttaataatctctagatctcaaaatttatggctcttaatttctttttcaaatctaagaaatatgcatttttttttaactttaagtcaaactttaatctttcttcactcgacatatagacttatgacataagtaggacaaaaaaaaatatttttaagaattgaaaattcaattggtttgtataagaattcttcttttggaatcttaaaatcaataaaaaaaatgaaaatagatgaattatatgataggttgtattgacaatctttgcctagaaatttttggtaatacaacatcaaatctcatacacctagtgtgttgttctaagagtgtttttttttttttttttttttttatcaaaaacgaaatatatattaataatagtaaagtttaagggaaggatgaggggtctttcccacaaaatacaaaacataatcaaagtaagattaggcttttccactatacaaggagaactacatataaagacatgtgcagaatatctcaaaaaccaaaatcaaactctctcattgttttccaccccttgtgactcacaaatggaaagccaactaagttgaataacattaagtggaactcctataaaagtgatagtacaagaggctcaaaaggaggagtagaagtgaagatcccacaatatccttttcgatttgtattcttccccaaaaatcctagcatttctctcttactacacaatccacaatacaatgaggtaagtgatttgtcaaagagtcttgcctctgattgaatttcccaatcctttaaatgagataatcatcatatctccagtactcctaggccgaacttgatccatattagctacattgaagagcttatgccaaagctccaatgttattggccaatgtagaaaaagatggtcaattgattctccactttctttgcataatcttcttagctgtagcattttattgttatttactttcttgtgcatcactaaccaagtaaaggcctgacctttgaaggggctttgattttcaaacaaaattagccagaaggaatgggattggatttgaggaattgcacaagaccatgaaaaaagattttactgagaataaaccaaagggagataaataccaagatcttgaatctatgataaaaagagacaaatgcactgaagtgagcaaagacatgagtctttcaagaagtacaattttgaaatcaatttgcaacgaaggttaaaattccaagaagacggataggaattaccaaggacaattgaaatgagaagatctctcactgaaacaactctataaagatctcaaaatcgtgaacacaaaggttgaccttcccaccataaattttcctagaattggattctcttcccaaaatcaaatcctttacatatgaaatatcaagtgatatcagattttctgctatacttcgtaaacttcttgttgctatactcaagtccattatccaatttaaaatattttatttttcttccagtttggtttaaatcttcttttattgcataaatatgttagagacctcttatttatgcttcataaaataaacacattatttttttgaatagtcatcaatgacgcaaataaaataaccaatagaaggaactaagacaagattccaaacatcaaaataaacataattaatactaactaagctcgtataaaacgctaacttaaaactgatgttgcgctacttcttgtgtacacaattcacggaagtccaattttcaaactttttaatagatttctcttatgtaattccacaatgctttgttcacttaaatgtccaagacatatgtgatataattttgcatcaattaaatctaactttgttgttatggagagtgtaactctacctacagtagttatgcccactaaattatataaattttcaatcttctaacttttcgtaattactaatgctcctttaactaccttcaacttttcacctctagcatgtagcagcatcccaaagcaaaaaatgctctaagagaaatcaagttcttattcaaattaggaatgtgtctaacatccatgaaaagtctcaccgctccattgaacattctaaattttattgttcctatttcaacaaccttatataatgcatcatggcctatcaaaatagtcccacaattatgtgattcataaatgtcaaactagtccctatgaaagcatatatggtaggagtaagctgaattcacaatcccagtattttgaagaagatttttacctattaaaaccatcaacgaatttgttctttacctccttcatctttaacttcaacaatactggttgcaactgtaagattcttctgattctttcttctcagtctcttctcagaattttgcaaaattttatgatgtctcttttggcaatagtgaaattctatggcttgatgcgagtgttattgtgaccagaaattatttccatttaatgatcttcctctctgacaacctcttcccttttttctttcaccaagtaatctccttactattctccacaaaaagttttgttctttttttcgtattacagtaatgcaccaataacatgatccaatttcaaagtttactttctgtccaactacaaggtcactttgcccttttattcaaacattacccattgcaacagtttcaaagttagtctgttgaaagtattcaagtgatgcagtagatttgcattttgtgccatatgtagaccatacaactccttcacatatggcttgtttgacttcatcggttaagttcatattgtttattacctcatcagagggatttagatggatcgcactatcagacttcccatgcatctcttcaaacatctcatttatcatatattcaggcttcttcaatttgtactgcaatgccttgtgttcctggttgaatgagcaggtccatcatttgatgttgttatagagaattatacccagaaaatttttctatctcctacttagtactggacattgaaggttgtagagatggattctcctttggatgttatgatattccaaatgacggaaccacaaatccatgtgtcaatagcaatgtagacattttgtaatatggcagtcctactttgttgaaattatgtacaattactagttactaaactcaatttaggattgcacaattttttggctagtacattattcaagcaaaagtagatggtagtagaaaaaccaataagaaaagttatggcactagtaaccattggagaaactgattaacagaattttttattttttattttattttttttatttggttctattccatgatgcataataaagaaactagtgataaatctaagaattctttttcatatttgaacacatccatcatagttagtttaacattttgtaacaaagtaaaggtggctgtatttttcctggataattattctgctttcccattcttcatgatcaacatttataaaatgtcaagcatttttttcacttttcttctctgtgcttgattattatgcatttcataggtcttcaacaacttctctatcat

SEQ ID NO: 10783 - DNA, 2472 bp, Vitis vinifera
  Intron number 6 from transcript GSVIVT01026731001 (locus G SVIVG01026731001) derived from phytozome v7.0 (chr-ID chr1 5; pos 5754724 to 5757195 reverse strand)
gaacaggtatgaatggagtaattcccctaactaattctttttactcctaatatcatcgtttccttggctattctataaatatagtaaatactactttaatcttatttgtcttaaaggttatttggggttattctacttaaaatgtctttatctttaacattttttttaataacatttccctcataaacatttttaaaaagaatcacttcatgtttggatataaactaaaaaaaaatgttttcatagtattgttttatataacagcaaaatgattttttttttatgaagttattgtctaggaatcatcacttcatattttttaccacttttaaaattttgtcaaacacctaatttttataagaaatgttttcaagcattaagaagtattattaacacctttcaaaatcactcccaacaaaattcttaatttattttgtatgaagaaaagactcaaaacaagcctatagaattttcattttattcaagtctaaaagaacatgtttaatttcttaatataagcaaactgtcttgatattgtttgttgccttggtgacatcatcactctttcatattttgatttcttaacatgtttaagaagtcatgaggctttcttgtgacttgagaagtaaaaagtgtctaccaaaaagttcatagatatatatatacacacacacacattagttaattcaggtgcaaaactacaaagagaaacaagcattatagttgaagctagaggttaggatatcaagttagaatagttagataaaaaaatttgatacttaaggtttcatttagatacactttctttatttatttgtttttcaagaaaaagataatagcacattctatataaaatataggaactcttatacaaaaagtatgaacttactttatgttctttaaaattttaaaatttgagaaagcaaaatttttttaatacctcaattttttagaaactattatcctttcaaggtaattctttaaaaattgttacatcttatatgggagatactattattttttaaacaacacattgattatttaagaaatattggaaggttcaagttattgtgttttggcaaaaaattttgaaggtccaagttggtgcaacaactataaagtacttgtcaaaaagtttatgtatgtatgtttaaccaaatccaaaggtagagagcaaggagtccagtattgtgattaaaaaactaatttagaatagacataagagctaatcttgtatttaacttggttaaataatcaagttagaataatttgagcaagaaatgtgataagttcattgaataaccacattagctttgataaaaagatgtcttacaagttagaattgttctagaattggggtttgagccctactttagcaagctagaaaattcaacaaaatcttttttaacttttatttgctaagctagagtttgggggagaggcctaagttatcatcacatgtttgaagatatatgattcttgaattttcaaaattgtttgagatttaatatatatttgaactactatgagatattgaatggggatatttacctattatggacaatgttctcattttcttttggtttgtagattaagaagtctaattgaataaaaaataaataataaaaaatcttgctaaaacctaaagagtgaaggatattgtgttgggtttagtaaagtatcaatttagctagtcccaaatagcaaaaataaaaagaaaaaaggaaatctgtcctatttccatttcaatctaaaaaattattttttgatagtgcaaacatcatttaagggaagaaggtaatgtaagaattctcaattgtgtagtcttttatcatctttgattttgtcaacaaaaacatagagcatttagaaaaaaataatttaaatggtcatgtaatgacctcatcccatcctaagcttagagattaactctaatatcttttgtgacaatttgttcttgttatgtaaatattatccactttggtcctaatgagctctcacaccattaaaaatcatctatctagttaagagaaatccaccataaagttatagaaactttttctatctaatataggatattactagtcatgacaatatttttcctttttttaaaagttaaaggtagacaattatttgaagttctacaccaagattctacatagagggtctcatttttatatagaagaactagttaatacttaaggcaatttataatctttatcaatattgttacctaaatgtaacctaagaatatgcattaaataaataatatcactttcaaagaacacaaggataatatgaagcattagtttgatctagcattctatgattcaccctccaatccaaattaattttcgtcctaattatgttaaccttcatcattgtaattttcatctttcctacctaatatgagtctctttgttggcaaaatgcttagggttataaagaggaagattctgaaaaattggattc

SEQ ID NO: 10784 - DNA, 12686 bp, Vitis vinifera
  Intron number 1 from transcript GSVIVT01021626001 (locus G SVIVG01021626001) derived from phytozome v7.0 (chr-ID chr1 0; pos 8352607 to 8365292)
gatcttgattccctcaagcaattgcagctcctcatgtacattctccctatccctctttctgaatacagtcctgtttcgagattgtatgatattatgttctgaaattgggatttgaatttgtggattattaagagtagaagatatgtacagaggaaatgaaacgatgcttttcaattgcttttagatttcattttagctaattgagatgtgatgctgattgtgcttttcgctcttaaggttttaatttacccataaaaagtttattgttttggttgctgcgaggatagaggttgtggaaagtattctagctgaatttagggaaggattttttttaaaaaaattttaaattgtacatttaattttttttgttttaattgcactttttttttccttttttttttaattaaattatatttgaatcactggagattgtgtgcagattgcgtgcccactagttttttcttttaaggaaaattttgctgcatcaaatattcgtttggagaatatgtcctacaattttttgttgttgttgttgttgttgttgtgatatatgcttttgataggcaaaataataatatattaatatattaatttgcttgtataaaaggggttgtataaaaggagaatatgatctcagcctaaagggagaaaaacatcctgctcactaaccttgggctaaggccttttgggtccaagagttctataaaagaatcttctgcctgccaaaaaaatctaccttaccaatcaaacaatgaattaggtgggaattttagttgcgactttgattgctcttgaccttcaaaggtttattgggtagaataattttattgtagatgaagtaaagtacgacttattagaaaatgcaatttgtttttccttgtttggatgttgggcaaggaaaaaggaggtttgagtgaaaataaaatgaatgggttgtatgtttgtgtgtttgtatgtacaatgcaccaactttagaagaacgaaactgaaagagaagacttcaggagttgcatttgtttgcatgattagatacataaacggaaaacttccttgattttgtttgaaaattgactcttatgaagtttggattatgctgccataaaaggaatatgtatttgaggacaatttggaaattttattgaaagaagtgatgtagtaattgcttatcaaaaaggaaaaaaagaactaagaaaagaaaatttatggtttctgttggcctcattcttttctttcaggtgaacaaatctgaggaccaagttctctgaataagcaatatcacagagagtgttttgcgaagatgcattttccagcttagccccacatctgattattctaatggtatcttacagcatcctatcttgaggagtggaaaaggaataagaaaagtgaataggatgaagccgccggtaactttgaaaaattctatgttaagaagagaaattcttcagaaagtgcttttaatagagcagtacacaataagaagttgcagttcttgtcaaagttttcatgcttcttggctgacacctcctttatgtattatgtttctagatgcaaacctagtgtgtagatctacaaagttggctcaagagatacttttcatatggacaccacctctagtgggttttgacaaattaaattttgttgaatgctccttaagtaacctaggataactagattgaaggcaaatccatggatcattatagtacagtggttagagcattctcaaaacctactagagaaggtttagccattaagggtgagatttttagctttttagccttgtagagggcttgctatgggtcctttcaatcttctagtggaggaagattctgttgttgtcttgccttgggtggttgaggaataaagaggatcattttttttttgataggcaaaagcagaaatatattagaaaagggcaccaagaggaaaacccaaaagcatacagggagtatacaaaaggacccttaaggcacacccaagggaagagaaaaaacaaacccgacccttatctagcgcctagccaatcaagaaaactaggtaaagagagaggaccttcatttacaattgattttgtccacacccaaagattacaaacaaaagaatttttcaacctatgaaccgaaaagtcctcattatcgaaagcaatcttgtttctttccatccaaaccgcccaaaagaggcacaacggggctgccttccacacctttctatgcttcttgcccaacataaagcccctccattcaacaagggtctctctagccgaagatggaaggacccaacacactccaaaaagggcgaacaataaatcccataaatctcttgccttggagcaatgtataagaatatgatcaattgactcctcttcctcacagcacagaaaacatctgttagcaacagcccaccccctctttttaagctgatccatagtaagcaccttaccccaagaagcctcccaagcaaagaaacacactttggaaggcacactagggttccatatcaaaccatgagggaaaagaccagctcttcttgaagatagatcattatagagtgatttacctgaaaaactcccattcgaagtcactttccacatcattctatcttccataaaaggactaagtcttgcacctcggattgtcaaatgaagcctctccacctcctccacctcccaatcattgaagggcctagaaaatctaggactccaaaccccttccactcccgaagtgtcccaaaactcctctacccaagcctccttagaggaagcaaaagcatacaaggagggaaaagaattgcataaggggaagttcccccaccataaatctttccaaaattttacccttctaccattccccactagaaaagcgactttattttgcataagggcaccttccttccttatttccttccaaaatcctactccataactctccctaacatctctagaactccaaccctcttcttcctccccgaacttcctactaatgacatgcctccaaaaattctctctttcaatcgcaaaacgtcaattccacttgcaaagaagggccctattaaggatggaaaggcgtctaactcccaaacccccctaccttttatccatgcaaacggtatcccaattaactaagtgaggcttcctctccaaagcaccccttccccacaagaaatccctttgaattttctccaaccttagactaaccactcttggcattcgaagtaaagacatcaagtatataggcatacttgacaatgtactccgaattagagtaattctccctcctttggaaataaattgcctcttccataaggccaaccgtttccgaaatctctcttccaccccatcccaaacagccacagacttgtggttcgcccccaaagggatccccaaataagaagaagacagcctacccactttacagccagcctcaagagccaaattctccaaattctccactctaccaatcggtaaaatttcgcttttgtccaagttgattctcaaacctgatatggcttcaaaccacatcaacaaccagcttaagtggaccatctgatcttcagaagcttcacaaaacactaacgtgtcgtcaataaacaacaaatgagagactaaagccccattcccaccccttccatcaaccctacagcctgataggaaccctccccccactgctctatggatcagcctgctaagggcctccattcctatcacaaaaaggtaaggggatagggggtccccctgacgcagcccccttgaactgttgaagtagccttccggggtgccattgatcaatactgagaacgttgttgtagagatgcaccaggatatccacccaatccacttctccccaaatcccatgctttgcaatacaaaaagcagaaaattccagtttatgtgatcgtatgccttctctaaatccaatttacataacaccccactctcgttttgtttcaacagagaatctattgcctcattggcaataagggcagcatcaagaatctgtcttccttcaacaaaggcgttttgagctgaagacaccactttgcccactaccttcttaagtctgttggctaacacttttgccaacagtttatacaaaccgcccaccaaactgatcggtctgaagtctctaaggtccttggcaccaggtttttttgggattaggaccaggaaggtcgaatttaggctcctaacgaatctgccgcgctcatgaaaatctaacaaaaaacccataatctcttctttggcaacatcctagcaaaattgccaaaacctaatggggaagccgtctggacccggagccttgtccccgttcaggtctgaaagagccttgaggacctcttcctctgaaaaaacctcctccagtctagctgcatcctcatctccaattctattaaagtccagaccttccattgaagggtgccagcccccccgggtcagtcaactggtccttgaaagctctaaccacacccctctttatctcctgctcctttgttaaccatactccgtcaactttgatatgtagctttgccaattttttttatatttctttagagttggttgttacttttgtcgagtgtctcacttaggcaatcatgtggtgaatttaatagcaaaatgggggatcaagaagggtttattttgttttgttttgtgtcttttttttttttttttaagatcttctacgcctgtgagtagtcttgagtgatgtttggattgataacgtaaccacctttagttttgcaattattttttgcattctagggcaatatagacttaattggtatttggtaaaacttagttacttattgcttaatgacttaagttaactttaagttgaattattcttaagttgttgaattaaaatttattacttaatttttattttaagtattaaggttgtttggtaaagttaatttaaggtttattctaaatcatcaaagtaacatatttaccctcattaattttaactaatatttatactttcatcaatcttaagcagcaaatttattttttaaacatccatatttaaaatattatagatacattagataactacaaaaatatttactataaaagaagatttgtaaatgtgaagtcatagttggaaaatatactttcactaaacatggtaaatgaggttaagatatttgagattaagaataagttaactattttgacttactacttaaagttatttttgactttaagttgtgatgttaagttattttaccaaatatgcttaatctacttaatgacttaaattaagtcattaagttgatttaccaaacatcctcttacttttattattttttattaggtcctaaactattgattatgcacttgggaaaggacatctatttattttttgtacttgcttatttcttagcaatgaaatgttttttgttcctattaaaaagaaaagaaaaaaaaatcgatgctcagttgtaatatcactacaggattttgtagaattgaagagctatatgtagggtattagtttgtgctgaagagaagtagccaaagcttgtagaattgaagaactatatttagggtattagtttgtgttgaagagaagtagctaaaacttgtatttcttttacgagtcacacagacaagggaagttgtatttaatgcctatttggcatggttgcaagagatttcaactgactttgaatagcaagtttaatagaacatgcagttgatacttgataaaaataaataagcaaagtatctaattatttagctttgtaatatggtaatcatgattaatcattgaatatatatgtttctttaaactgtattatgctaaggttcatagatattgattcaataattcaaatgtcaacatgcaaggagattttgcatgatatgatttttagtaatggaagttgtcttccaaaatatggatgaaatgtatatttttttttaaatagacatatttttgttgcaagtttataaaagaaacatattagcagtggaggtggacatgtattagttgattattttgcatttagatttttgacttttatttttctgttctagatacaattattgtaaatgttttaaatttccaacttggaactgtaaagagtataataatgaagaaaaaaaataactatctaataagttcccatgtataaaaaagtatgcatacaggtaaataaaggtggactcgtttataaaagtgtccaaataagttagaacatgtatgagacatagatatcatgttagcgggtgttcgttatgctagaaatgccggcataccatagtacttatgaacgagtcgtgataaaactattcatagttgcaaaatatgaatggttttatgctaaagtaactcaaccttctaaatgcttgacttcccgaagccatggcctaagtattactagaatacacctagactaccacctctctatgttcacctaacaaactaagctagtataataaggaggttagtagtcaaaatgctataccaaacatccttgcttattgccacacctcgtactaatttgtattgaggttgtgtgtatagaaggatggaacatggttgaacgcctagaaatgtgaaaaaggttagataactttagaaccctaggaaagtaagaagacttgtaaatatcttgaaatattctagtttgtggttcctaggcttaggcattctaacaagctccaaggaagctaacaaataggaggtggacttatttgatcaaactagtgttgcacctccaatgacccctccaagtcctctcaacctcgtatttgatagccttttagcattataaagtagcctttgtatagtaacgtttttctatcctttcaaactaaggtatgctttgttccttgcacattctagcttctattgagggaatgggtgcttatgactagttaagtgttgcaccattgtttgaaagaaaagtgaggttatgaaaaatggtattaaaacacaataaggagttcttaattagggagagacaaatgttaagcttaggctttctaggagtatttgtgacatgatgaccattgcatataagggattgggaagttccagtagaggtatggtattgtgggagaaatttgttcctcatcatgttcgagacattggatacatcatgatagaataaatgacctggtgatgaggaatttctccatcaatggactctttggttattgaaagggtttagcaaagagtaagatcttgtggtaatcaactattactttgtggtagtcttgacaactaataaagatattccaagaggaggatgtagtgatgatgtttcatggtgttgcataaatgcatagaaggttgagactctagaaaattgaagagcaccctaaaattttaagggaggagatcctggaaagtgtttgaaccttttggaagaaaaaagacttgtaaatatcttggattattgtagaaaggttatgagattggacattttaggaagcttgaaggaagcctataaatagaggaagctttatttagcctagtagcttggacacctcctaggtccttctatggcccctctactttgaatgtgaaacctaagcagtgtgaaacatcttttgtgtaagaatattctttcattccttcaaacttaaattttctcccttatttgctcattctatcctccattaagggaaagattgatttagatcacaatggccctagtcactagctaaatgttgcatagttggcttagagaaaatgaagttgtgacgctattctctattctatggctagctatgtatgcttcgcacttgataattctttatgcatattttaaaagaaattttatttcatgttcatttgtgtaggaatattttgttgatggattgaaatcaagatttccttcaaaacttaagagaagtagtaactagtggagttaaaagtaggaattattggttggtcattccaagtggaaattaaattgatgttgggtttcatatgttatgctacttgatataagcttagaatcttagatcatatggaactttcactttttcactctattccccatcccaccccccttaaatttcagtttactatatgtcataatattttgattttgatttttataagaagccactaattttatctaaaattgagagggagcttcgaaagctggagttcttagcaaagtagatggcataatatgaaaagtggggaaagaagggggaggatacaagaaggggtgggaaatagcttatgtccctctatgagctttaaaattttgttatggaatgttaaaagggggttaatgacagggagaagagaaagataattacttgattagaatgtggaaggttgatttggtttgcttgcaaaagactaaggtgtaggaggtgttggtacaactggtaagaagtcttgatgtggggagatctctagagtggggagtaatggatgcaaagagtttagtggtgattttttaggagaacaaagtgctggagttatgaggaatggagttaggagtattccctgtttcatgtcattttaagagttgtgaggataattttaccaaggtgtttatagggggctattctaacccccttagccaatgttgggggacgtaagaggtttgtgggaagacccttggggtattagagggaattttaacatgattagatatctaagggaaaggaggaagtgtgttgggatgtctactatgcaaagattttcaaagattattaagggtgtaaatatgcacaacctatcattgaatggaagtccttttccttgaggctcaaatgaccaatccatgtctatgttggatcgcttcctagtgtcaaaagagtggaagaatcattttagtgggctcttgcaatgtgtcttgtcaaggttggtttaccatcatttatctattttcttagatgggggaggcataggaaggggaaaaccccctttagattcaagaatatgtggcctaaagcggatggctttaaagacttgattaaaaactggtggttgagctataggtttaggggctctagtagttttgttatggattccaaattgaaaacttaaagaaggacttaaaagcatggaatcataaggtgtttggtagtgtggcaatcaaaaaggtaaaagccttcaattagataggtttttaggatgcaaaggagagggaagctcctttagttgggggagagattgacgctaaaagattggttgtggatgaatttaaaaagtaaactttgctagaacaaatctcttcaggatagaagtcgagagagttatgactaaaggagggagacaaaacatagttctttcacaaaatgacaaatgctcatagaaggagaaacttttagctataataagagtggatgtggtttggttatctggtgaggaggagatcaaggagggggtggctaattcttatcggcacctcttgttgaaaatggagattggagacttagtattagtgggctagcttttgagtttttgaggtgggaggaagctaggactttggagttgtctttctctaaggaggaagtcttctttgctctctcttggattttaatggggacaaagcctcaagtcttgatggatttacgatagccttttggcatctatttaggactttgttaagagtgaagtgttgggtttctctaaggaattctatgcgcaaaggattattgagagaagtttgaatgctactttttttgtcttaatccctaaaaatggtggagtagaatatttgaagggctttaagccaactagttggtggggaacctatacaaaatcttattgaaggtgccaacaaataggctttggaaagtggtgggtagggtggccttttactctcaaaatgcctttgtagaagggggacaaattttagatgctgcccttgttgcaaataaggttgttgattcaaggttgaagagtggttcttatggtgttctatgtaaactcgacattgagaaggtctatgatcatgtcaattgtagcttcttgttggtggtttggagaaaatggttttggtcaaaagtggattgggtggattaaatggtgaatttctacaacaaagtgcattgatactcctactagctttgtcaatagctccagaggattaaggcaagggacacgttttctcctcatttatttcttaattcaatggaggctcttagctatctttcttaagagagttaggaaggaaggtttcattgtaggttttagggtgggaggtggaggtagctagagggtggaaatgtcccacctattgtttgctcccagttgggagtgttcctaatgtgaaggagttggtggatattttggaggtgtagagtggagttgcttccatccaagaatcttggtctccctttgggtgttgccttcaaatcgataacagtttgggacatggtgaaagagaggttcaagagaagacttgcaatgtggaataggtaatacctgctaaaaagggggcttctgactctaattaaaagcaccttatctagtctttccatttatttcatgtcctttttttaatatttcaagaaaaatgggtttgagactagaaaaaattcaaatggatttccctatagggagaggaattcttgaaaaaaaaagcttcacttggtgaattagtcaaaaataagtttgtaaaaggagggttgggattcatcatctttttgtcttgaactaggctctcctaagcaagtggtactgaaggtttatgtcagaaagggagtccttttggaagcaggttattataggaaaatttggggaagatgaaaggggttggtgtgctttagaggcaaggaaacggtatggtgtagggttgtggaaggcaataaggaaagggtggggagctttcaaaagtaagatttgttttattaagggcaatggaaggagggtaaaattttggaaggacacatgatgttcgaacacgtctttaaagatctctttcccatttttgtttactatagctacctcaaaggatgcttgggtagtagacgtatgggagcaaatcggtgatggggggcattggaattcatgtttttcatgaaatctccatgattgggaggcaaattgtgttgaaacattctttttgagattgcaaggaaaattaatgagaaggaatgttgagagagcaatgcagatggccatgaagtgaggtagcctttcagttaaatccttctattttgggatggtacaaggagagattagagtctttttgtggggatgttatttggaattcatgggctccaacaaaagtgagtttttttgtatgagaagcaattagaagggataataattacagaaattttaatgatgaagttttgaactttggtgaatagatgttttgtgtaaaacagaagaggaatctagtgcccatcctccttcattgttcctaggcaagaacgttatgtcagcaggtcttctccttatttggaattgtataggtgttgcattccacaattaaaacaacattattaggctgacatggacatttcgtctggaagaagaggaagaaaacatggaaagttgctcatttgtatttgttttagactatttagaaaaagggaagtagaagggcttttgatgatgtattgggttatcagatcaaaagcttaaatcctcgtttatgtgcaattttttagagtgggtcaaaggaagcttggaggatgggtttgtgtctatagtagattttgtctattggttaggctacaaataaagggaggggtatttttcgttttctctcctcattctatgcttcatagcacatttgtatacctcctatgtactttgtgctgaccttttttgtgcttattaatgtatatttctcttttacctttataaaaaaataattttattttatattatttttcaatgggaaaaaccagaaattttaacaaaggatgaaataattacagaaagtggacttgaagaatgaggagttctccaaacaagaaagaaattatacaaaaagtaaagaaggcatataaaatcaagatcaaaaccaaacgccccaacttctataaacaagccgaaaagctgggaagcataatctctcccaaagatttaggattcaccatcccatgtttggttcaaagtgtacatccttattagcctctctaggaataaaatctcccattcttttccacttcttttcttcttctactaagtcttttcattcattttttggctgtttggaagcttgaaactcttcatcaacagttcagtgcaagttgctcaatttgcagagatttgtattgcaattacatgaaatttaattctttaatttctgcattcccagcctttcctatctattgtttgctttccacatgtttgtggtggttttcttgtattttctacaattttgttgcactctagggattcctttgcataattcttatgtttgtcatttagttaagttgaaaaaattaatcactttgcttttgaaagtaattttctgtataatatgcttgggtaagaatttgatttccatacagttttgtgactgttaatagatgatgttgcatgtaactgaatgttagtttcagatttataaagctcttcaaaatacaatgggacatttgataactctatcgttacattactactctgcaaattgctttgggattagttgcttatttgagtttgctacatcaaattggtaattcatctgttttctaatattttaatccttttgtgctccaatttgcagattgggaaggttgcaggacagta

SEQ ID NO: 10785 - DNA, 2976 bp, Vitis vinifera
  Intron number 1 from transcript GSVIVT01037377001 (locus G SVIVG01037377001) derived from phytozome v7.0 (chr-ID chr6 ; pos 14759108 to 14762083 reverse strand)
ggagcctcttctttacttgttgatcactgagaaaggttttttttcttttttgttctttcaattgtcttttttgcgttaatttttcattgggttgtgtttggttgttaggaaagtggaggaaaaaggagcaaaggtgaactatcttcctattttcacttttgctaatttttccacagagatggtttgtttgggtgttaaagaactgttgaaaaagaattttagttatttgtaatcggggaaaacggtggtttgccaaattttcgcagcaagcgtaaaatgttgattttgatttctggaacattttgcgaaaagaaattagttcgttctctcatatgtcaattcttaatccgggaaaaagaaaaaagggtcaagatttttgttttttccttcattttctcagcaaccaaactgaacacaatgttgagtttggttgggaattttttctgtattgatttacgaatggtgattgattagtgatggtggatgtttgattttaaaatgtgaatattgcttgaaatggagttggaaaatcattgttatgcattgtaatttttcatatttgtttatttgttggtctccatatactttgtgtgtatatattttttaggaatttgctgcatcagctataaatttagaattttaggtatcatggattcaagttgttgttgagatttggacattgtatggatgttgaaccttaatgaataagtctcaggttttcatttttggttgatctagctttaattgtaattagaagtgtttatagtttgacttaagctagtttttaatttgattttttctttttctcaaagattcaggtttgatcttgttttagatttttttttctttttctcaaaaattcacatatataagggctataagaatcctattgtggaagcttcttttagggtaaactgatagaattgtattaaagtaaaacaagaaggggatgagctcatatgtacaatgaggtatcttagctgtgccaaatgcttgaaaagacttgatgatgttgtggaagtttctttcagggtaaactgatagaattgtattaaggtaaaacaagaaggggatgagctcatacgtacaatgaggtatcttagcagtgccaaaaacttgaaagacttgatgatgaactgtgaacacaatctccttgaattccttctttaatcctatctaccatatctatattgatttttttatgtatatcctgtaatctttgccttgcaatctcagactcctgaaaaaataaaataaaaaaactaattctcctaccttccatatattttcaattgtgcaaagcagagacatgccccattcctggcctctagaaaggtcagatccaatttctatgaaccaagtgatcagttgccaaaatcttgtaataaacagatgcctgagaaaatgagttcttccttctaggtaatctaaataattctgcatttttaaaaggggtctcagttccacaaatatcagattgatatggttgttcctttcccacacataaaaaaaaacctttttatttaaactttttatttttttattttatgagattctactttcttctattttcctgaatattttgttttatgtgaacttgttttgttgctttgggacatattctttgtcctcctttttttttcactatctttttcatacttgggtcatcagggcattattcttagttatccacaatgatttaatacacaagttccattttcttttttcactttatactggacccagacgtcttttatgcactctgttaaggtatctgaaacttgattcaatttgcacatgttcctcatccataatatatgtcccctagaatatattccaatattcagaaatcatggggcctgcttggtttggaaaataagacctgtgttcggttgttaagaaagttgaaaatagatagtcctatagtagaacatgtttggctggttattttgtggaatgcattttcagaaataactaatgagaggccattttctaagaatgaatggaagtcattttcaagaattttttaaaaacttttatttcaaaggaaggcatcacatggaaaatggttttctatttgattgcatattgttaacatttataattcgaaaacaaagagtggttgccccttacaactgatttgagccctagaaaggagagtcttcctcctttgattatctcgcccgattgtaattcaattaggtgagtttcttgtctgttttttctcgtaaaaattgaagtattttcagtggatttgggtgttttattatgatattacccagtgcctaattctgaattgtgactgaatagtttacctgattaaggataaaccttttaggatgaaggatgagttacttagatgaattgattatgtgttaattaaatagaatatgtatatgtagaagcatatacaaatcaagattttgtgtgacatgaagttaaaatgtcggggttgaacaatcccaatcaaagctcggggttgttatcaccacattgttccttataattataatcaggctgtgtttgttggagtcaaaactaattgatttggattttcatttcttttgagttaaaattcctttattttaccatggaaataatcttcatggtttcagggtctgtgtaatttaagttcaaaattccaaatcaattagtgtgtagaggaaccaaacattggatatgaaattgggtcctccaattaccattccaagtccttgatcctgcagcctaatgtaaccttagagtttttatatttaggtccgagaagatttctattgctgctatttgtggtggtaaatttagatttactgagcactataggcttcacctttaatttggattttttcattcagctttaatttaggtcattccattcttttagtgtataatttttataatttaattatttggcaatcattgacctctaagttcttgggtgcagaaaaaactgtttgaaggataacattcttgagtcct

SEQ ID NO: 10786 - DNA, 8420 bp, Vitis vinifera
  Intron number 1 from transcript GSVIVT01014364001 (locus G SVIVG01014364001) derived from phytozome v7.0 (chr-ID chr1 9; pos 3038866 to 3047285)
tctctaggagtactactcaaaatttggtcacatatgtttgttcatataaattaggagtcaaatcttactttatcataataacatggagcaaaaccttggtgagtcaatgccttggtattaaaatcgatgattggatgatttagtgtctctgtgaatttgatataaagtcattgttgttcaccaaaagaaaagggtctaagagttttgagattaatttcattcaagttgacatatattaggacctctctttggcaaaatttgaattttggcctgagctattggagggcttctacttagtagtagtgtttaatggaaagatggttctacttctcaggggcatgaggaaagaagcattcaaaaagactaatgtcacccttagtttttacaatgtcatatccattactaagaaggaacacatttttgtaaagaagttgtatgacactaaggctcaatttcgagacaatgaccaaaattataatatatcaattgagtgtgacaaaattggtgcaaacaacccttgcctcgccatctacatagatagtaagatggtaatgcaagtgaaacacctctgataaaaatttatgggaaatcagaccatcttgattgataggctcatggtagaagttttttgagatgtccataattgattgtttggtctaactattggaaatacaattttcatattccaaacttgttactcatctaagaagttgtttgactttttgttatcatttttaattttttgtaataatgaatctcatggtcttggttatttattcatgtatgttagctgtattttatgtagcaaaatgctcaagcaagatgaattaagcatgacaagaaatggaaccaatttaaattgctagagaatgacattcttattaattatggtaatgtagttggacattgtgatatatgtagttaaacatgttgacatatgtagttggacatttgaaatatgtagttggacaatttgatatatgttaatataaatttaaatgtagcttcacgatagcaggtttctaattgaatgacaaagttattataaagttatcaataatattactatggactttctaagcaatgtggacatacttgaaagttgtgtatattctaaacctatcaaacttaatatggatttaacaggtatcaagttgattttgtataaaatcattgaaagttatgtccacaattgacaatttaaatttaacttaattgtcttcaagttgtttggtgcataaatttgaaggtaattaaatccaccgtattcacaaaatactttaacgtaactactatcaagttaattatgaacaaacttaaaagttgttaagtctatgtctattccaaagtatcgtatttaatctgaacttaacaagtatcaagttgattttgtatagactcatatgaagttgtctatagttgacattttaacctgaatttaactattgtcaagttattttgtgtgcaaacttgaaggtagataagtccacaatcttcacaaaatacctaaacataactactatcaagttaactatgaataaacttgaaagatgttaaattcaagtttattccatagttatcatatttaattttaacttaataggtatcgaatttattttgtatagatgtattggcatcgactctatttgatcatttcctttttttaactccatttttcatggttgtaaatgatatttaaaaattttaaaattttcgaacttatttaaatatttattacatctcattaaaggtttgaaaatattcaataaataaaaaatgaaagaaaaatatatgaaaaaaaaataataaacatacattatttatccaactataactttaagcactataaactaaagaaatttgaagagaatttgtgtgttaaatttgaaaaaacataatgaaaaagagagaaatcagactaaccaaagaaaatagttcgacggaaaatgtgttgaaaaaaaggtacatttttcaaaaagagaaaatatgctgaaaaagaataaaaaaggtgacgggggaagtaatagtttggagggaaaatgggtagggctaggggtatttttgtctgaaacgggtcacttttgagattattaaaagtaggaggttacttttgcaattataagggaattttgtcccttttaaacggttatccctctatagtgttaccctcttctacctctgaactctctgctcccaattccatcactgcctctgcctgtggggtttgtgggtttggttttgggtatttgaatctgggctttttgtgtcgaaggtgattggaggagaaatgtgggagttgggagatgataatgtgagagagatataagatgggttttgtcctttcaagggaatgaccttttcctttctgtgattttgaattgttcttagttaaaaaaatataaaaaccctgatctttttttttatttggagaagctcgtggggtgccatttggaggagaagggagtgttggaagtggctgaattgattggaaaatgtcatgccagtttccgctctccattttctgaagacatgtaaaataagttcattctaggttgaatttcagggcgattgcagttttgaagttttagcggtttttggggaaatgacgaaagaagagtgatattttcaggttaattcaacgacccatttaccctctcttgtcattttcttggtctctccaagttctttcttttggggcatggacactaagagccacggggctggattctcgccctttgtacgtgaatactgggctagaaaatttatatttccgttttctttgacacggtcatgctttacgaattgaggtcagcaattccggctcataaccacattggaaaaatcttgagtttggtccttggacaggggttttggaattgaacttcaattgtagattacgctctgcaattaggagtgtttggaatggaagaaaatgaaaaagaaacacgatctttggccttaacgccaacatggtctgtgacacttgtcttgacaatctttgttgctgtttcgttgcttatggagcgctcaatccaccgcctaagtaatttaagtggcattcagcagatatgctgaaatttttcttatgccttaaaatgagacatttttatttttattttattttatctctcaccaatattatataagaaaaataaattgatgagaggcttctttactaggattggaaatcattatttcagaatgattctttttcatatttatactgtttttttttttctttttctttctgaagaggggaggggtgatttgcaagtaattcctctcattttcaaatatcatgtgattctgaagatgatattaattttttctattacttgttgctaggtgcccattagtctatctcttatttgcctatcaaaaaaaaaaaaaatgaccttcctattactttttgattgatattagcaggattgtaatggacctaatggctacttggtatctaaattttatgttataactttggtaagtccatgctctttataatatgatatgtagtaccatgcatatactctattgcattgctttcatgtgtcctggttcatatgatttttctgaatgtttatgctttgtatcttcactcatatggcataacagaatcatgttggggcccatggaatcaatgatcgagactgataattagaatctttaatatattccttctacggacattgtgaaagggattttttatcagtcagatttatagaattctagaatatggttcttgttcctttctgcattgttcttgtttgatcttgtgtgccttttataattgttaaataaaggtgtaaaaaatcgaaactaggattaagatattaagaaatgaagcttatttataaatgaaggtacatattaaccaatattaactaacagtcttattatttagaaaggattttaagttaattttttcaaacaattttaatacttaaaaataatttaatttaaaatcaatttaagtcattgaaagaatatgttttattaaatatttagaaatttttgtttttttatataagagtttatgctttatgttattggtgagaaaagaaagagaaaatttgttcaatttggatgtcacttgttttacatgtttagccatcagctgcttggtcaccaagaaaatgtaggaaatgggaaagaatttaattctgaatcctagtgtcatttataatgcggtatatcttagttatgctgtatattatcagcaggaaaatggggaaaaataaaggaactgaaatattggttgtgttgtatttcttacttcatttcattgcagagaaaatgtaggaagatttactttgttgttatttgttatatttttaatcatgttttgtttggttatcatggacatgtaggaaaagaaatttcttgaatctctagtgtttgctgtcttgtaaattttaattgtagtctgtttttgtttctcagaaaatgttgcaaaacaaggaaaatttattgaaccagtattcttattcgttcttttcttttcaatgagaacttcttagtttctaggaaaatgtaggaaaggaatagaaatgtcttggatttgattttgctgtttgtcttgttggttttctgtaaattatattctgtttgattgctgagaagaattaggataaggaattcaaatttcggggttttgcattctttgggacatgaggagttaaaaatccttagtcatgtgagcaaataaaacagaactggttggattaacagagctgaacccttaatttgccttttgagattaaatttgtagttatctttaaaagaaaaatcgaattgagctttcgttattttaatcccaaaataatggacagcttaagttttagaaatttatagtccatagtttcctccaaaaccaaatggggaggtagggtggtttcaaattcttgtctttccccatctgctgtagtttcaaattgatagctaatgctatcccataaatgtaagaattgaactccgatcagctcggtcaatgagaattgattgtcattctttctgtttccttctgaatttggggatgtgatctggggttccctttaactgattgaggcaatgccttaagttagagtctcttcaacatttctcattttctggatggtattggtaatttggtaggcaatactttttagaggaaggctttgttgataccaaattatgttttaattggatgtggaattattcatttttaattgttttctaacattttttttttcccttttaatatgattgcaaactccagtcttttaaggagccctttcaggttgaagtatgttttacctgtaaatttagtgaaaatgctctgagcgtgttggtctgctctctctctctctctcacacacatctgcttacattcctcttgttatcttggcactctgatgtgtgtggagaacatgttgaacaaaatatgtcatgggtttagttgtgacatatgtgtcaggacgcatgtctgagaggagtttctgacaaagataagaagatgtttatggttcatgaagagttccattggatgtcttcatcctctgtttctctgttacaagtatatttctaaatgagtgtagtgcatgtctagtaagctaatttacttgtaatatttgagcctgaggtagttgatatagagaaattaacatctttgtagtttagccatgacccaattgttgaagaagctgatgtgtaggctgtaaatatgcaggttgatagttctttcctaattatattcttgctataaatatgcaggctaatatgtaggccaataattttcttagaatagtggccagactaatttgatagttttctagaataatttcatagagctttatatatatccctattgtaatcttagtatttgtatgaataaaatttaaatttctccgcatggtattagagctggttagagttatgctctaagggtgtttttttccctttttattggctagggggagtggtgtgggctattctatggtagaatctggtggccttcatcgccctcttactcttccttcattctgaagactttcttttcttatctttgatctgctttatctagattttccctttgaaaaacttggcctcaattgcctagtatctctctcagatttctagtttttgttacccagaaattttttactacaacctatggcattaatattttaacttccttttctgtagtccttgctgttgtttatcaccttgtccaaactcatgatcaatttatcttcttcccaaaccacagtcagtcagtgacccttacttttcctactgaaaatattcccaaatcacaacctgcaaactcaatggccacacttttcttagatggtcaaaatctgcctagttattcattaaaagcaaaaagaagatgggcgatttgttagagaaagttcccattcctaaggatgatgatcctaagtttgagacttgggaagctgaaaattccatgatcatgccttggttgcttcattctatacaaccagaaatcagcaaaccacttcccttcctttcaacgactaaggagatttgggaagctatgactcattcatattcaaaggtggggataaaggctcaagtttatgacttaaagaattaaatttactgtatgaagcaatagttgttatctgtgacggagtatcatgatatgctagaaggcttatgactagaactggaccactatcaacaattcataatggaatctgttgctgttcaactgcagaagttgattgaagaagacaagaattttgcgttcctggctggtttaaatcctgaactagatcaagggttcgagttctaggaaaagaaccttttccctcaatgaaagaagctctgcctatgtacatgcagaagagagttgttggattgtgatgttgggaaaaccatacattgagaatttggctcttgcaattcccaaatccaataattattatacaactgagaagtaaggagaaggagatcgaatgattgaatgaaaatagcactaggtggtgtgagttttgtaccaaacctaaacatacacaagagacttatcggaagattcatggaaagccctcttccatcgggaaaaatgatggaaaacaagagcaggctggccagagacaaaatcaggtttttttttagtggataacaaggaagaaacttctatgggtggtcaagagtttggaggatctgatgaggaggaactaccagaaaaattaaagtgcttactagaccaaatgaacacttccatgtctatgtgctcctatggtcaacaaggtgatatctctaaagaccagttggtcagggcgaacattcggaagtgtgttctcagtaagtggcacatggtcttgggtttaaatcctgtcactaatgataccctgaatttacccggtgctggttgttgtggggtggtcaacactcttgagttttgggtcctcatagagagtcctaagggcatgaccatgaaaggttcttcagttatccaaaaaaaaaaaaaaaaaattctaaaggattaattactttttcagtttgttattctgacccttggattcccaagtggtggattgggtgcacaacacttgaatttctatatgaaggtatttttttcatgttacaagcacttagattcctgaatccaacctattggcagctttggtaaagctctatcttccttggacactcttgtcaactgaccatactaactgaaaagggtcaagaaccatcaaaaacctttcagaaaatccttgattgcagcagctctccctgagacaaaaagaattaaaaaaagacatgcaatacttaaaaccatctcttttggatggtttagaaggaaagaaataggattgtattcgaaaatgagaagttttcagtttaaagaatgaattattatttttttttttttgtagttattgatcttggactatgttgtttatagacgtaggtcctttatctttaatcaacttttttgatcagatgggtactagatgagggtgggtaagcttttttgtatcccctcttctttttggcttatgccttgaggtgcctcttgtaaactccttgtatggttgggctgtcctttactctttatatataatattcttttgtatttttacttataaaaaaaaaaaaacttattgacatcttactttttaaaccagaaaaatatatcacagcttagaaataagatgttctgatggttctttttctttgataagctaaatttccgagcatgaataattttttccctcataagtgagatattcttagaatatagagctatcaagcctatcttttctgttcagtagtaagtctctcacatatccttggcttgaaaattgtggttatttatttatttatttattttgtaaataacctccattttcagttctcattcatatctgatcatctatcttttttaggaataaacgaccagaatttactgc

SEQ ID NO: 10787 - DNA, 1308 bp, Vitis vinifera
  Intron number 1 from transcript GSVIVT01024777001 (locus G SVIVG01024777001) derived from phytozome v7.0 (chr-ID chr6 ; pos 7029210 to 7030517)
caaactctgcgtttcggtcgatttctgagttcaaggtattgttccaatctctatcccagttcaatcaatcgactcgtttgcatgctgagaaaacaatgttaaatgaaaggaaattttaaatcgtaaaatttttgaccgtctaaggctcgagaatacagaatattgtattttacctaaaactcatgactctctggctaaggtgttctgaattttttatattttttattttgttttttttttatttttggtagcaaagaaagtgagagatcaaacgcagtaatcaaaatgtggttttcttgtacttttcttcgttttattagtaacccaagcggagtgccggatttcactctgcgtgcattataatttgggaatgcaattgccggaagtttttatttctagggtttctgaacagccctggaactattgccagtttggattacagctaggactggatttttggttagagaatggtttcttatataaaataattttagtttatacagatagaaaatatcaaaaaaggatttttgttcgagaatgttttcttatataaaaccatttttagtttaaatagagagaaaatatgaaaaaaattaattaaatttgaattgtaaaattttcatttttcatcaacatgatttgtgaatatagaaaaatgccacttcacttgtagttcacactgtcaagggtttttccatttttccttttttctctctctcttttttggtagcaaaagatgaaaaataacataggagggaaaatgttgttttcttttatttctctattttcttggaaaccaaacggagggatagggtttatctttgaatgcttttaacctgtcaatgctattgttgaaaattttgagttctaggattacattatggactacattgaaaacccatcaaaaattatggactacattaaaaatgccaatgatcaccagtcatcattttcctcatgatgctaaaattttaattataggataaaaatagagaatttcccactgaggaaatgttagaacaaattgaataattctggaaaggagtttgagcaagagaggaatttgtagaaagtgtcatctagaatgacagcctgatctggacatcctttttttgtgaagtggatgatcttgcaaaggcaattttcttcacaatttcttatgtatttagcttataaaaaacacaaaaagaaaattcttaggcagtttctacagttaatcttatacgagtgtatattatccttttgtggtggagaaaatttcatcttacctattctcgtattctaataatttcaggcctcttccgtctg

SEQ ID NO: 10788 - DNA, 3353 bp, Vitis vinifera
  Intron number 2 from transcript GSVIVT01034169001 (locus G SVIVG01034169001) derived from phytozome v7.0 (chr-ID chr8 ; pos 14686924 to 14690276 reverse strand)
gagtacctttctttgaatcttgaacagtctagtgagtatgtaactaatcttgttaacttcttctccaataacatttagataatcttatagtcatatgatgtgtttaccagtccatcccctagaacattgtgagtatgctttttaagattactattggtgtttatttgatttattcctgattttttttgcatattttgtgcatatttagattagttgactatgtaaattagggaagttgtaatttagaagatttgtaggaaaaattttagggataggtcagctgtcttattctatttccatttattgtacaagtttgaaggttgtatatgtatttgtactaatttttcaaagaaatataaaatgattttattttccaacatggtattatagctgaaaaaaggtttctggtaggttttttttttcttcatggccttcattgccaagctttgtctatcatattcacaaccttctattgccatcaacccttagttattgccatcaaccttctattgacttctagtattcttcattcttaacactttgattattgattcaggggcaactgatcacatgactaaagagtctaatgtttttctatcctacattccatgttctagtacaaattgctaatggatctttgacttctattagtggtaaagataatgtttcagtcactcccaatatcactctttcatctgttttgcatgtctcaaatgtcttgtaacttattgtctattagtaaattaacaaaatctcaaaattgttgtgtaactttctttcccactaattgtgtgttttaggacctaactacggggaagatgattggtagtgctaaagagagagagggtctctattacttggttattgagtagcaaggaaagattcaagcttatcaaataaaaggaaatatagaaaaaggaggtagacaacatacaactggcagcatgaaaagaaactgacgtcattaaaccagcagtagcagaaaatgctactgaacatggtggtgtagaggaggtagacaacatacaaccaacaacaagaaaagaaactgacatcataaaaccaatagtaacagaaaatgctgatttagacttgatggtttactcttaggaaggcaaggctaccaatgccagagcaagatccaatctctcttacacacgaccagtcatcaactctagaattaggtatatctaatccttctaatccctctcttcttaatcattgttttgacactgatcttgatattctatgggaagctctacggcacccataatattcaaagtgttaaatgctatatcccacgttataagaaacattatattgtttagagaaattcatcttatccaaatatatactccaattttctaaacattcaaaaatcaagataaaaaacaaaataagagaatgaatgtcctagagaagctttaggcatcatcatcactgtcattattgaaactaattgtgatccccttcatcaagagtagattgataacactttatcccaacatcactatgattcataatagaatgtttcatcttatgccttgttttaatctaatcttaaatcgaattaaattagaatttgagtgtgtttaatcttaacccatggtcaaaggcgatcgcctttacaacttgagccttatcccaaggcaactgcctagacatcacctcttgaaagttgtcttgcctggttattcaagaggtgaattttatttgcctcaccttgcctggtggccttggtgacccatacgatcccctttcatagcattgcatgacaaggagcatgaaagaatgggggaatttctcttaagtttgcaaataaaagtggtaaatgagaatgatgagatagggtggcctggttggaattgaagtgtggaatgttttcattaaagtccttatactcttttcgaaagatattgtttgtaataggttgccagcaaaaacgagatattttgtttgggaggcaacttggggtaggacattgcttgtgtacttaggtgcgctctttttaatatatctttttttgtttgcttataaaaaaaagtatcacaatgaaattttattatattccattaaactttatttttcgtttaaaatttgttttattatattgtttgatgggatttagagccacttatcttaactttctttaaacttttttcttattacaataaggtgagttgcttaatgctttatggcttgaataggatcaaccaaatatatatttttaaagaattttattttatttacttttttgtttttcaagactaggtccatcagctgtcaagaatggtttaaactaggcacaaattcagccatatgcttccccttttgaactcattatgatatgagtagcaggaatgtatgacaacatttcatttccacttgttgttccatgtcttgcaacaagaggttgtgatacttttgtcatgccctttacaggagaaaatggttctcttctccttgctatttaaagtttgttgccttaagcactctttttcaatctcactctcaatgtatgtatgagctgcacaagctgagcctatcaagttgtctttgatggtgaactttgaccatcttatgaaaagatggtgaactttgatgaattagttgtctttgtaagcaagaagaagaattggtagatcatgttctaattcattgtgattggtcatcaagatttggtctttcatgttttctatttttggggtgacttgattccttccaaagaaagtttgtgatgttgatgacacaatagatgtgggggacaaaaaaaggtagttggtttggaagatgaccattttatgcatgttctgaagtatttggaaagacatgaagcgatctttgctgttaagggctcttttttaaagtgtttgcttgcttggtttgagatgttgtgggatggaaacaaaccattcctgacttgatattgtagatggtttgtgcatgaagcagtcataggtgttgtttttggctgtttctttggccttagtgcgccttgtgtacctcatatatactagggtagtgcctcctttttcgttaggctcctagtgataaattttatcctttggctattaaaaaataattttcaggattgttttattggttataatacttatccctaggagttattcttccattgatcactgaatccactccagaaaagtttcttgcttgtctgcttgcacttctttagcctctgatgaatcatgtcacatatttcattaccatacctacgttgacctcacacatgcatgcgttattcacatgccaactatgttattgcatgcatttttcattagtagttgcatcaatctgctatagaggttctgctgaagaacgtaatgttgtcaggt

SEQ ID NO: 10789 - DNA, 12927 bp, Vitis vinifera
  Intron number 2 from transcript GSVIVT01021685001 (locus G SVIVG01021685001) derived from phytozome v7.0 (chr-ID chr1 0; pos 9358606 to 9371532)
ggaaaaaaaggccaaccatgaaacaagttgatatagacctccaacaattgggcagatttcaggagcagttgccttctcagaagacaatgattgaagagccttcgttgcagcagcatacatgcgaggactacagcaaacaagctgaaacatcccattcgtacacatttggtgcagttacagaagaaatagtcaaagaccatgaggtcttgctctcctaaggaatacagtatggcactttgaagtttcggttaaacatgaggtttctttatgctatggacttccggaataatgatgtaatgaatgactcagaactttcttttactttgtttaatttgtttcaagtatggtatgcatattatcagggtccaaccggggttgaggctggttgacagtcaatcatggtcaacctttatatacacacgaagttcatttgccaaacccatcaattcaatcttcaatctaagctgcctatgatattgacttaaaataattttgggttatatttgatttagtaaatatatgttcaaattccttgtatttagtaaatatgttactataaatttttatcaacagcctatggcgactaagaaataaaaaactaatgataacattcattgaactagtcctgaacaaaccttttatttggtaggtaacatcgatgaagctaccgcgaaggctgtgaacttagaaatgcagagcaaattgaataaatgaccttaaatctttgtgtattgacctctaatcgaattgtttgggattcaaaagtaaaagaaatcattttatctactaatagtggacaaattggcatattaccaaatcacgcccctattgccacagctgtagatataggtattttgagaatacgccttaacaaccaatgttaacgatggctctgatggatgaacacagaatttgtgcagtatcactctcgtaacatgtacagatgaggagcacaacttctcatcactggctaaaatctttgaactttaaacaatataataatttattatatatagcattgaatgtgtctcgcccaggggagccaattcgctttttaatattatttccaaacatcattgtaaaactaatttttatgatcttgcaaaacaggatgataccaaggcctaattagcattttcctaacaaggactcaccgaagaaaaggatttgtacttaaactccagctaaaatggacccctattatttagaactcattttattttattttttcattttttggaatattttgatatatatatatatataaatttcataaataagtgaacaacataagtgtgtcacatgttggagatttattttaactatttaaactcaattgttttacagtttaaagatattattgatcaaagagattttagtgaaaaactactgagaaaaagacattaaaaataaggatgaaaatatcaattttaatagatatttcaataacttaagatatatcgggatatattgataaatatcagtggatattttgacacaaaatatcaatgaagtaaaaattataaaaactcgtgaaaatgttgacaaacatataaaaaatgatataaaaagtaaaaaggactatattataattgaaatacaaagaaattgatatataacttgtataatttatgacaatttataataataataagcgacatttcaaaattcatttaaaactgaaataatattctgtaggatttgaaaataaatataataataaaatgataatttagaaagggaaaattagtacaataaaatttcacaaaaagaaaaaaaaaaggaatatatatataggtctcctaaaccattcgataaacttagacatttgaccatccgaattaatataaattccggttcggtttacagaatagtgaagtccaacttcgttcctatcccgccaggcatcataagcagtaaactccagtgaggaggggcccatctcattttacaatagacagttgggcccaaaatgaggaatccatatatgcgaaattgagacgagtaagtctgaccaggttgtataacgggatgtgtaacttgtaacaccttcattcatttaccgttgagtttattaagtctttaagctactgcaactttataattatttaagggataataattacaatggggttgctatgctttattcttggtattattgctcacattttaatattatttttccaccctcaacctcttcccatcaacgtcacccaccttagcaataaacgatgtcggctcatatgatttaaaaaataaataaatgataaagtaaaaataaatataattttgagtccatagtcctaaattttgggcccataggcttaaactttgggttgtagaccaaataatgataaaaagaagaagaagaagaagaagaagaagaatgtagtcttctaaagtaatccactatgtctaataactttatcttagtaaaaattctcacaataaagcagctgtgcattttataagagcaacaaatatgtgatttagtaacaaattctctagtctactattaaaatttcatcactaattatcaatcactaaaatttttcactggagaattgattgaagaatttgctatacttaccatgggaattttttttatgacgaaatatatatatgtgtgatgaaattattcgtcactaatattaaattttcaataacgaatcatttttattctaatgacaaaatggacatatttgtgatgaaattgtttattactaatttttttattccaatgataaatatttttcatcaccaactcatcaactattttttgaaaaacatatttatttttataattattatgttatgataatattgtttcatttaaaaaagaaatgaaattttaaattatggaagtacttactattttaaatcatatgggaaatatatatatgattcccaaagtcgatacacctcttttaaagtttcagattgaaaaacctttaacaagcccctcgaaacattttgagggtacccaaattgcctacaaaattagtgaggataatatggttggatcgccaagatagttttgccttgttgcaaagataaatagctagagcaaagacttatgaaataaaaagctctaatagcagtaatatatttgtcatcaatgaattccatacactcattttgttgtggtgccaaatgtcaaactttacccctttgcaaaaaattatcaaatctcatgctcatgagtcttcgaaacacttagcaaaaaacttgccagcataatgaatcatttgtgaggaatgatcccaagaaagagtgatgaaatgggtatcaaaatattcgcctaaccatccatataaatagtgaatgaggaaaatagatgcattaagcctaggcttcgaagagtgctatatgttacctttgacttaacaaacgatttcattcaagccattgtaaatgcttgctaatgtcggaacaacaaggctaaacatcaaactttgagtcattctactaactaccttaaagactcaagagcaaatcaaagtgacacacttcctaagaagaacaaacttgcatataaaaccagcatgtaaggaaaacaaccaaataagtttccccaacaacttcctcaaccacaccatggtcatcaaacacctccatctccaattgagtatgagattcaatagggcgatatccctaaaaggattatgagtctccttggtctttgtgccttattccttgaattcttctttggggttttgaatactttatggggcttttgtaccaaaatgacacctaggaggccattttaacttgtgttttacatttaaaattaaatccaaaaaaaaaaaagatagaataacatcactaatatagtatttcttagttgtaagaaggtaacattttatttgttttttaaacttcagtcttaaagccttaagacttaaaagacatttcgaaggctgtttcttttttaactgataatttttagtcaattttataccaatagaaaaaataaaagttcttatacttttaatttaatagaaaaagtcacttttgcctatttgttttttcaactttttaactttgttatagttctcaaatccaatttctcaaacaaaataaaaatatttttagaaatgttgggttattcttgactgaaaaataaatccaattatctgtatattaaatgaaaaatgaatttacaataaactaaaaaagttacattcatgaagaaaaccaaatatgattaagatacttttttttacttcgtgcagtcactatttttttaactaatttgtaggttcttggttcaaaggtaaaaacaataatattaaaataataaagtttaatatgaaataatttttctataatttttaaaaattcaatctcctagaatattacaacaaatcaaaataaaaatcatcaattctaataatttttttacaattagaacttcaaaaataatttacacttatctaaatactaactaaaatcaataatttcaattaaatttgaaatcaacaattgaatgtacattccaatcctaaatccattaatttgaatatgtaccacataaaaactacttaatataaatgacacttataaattttttaacattttattagcaattaaacataattgagaacccctaattactattccattaccaacttcttagttaattatataattaattctttacaaaatatttattattgtgataagtgtttggtattttggtattttggggtatttgaaaatatattatattattattatttttaaatattaatttttatattttttatcttaattatataaaataagaagaaatataataattaatttcattaatattttttgtacctaaaaataaaaagatttaatgtttaatagtatttagatattagtagaaaaacgcttaatatttaataacattcacacatcaataaaaaaataaataatctaagtacctaatggcattccactttatttagattaaaatgaaaagaatattattaagattttagataaaaattaaaaattaaaaacagacaaagacaacaacacaacgtaaaatactactaaattagaattatcataatccaatttgctcttattttgacaaaatttcttagtaaatattgtctagcaaacttatctaattcaaatcacaatgatttttttttaatacactatcaaaatgtattgaattaattagaacaaaatttatgcttataattaataataaaataacacaataatcttactacaattaccacaaaaattgtacttttccatggaccttacactaagagtgagcccatttgtgaacttctggagtagagaaggcataccttcaagataggatacatccctatcttggttcttggttcttggctttataataggttatattgattcaccagcttccatgacacaaaaatgtaaatggtggtgatttaatcaatgcttgaaggttattattctttatataccttcatagattttaaatgaaataattgtacagataatcgtgacatacaaggggacaaagagaaaggagaaagaaagaaaggaaaaaaacatagagtttttatgtagtggctggtaatttgatcaacgcttggagctcattattctttgccttcatagattttaaatgaaataatcgttgagataatcatgacatacaaggaaacaaagagaaaaaggaaagaaagaggaaaagaaaatacaaagagattttttatgtgatgggtggtgatttaagaagttctgcttttctatctttatctttatagattttaaatgaaataattgttcagataatcatgacataaaaggaacaaagttttctatctttatctttatagattttaaactaaataattgtttaaaatctatatatgtgtgcgttgataaagaaatctgatttgaaacttctaagaagttcacatgagatgagggagaagaaaaaaagaaaacaatggttcaaatcaaacttctcttttgatctttttgctaaattggaaagtatatatatatatatatatgtgggtggatgccaatgaagtaaaacaatgttaagaaaaaagttgctttaaacaacaaacaatttggaaatataccaattacaagaaagaaaaacaggggggttttgctttattatataaatgggtaagcaagcgtgatttaaacatttaggaactttacatgaaatgagctaaaagaaaaaggaaaaaagggttcacacaacaccatttatcatgtatggtttcaaagttgtctcttgaattgtgagacacatggagcagaatgcacaacaaccaagtgatatatatggatgaaaagccttgatcatctctcaataaaagaaaatggcgctttccccatccttctccaactttaataaagataaaggaagggtaatcaattgtttccattagtttttgtttgattagggcttggtgataaaggtgtccacatgacttgtattgtgattttttttaattaggagtattattggagaggcatatctggaagtgtttgttgttgcaattcgcttaggtcttggtctcttggaccccagtttatagctggctaagtctgaccataccagctcctcttgttcaaaaagaaaacccccaaaagcggacttggtctgagtcaagatgttgtgctctaacacacattatcaacccagaaaccgggccagatttaatctcaatttgagacttccaaatagtgtcaatgaacaaatttctggaggcatttgtacagggataaattttgtccactcactaattgttacaagccaataaattgttaatcatatgttgatgtgtttttaatatagtcaaataaaatttattatgacaaagaaaaagattcgtatggcatcaatgacttcaaataaaataatatcatgtgtccttgctcttgatataaattttttgttatttaaaaaaaaaattgagggctaagactgcaccaaagttcaaaggagcatgatcttaattcataatatagttaatcatatgttgatatgtattttaatatggttaaataaaaatttattatgtgacagaaaaagactcatataatatcaatggcttcaaataaaataatatcatgtatctatgctctcaattaaattaatatcacgtgtctatgcccttgatataaattttttgttatttaaaaacaaaattgagggctaagaatgcaccaaagttaaaagggagcgtgagcttaattcataaaattttgttctaaatatcaaaaattttgtttgtggggttcctctaaactggccttcattcagtgatttctaacatgatgcatctgttcaagatttggatgtaatttttaaagttataggctttaaactcagtttatgtgacttcatcaatggcattgctaggaattttaggttggaaaattaaagaactttgagaacgaggaatgcagtgggtgttaaggtggaccaagatcaatcaattaattataactgattgcaggtagttgcagtttttatggtgcatagcactattatcttacaaacttttcttaggaatcaacttcttgaattcatactccatctcatctcaagaactccgctggatgaaacctgttagagagatttatttagagttttatttatttaatttctattttattattattcttttttgtaggaataaggtaaattagtccttttcttttcttttcttttatttctttacactgtataaattatatttgtattgtacctatttattaagtgatcctaataagaaatcctaaacttttcttttctttgtttgttcatgtttcttttgaatttcacattgtcttagagcaaaatttattttaatggaattttgggttttcatctcattgaagggaattttatttcatatacacttttacgttgtgcctaatcataaatctttgttgtaggtgatcgcatcatttttcctatttgatcctaggttttctttggtttgtatttcttttcctctattttcttatcgtttgttaattattcatcatgactagcaaaatagatgattcccttcaatctgttagtgtgagattggatagaaaaagttattcatattagagttattgatgaaaaattttcttaagggagttattgatgaaaaattttcttaagggaaaaaagttgtgagattataacattggcactttatacaaacataggaatgaaaaggatgaaaaatatgcaaaacaattagatatttggaaagtaaaagtttgaaaattatcacttggatcaacaactctattgagtattcaataggtacacagttggcaaagtatgaaaaatctaagaaaatctaggaacatttggaaagattatacatgcaatctaattttgcaaagtattatcaattaggaattgatatttgagccctgaatggaaaaaaaatgagtatttaggagttttatccactatgactgatctatatgacgagtttgctctcacgagattagtagagttctaggcttttatgtcttatatttctcagaacaatgattagtccaattttgtaaggccctttgtaatgattttgaggcactacatggcacaattttgcatcgtagcctactcccctctcttgattcaatagttggtgaattgttggctaaggagatacatcttaagtctcagtcataaaaagaaattttctccacacgttatacatcttatttggaagtaccttctaggccaccttccaaaaattagaacaaaactaactcaaagatcagcatggatgaatgtagctactttaagcagaagggccactagaaggctcaatgtgctaagatctttaatagaacaacgttcttataggcctccacaatctaatactacaacaattgttcctccctctaactcaacaatctaatactacaacaattgttcctccctctaactcatttggatttaggcccacactatcctctaatcccatggtatctacccttactaaacagttcaagaagttcctcaccacaccaccatatgttatttctccctcttcaactttgtcagcccttaatttttcaagtatgtcttcctttatctagagccttagactttggagcttatcatcatatgtcacctgatttttcatcttttgcttctttatgtcctatatcttttgtgtttattattactactaatggtactctcatgcccttagccggtgctagttctattattacgccttatgcatttgtctatttctagtgcttatcttattcctgatcttacattgaatctaatctttgttggtcaattatctgacattgattgcttagtgtcctttttttctacttcttattttatgcacaattcacaatcctagaagttgattgggatagaccataagtgggggagaccattcttgacaaactaaaagtaccaatagttgcatccctaagtattgatttatcttccttttgtttgagtcatttgtctagtttttctattaacattctcatttgggacatatttcagcttctcgtttaaagtatttagtttctgcaggagcattagaaaatttgcaaacataagatatttctagttgtagtggttgtaaattggtaaaattttctaccataccttttaatagaaatgttcttcttctacaccattagatttagtccattcaaatgcatggggaccttctccaattcctacaaaaaggagggtttcaattttatgtttccttcatggatgattatactcgttattgttgggtttatcttatgaaacattattttgattttttgagtatttataatgcatttcaagcccttgtcaaaactcaacattatgctattataaagtgctttaggtgtgatttgagtggggtgcatacttctaatgcatttaatgattacttgcttcacatggaactattcaccactcttcttgtactaacactccatagtaaaatggtgttactaaaaggaaacatagacatattgttgaaactgctcgttctcttttattggttacatgtgttcttagtgaatattggagggaactagttcttactaaagttcacttaataaaatcccatcatcatgcacctatggtctatctccatttgaaaatttgtatggttatgctccttatcactctcctttaagagtctttagttgtcttctcattctactatttgtgtttttcttaggtatagtgaaggccaaaaaggatattgttgctttgatctggttaaccacaaattatatatatcatgttaatttctcttacttgagcatcctattaagtctcataatgtctctaagtttaaacttgttcacatttattctttcttggatgatacgatagttttcctatagatactagtactttagttcctaattatcatactccttcctctcctcctatggctattgcaacaccttctaagactgtgaatccttcttccccacatatttcttaacatccttgttagtctacttgattaccaagttttgtttattcctttcattcagattcttttacatcatttttatcttctattcacagtttttctaatcttaatcctctttggtgataggttatggttgaggaactttcttatttgcacaaaaccgacacttgagatttggtatatttaccaccttggaagggtataattgattcttgttggatctatttaatcaaaactaagtctaatgattcaattgagtagtataaagcctaattagttaataagggtgctctcaataatatgtatggattataaggagacttttgcttccattacaaatatgactattgtttatatcttattgtagttgcctttgtacgtcaatgacatatatcttagatggatattaaaaatgccttcttgaatgttgatcttcaagaagtgtacatggtacctctttttggtgtttcccataacctaagagaggtttacaagctcaaaaaagctttatactatctcaagcaagcattgtgtgtttggtttgcaaagttctctaatgtgcttacttctcttagctttcatcctaatcatcatgatccctgcactctttctaaaaagcactactactagttgtattctatattctctatatgttgataacacgattattataggcgatgatgttgatgagattgcaatgttgaagttagatttggcttctcgtttgtaaatgaaagatttgagctttctatgatatttttggggtattgaggtatcatgttctctaaaaggttatcttctctcgtagtctaagtatatagttgatattcttgatcatgctcgccttactgacactaagacttttgatactcctcttgaggtttatgttcaatattcttcttctaatggtaacctcttagcacaccctactttatatcgtactattattgccaacttgatttatccaaccattacacatctaaacattgcttatgttgttcacattgttagttagtttgttgtttttcctactatagtttgttaggctactgttctttatattttgcagtatctccaagcaacatatcttagattttttttactttcatttatttcttcttttttttttttttggatctatgtgcatattttaatgttgatcgggttagtgatcccaaagattgctagtctaccattggattttgtttagtttttagggattttccacaaaagctaagtatcatgctatggtatttaccaccaatgagatagttttgttatgttacttgttgataccgttatttctctttcttgtctaactcctacgtattatgacaagaagagtgttgttcggattgcatacaactctgtctttcatgaaaggaccaagcatattgagaatgattttacttcactcatcatcaccttagtatagcactctttttgttttatttcttcttccttacaaattgtaaacttgtttacaaagtcacactcacttctgtgtttttgatatttggttgacaatctattgatgcttcttacagtcacatcatgagtttgtagggggttattagagatatttatttgttagagttttatttatctcctattttacaattattctttctttttaggaataagggtaaattaatccttttcttttcttttatttctttttattgtaaccctatttaaattttgtttgtgttgtatcgatttattaagtgatgttaataagaaaccctcaacttttttttcttttttacttcatgactcttttgaatttcacaaaccaaggtaggtgatctaaatatatctgaggctgagtggattttattttagttattgaatttcaaaattgcccttagtgactggtcaactttttcgcagccccaacattcttctttaataaagagattcccttgccggttggttccgactccctattttgacacatatcagagactccttattaatggaactctgcaatccagaagatcaatttacaaaatgacagacatgaggatgcttctgcaagtgctagtatcacttcatctcatcacagtcatcatctccttggtaaccatactacaggaagcaggggcatctctgacgaagcctggctgcccagagaaatgtgggaatattaccattccatatccatttggtatggggaaaggctgttacctggataggcatttcgagattacatgcaacatgtcctccaatccccctcgtcctcttctcctccaagaagttcaacttttgcagatatcagacgactctctgcgcatcaacgatactgctcaacggagctgttttaacaaccaatcagggaaggctgattcgtcatttgtgccatatgatagaactcatcatttcagttactcccacactaacaataagttcatagccatcggatgtgacatatttgcttatatcacagagcacaacagtacaacat

SEQ ID NO: 10790 - DNA, 6706 bp, Vitis vinifera
  Intron number 8 from transcript GSVIVT01029120001 (locus G SVIVG01029120001) derived from phytozome v7.0 (chr-ID chr1 1; pos 19431336 to 19438041)
ttccattgctggagaccaaacaactgatattgaaggtttgtcaaacttcctaactttaattaggaagtatattctgtcaatttaaagtgctaggccatttgctttactgttggatccttgcatggattgaaatatttacataattgaagaatgagctggccaataaaggattggtgtctcttggaaatggacgtggtgcaatatattgttcttatcaagaagtaaaatatatatttattaaagatggaagcacaacaaattacaagaaagaaaagttaaaaaaaaagaaactgtagaaagaagcaatgccacagtttctctccatatatctttgttttcactaattttatcctcacttgtaatgttaatatgtctgtgtcatctacctagctgacatcaatagagatgccaagggatgagacaactagaaaaaaatgtgtattagctattacccttcatttaactttccttcccatgtgtgaccacactttcatgattatttttatatttgagtttcatcactcataatctggggaaaatgtgataattggaaatacattgaaaccattgctagcctgataaatattgtggatatgttatcttaataatttaagcttttagcaaagttagtatgatgtaggacaaccctaggatagttgcctacactcaagggtaggtgggctagggttttatttttagggtgtaaggagaggaacaaggaataaactttatggtagagaaaattataagataaaaaatagagagaaagaagaaacaatgaagaaaagatggaaaaccttagagtctcactaaggccttctaggagtctcacctagaagaaaaatcaatggagtctcaccattgagggttgcaaccttgcaataaaagaaagtataatattattcatcaaattcattcctttgatttacattgattagcctatttataggcttctctaagaaatccaaagtctactaggactttaataacctattatgattctaattctaattataacatccaaagtctactaggactctaataacctatcatgactcaaattctaattatattataactcaactagctaatcctaattagactccaacaaataccaatccctattcaattctaattaatattaatcctacttaaagtttgcttaagtcttccctttcttccttgaataaactttaaaaggctttcccccatcatagtaacttaaaatagtatcaaagctatggctaactagaagtcttgagtttgagcctctcctactgtttataatctatttgttgttgatttgtatctccatgtgtggatatggggccacaataaaggacggtgttaccttgatagcttttaggaaagttggtggcttaacaatgggaggggtattagcttgaaagcttttagaaaagttagtggctgaacaaccataaaataagaaaagtaagtacacataatatgatccaaaaggctactccttctcatcatattgacaatcaaccgattattgccatgacacgacacattgaagaaagtagcaaggaggaatttattgaataagagcacaagaagacgtggatgtcatgctaagaatgaatcattttgtgggttgggtgaggggtgaggggatgggggactctatgcttgtgaaataatgaaaaaaaaaaaaagaacaaaaacaaatgagcacaatagggaggtaacttgataaagaagataatgcaattgcacaaaagcttaggagcaagtctctaataataataaaggtcaaccattaaatgctcttgtaatgaaattattagggtaataggccaaataagcttgatatactttttctggaccactgcctaaaatcttgagcttttagttgaactgtagctttatcatagtattagagccttgttttattgaaggtggtgagtttgaacctcacctcttgtttattttccccttttattgaggctatgtacaagtctaaagaaagttgtagaagaacttattgaatctaagcacaaccttttgtgtgtgtgtgtgtgagatagagagagagagagagagttatatatcactccaagacaatcaaagggaaatggatctactattggttgagatgaattgttggatgcctcttcaaaaattttcattactaatagatccctcatggggtgggggagagagagagtcagcattttgatggtgttttctcttcaaacttttcaattagtgattgatccctcataatagtggtatccatatcccaatacccactgctgcaagggtaagcagtatgtcaccatgactcaaagtattcaccaaagtagatcatttatgatagcattgtgcttgtccccaatacgcaccactacttccctgcacaacatatcccccaacaagttgtatttatagaaatcccattcaccacatcgggtgcaaaaggaagtttctttggattcttgtttatgaagttttgtcttattccatttttttttaatttataatttctacaagaatatagcacaagattgttcattatgcgattagaattgcattcaacattttgttgtcatgtataacattttttgtgcatgattatgtaagaattttgtatatttctcactaataatatgatggttatttatgcacatacaaagttgtggaagaaaaaggaaactaagttacaaatcccctaaaattaggaattgactattacaaaattatgcataagaaataggggtccaacttaggcgggttggttcgacccaacccaaacccaacttgatgtttaggtggaattgggcaaacattttcaatattcgtgttgagcttaggttaagttttctcaacctgaactcaatttggattgggcatgggctaaggttcggacaaccttattttaacctgaatctgatttaatatttttataatatttgtaatgtttattattctatgtaataatattcattttctttttagattttaaagaaaaaaaatcaaattataattatatcatatacttttttatttttttagaaagatccataagtttattttactgttttattgttatctcgaagttttgtcttatttactatttaaattttggtataaatatatacaaaaaaagttttttaagaaccactatgcatggattttgaatcatgcaacccaatcaaccagaccaacccaattctaacctgataaacttgagtttaacttgactaactaagtttagctcaaccgacctaaatttaacccgagtttagaaaaatgaggttgggttgggcttggattgaatacctcgggttagatgtctggttgggctgattgtttcttaatttgagtttgcatttgtaaaggcctcaacatgcatttgttcttctttaccagaaaaaagaaaccttttcttagagcttcctttagatatctaagtgctcaatattttgcctcagaagtgtttttcacatggagaataaattgactaatcccactaatcacaaaagcaatgtttagttgagaatgagaatgatggattagttttccaactaacctttgatatcctcccttacctcccaaaacacatttgggtgcaaatcctaacctatggttaggttcaataggagtttcagctagcttacatcctatcataccgatttccttgagaaggtcaagtgagtattttctttgtgaaaccaaaattcacttcttacatctaacaatctccatacctgagaaatatctcaacagtccaagatctttaatatcaaattccctagctagaatccatttaagtctttccatttatgtcgcgttgtcacctgtcaaaataatatcaatgtatcataaaccttttcttagagaatctaggtgctcggtattttgcctcaaagtgtttttcacatggagaatttattaattgacaaatcacactaatcacaaaagcaatgtttagtttataatgagaatgatggattggttttccaactaaccttggatatcctcctttatttcctggaacacatttagttgcaaatcctaacctatggttaggttcaataggagtttcagctagtttacatccgagcataccgatttccttgagaaggtcaagtgtgtatttcctttgtgaaacaaaaaatcatttcttaggtctaactgcatccttataatcagggattcaaattatcctgactgcatccctataaatgagagattcaagtaatacaaaaaatattctaaatctataatttctgttttacaagaaaacatgcattttcccacaagttttaatcatggaatggaagtttttgaaggttttcttggtcttggatttttctttcaataagtaaacccaaacatataaaaataatcatcaacaaaggttatgaaccattttgtgcttgaatggtttggatgctttgtgtggctgcgaaggaaaaaaagaacaatgatgtttagtcaattaacaaatttcacattgaaacaaagatggacctttattattgaataacaaaagaaacaagttcttcaaatatgaaaaactaggatggcttaacctaggatgccataacatattgtcattctcaacagaaagagaaaaattacaacttgtcgtttgagctggtccatgcaagtcaagttcatcttaaaagtagtagagtccctcacgttctctagcattgctaattatcttccatgaatgtagctcttgaaattcataataaggtctgataaaaaaaaaaaaaaaaaaaaaaaaaaattcataataagaaggaaagaatctaacaacaaaattcaagtcttttgttaatttgctgattgataataaattgcaggaaagattagcaatctgaagtgtggaatttagaactggatttttggagataggagttgaacctttccttacaattgttgaaagagaaccatcggcgatttttatttcagattaccagggcatggatattgcaaagacttgtcaagtgattagtagcacctgaatcaatgatccatggtcttttcttattggaaagaacacttaagattgatgagaaattacctttttggtctagagggcaagaagataaggaattagtgggttgagaatgatttagaaatttatacagctactccaaccgttccttactgaagagatgtgtctcggtgtttcccccaaaattctccttaacttgttgtccatccgctttgactttataagccttggttgtccttgttggtagacttatagttcttccaattttctagttttccatgcaacttccaactaaaagtctcacgaatgtgctgaggtctgtgacagtaatcacaccaagccctatcttctttctttgaatttctctaatctccagtctgttttgtgtgaggtccttttgaaaccaatgcagaattctcagcaactaaggggtttggatttcctattatcacaatttggcgcctttcttctctatgaacctttgcaaatacttctctggtagatgacagcggctccttaccaggaatatgtccctgtacttcatcaagatccttattcagaccagctaggaactcaaatactttgtatctttccagaatctttttgtatcggctctatttgctgcacagccctattcaaaatcatagaacaggtctagctcttgccacagaccttttagagtgttgtaatatttgttaacaccttgattaccttgatttagctttttgatctttgcccaaatcttatatatctgttctgaattgcccaggttagagtaagtgtccatgacagcatcccaaagctccttagccatagggagaaacaaataggtttgaccaatttcaggctccatcaaattgatcaactataccatgatcattgaattctttgaaatgctgggttgtcctccttggctgctttggtcgaaccaatcaaccaatcttacccttttgacaaataaacaacttcacggactgtgatcatcaaaggaagttttgtctgttcagcttatatgtggtaatctgcaggggtggatctcatgtgctggcatccaaagcaacaatgaatcctctctgctgactttcaacatcaggtttcttcaaactgcactgataatgaaagctagtgaatgaagaacatagacttggcaatttagaattcccccccccaaaaaaaaaaaaaaaaaacactaatttcagtggggaaccagctttatgccatgtgcactattatgaaagaattctggatatttctcattaataatctgatagaatacaaggctatatagagttttttagaagaaaaaagaaactatgtagcagatcccctaaattaggaaactaactattctgaaattatgcatttctggattgatcattaaaatattttgcaaatatatatttttaaatctctcatattttccactcttttgtgtgtgtgggtgtggttactttgaatgattagccatgagtttcattcatcttcatatatgcagtttgttgacattgtttgatgccatatagtacaaattgcatgcaacctttttctgttcatgtcatactttgtttgtgcttgagtacttaacaatgtatttcatcttcacacatgctctgtcaacattgttttatacatatgccacgagttacaaagtttttttcctttcctgtttttttattttctgagtagtcttctttcttatatgcagaggaa

SEQ ID NO: 10791 - DNA, 5511 bp, Vitis vinifera
  Intron number 2 from transcript GSVIVT01010791001 (locus G SVIVG01010791001) derived from phytozome v7.0 (chr-ID chr5 ; pos 22626336 to 22631846 reverse strand)
aacgactttgtgcagttcttaaactcagtcaaaaggtttgactccaaactaccttactagatctggtataattgtattgctgtttttcattctttattgttcctatatccaagtgaattgattccatgaaagctttatttctatgctgtaattgtattttcaaatgtatgatgccatagttggatatcttagctttagctataggaaaattcttttaataggtaaataaagtgagtataatataaatagtgcaccaaaaagagcacaccaaagtacatgggacatgtacattggtcgccaaaaggcacaataaaaaagaatgagggacgataaaaaacttcttcattccttaatgagaacccaaccaatcaacgaagtcaattaaggacattggaccttcatctatatataacttacttcatgatgaaagattacaaagaaaagtgtttttcaatctatgattagaaaactccttgttttcaaacgacttctattcatttccttccaaattctccaaaaaaataatgcatataggaggagctactcactacgtcttttttcaatttttaccaataaaagagttgtgtcatcctaagagggtctctctaaccaaggatgataacatccaagatatgccaaaaagagaaaacaaccactaccataaaaccctatatgatcaatagattcttcatcattatgagagaggaaatatttgttttccaattaccaccctatcctctaaagctaattcaaagtcaacaattttcaccatgtcaccttcccagcaaaaaaactcaccttaggcagaaccaaggaattccaaataataaccacaaggaaaggaattgaacttcctggctctaggatcgaataaagggatttgatggaaaaaacttctctttgattacacataccagattgggtggatgtagatttgattggaatctacaaatgaagtttaaatcctacatatcagcatatttgaaataaagtctagaagtgcttatttagagcttagaaacaagaaatgccaaatccatttagttaaaagttattttctttatccctcttgctatgaagtcttttagctgcaatccatccttcatagtcacaagagtccttgatgtaggacaaccctaggatggttacctgtaatcaaataggtgggttaaggtttttattttttagggcttaaggtgaagaacatgggataaagtttgtggcagcaaaataaaataaaatatagagaaataagatgaggagacgaagagatagaaccttagggttgccctaaggccttttaagggtctcacatagaagaaaatcaatagagtctcaccattaaaaattgcaaactatacgaaaaaatgtaatattatcatgattaatgctttggtttatgtcaattaaccttatttatagagtgggagcatcgaggagaaggtggacattggaatttttgttttgttaggaacttgaatgattgggagttaggtgtcatggagtgctttctttctttacttcaaggacattcaatgaaaagggatcaggaggatagagtggtttggaagggtgagagcaaaggggtcttcactgtaaaggggctttattccgtgctagagactggtggtactattcctttcactttaaagatagtttggaacccttagattccttcaaaggtgagtttcttcacttgagaggcttgttagaggaaggttttgactttggattaacttaaaaaaagaggttgtattttggccaatagatgtgctttgtgcaaagaggagttagagtccatagatcatatccttcttcattgtaataaggcaagattattatggtagctggtgttctccatttttggtgtatggtgggttatttctaagttagttagggaaaccttcctaggatggcataggtcttttatagagaaaagacgaattaaggcttggaaagctgctcctacatacattttctagacgatatggaggaaaagaaataggagattttttaatagtgagaaattgtctgatcaaaggctaaaaagtttattcctaaacaatttctctatgtgggttagggtgtatataggtggtggctatatgcatttgattgatttcatagagtggttgggtattggatgagggagggagtatttttttgtacactattttttgctttttgcttgttttacttgtatacgacctacgtactcttgcgtattttttgtacttctattaatacaatctcttataaaaaaaaaaaaaaaaaaaaaaaacctaaatccaaagtttagtaggattctaataacccattatgactctaattttaatcgtcttataacttaattagctactcataatttgattccaataaatattaattataatttaattctaactaatactaatcatactttagttccaactaatactagtgtccatccccatcaattacctcgacttggaaaaaaactcaacctcaagatttagtgattttccacgataattgaaatcttaagtgatgcctttcaccttttttttttctttgttaactttttaccatagtaagataggatctcaagatctcttaaatttcttcaatttcatgcaagataagtactaaacttcaaaagactttccaatgttgtgaaacaaattgatagttctcaaattaattgtgtcatcaacaagcttgcagtaagttgtttcctttgcctcgtcaaagaagaatctatagaccccattctaatttattgcactgaggctaggttttgtgggagttactttttgctctctttggtgtgactcttatcggttagagagactctcctaggatggcatggttcctttgtgggcaagaaacacaaaagaacttggaagatggccccccttatgtctcttttggatggtttggaaggaaagaaacaaaattgctttcgataataaggagctttcaagtcaaaggttgaaaatttcttttgtttgtagtttttgttcttgaactaagttgtttatagacaaaaggcctttacctttgatcaacttttttgattagttaggttctaaatgaggacaggtaaggttttttgtagccccttttctcttttgtttttgcctttaggcgcctgttgtatactccttgtatgcttaggtcatcctttgggcgcccttttctctttatttatattcttgtgtttttacctatccaaaaaaaagaaaaaaaaaattgtatgtcatgcataagaggaagttaattaggtaattttgcgagccacaaattagaaaaatcagagacagttgatttttgcttaggaggcttcttgggggaacgttttagctttggaccaacttcaaaggagggggttctttttggcaaataggtgtttcttttgcctctttaaagcagagacagttgatcaccttgttcttcactatgcgaagactcgggttctttggaatcttcttttctccctttttggtgtgtcttggattctctcttgttcaatgaagaaagctcttcttgggtgacatgggttgtttgtgggtaaagctcgtaaaaaggcttggcaagagacccctttatgtatattttggacaatgtggaaggaaaggaatttaatagtgtttgataatgaggagttatcgagccaaaaattgaaaaattcttttgtatgtaacctgtggtcttggtttaggatgtctgtagatgtgtgtcatgtttctcttgttagtttctttgattggttaggctttaagggcgggcaagtgatgtttttttcttttgcccctccccttctagtttgagtctttaggcttgttttgtatacttcctgtatactctgagggcactgttttttgtgtctcctctttactttttatacgaatttgctttacctatcaaaaaaaaaaaatccaatcttttatacctaattaaaaagaatgatagtgatctttgaaagtcatgtggaaatgaattaatatagtttcctagggttttctttgtacaaattcataatttaggggcaaccatcaggaattgaagcagtcccttttttattagaccttggttttaacaaaactcctcaagaaagtctcaatttcttttactcaaagttatttttctccctctctctctctctctctctctctctcttcacactttatgggttggagtatttgacagtctagaaacagtatgttaaagggttgaaggctaccaagatgagattgcttacatggatatggcaaaaaatagaagatagaataagcaataaatatattgggagaggttggaggtatgaccaaaggaaaatgtgaagaggaattgagatgttccaccaatcatatgttaaggagattaaacacagtgccagtgaggagtttgaagatgctcagagaatgaaaggcaggcaaaagaatatgggtcaatgtagtaaaaaaagacaggttagcatttagtttgaataagaacatggctctaaacaaagctgaatagtagataaagctttttttggctgaacccaaatattaggatttaaaactttgttgttttatcaattctttctttcttttttccccgtggaaatgtatcaattcgatgcaacattttactccaagactaatatgtaagttgttttattgtgtaaagatggtttacaattatcattgtttgtgaacatagtctttgtgtgtgtttgatgaaatttattacttattacttgatgacgtaagttaactgtaagttaaattgtcttaaattattaacttaaaacttattacttattttttactttaaatattaaggttgtttgataaaattaacttaaaatgtattttaagttatcaaattgacatatttaccctcattagttgtaattaatcttaagcaaattaactaatatatatttccattaatcttaagcaataaatttttttattaaacatccatatttaaagtattgtaaatatataagataactttaaaatatttgctataaaaaatgagtcatatatgtggagtcatggttgttaaatatactctcagtagatgtggacacataagacaaaagatatttgaaattaagaagaagttaattattttgacttaatacttaaagttatttttgactttaacttgtaatattaagttattttaccaagcaccctctttcacttgttctatatatagcagtgtcactgtctctttttgactcttgaagttttcattaggatatgatcctaattttgtgtagcaatcttcgttgatttattacaaggttcatttttgtggcattggtgttagatgcattgtattatcattaatcagataatttccccctcttcctttctctagtcagggcttccacttgtttaggagttcctaaaattctatttgaatgccttattcatttaaatgtgcaccaattttacagtgttccaaagttaaatttattatttattttggtttggttttcaggcctcatccattttttatcatctgagaata

SEQ ID NO: 10792 - DNA, 8124 bp, Vitis vinifera
  Intron number 2 from transcript GSVIVT01000713001 (locus G SVIVG01000713001) derived from phytozome v7.0 (chr-ID chr7 ; pos 96998 to 105121)
catttgtggcttagtgatcaatgtttttaggaaatcaatgtcaacaataatttgaaaagttaatttttacttcattttatcctgttctgcagatgttaacattgagtactcaccatgcaccctctctgaatccatgccaaagaaattatgatataactggattggaggtatgtagctgtctcataaatttatggactctagccatgacgaaaaaacaaactgtcttgggatactaaagtacaattatttctggccaggattttttttttttggggtcatgtttatgcccccacatctgtgcatgaacaacattgtgaaactcataagaatatggagcaatttaatttcaatttatgtcaaatgatctctttttgaagtaacttacaagaataatatcgttttccacatgcaggcaccttatcttgatccaaaaaccagtctcctttccactagttccagtgtgtttaagcacataagatgtatctagctctgaaaaatgctcaagattactgaactagctaggctttctctggtagcagtagtctgaggggaatcgtctgttatatcttgatcctgctgcatgctattacttttatggcataatattggaaagagcttcaagttcttattcggtatatatttacttttatggcataatatacaatattttatatatttggaattttctcataaaattagaaggctcgctattgcggatgtaaataaatggagtcggaaatataagatgtttgatcaaagtttaatggctatctctctctctttctattttgaatgatattctctatgcatgttcagtaaaatgattcttatcttcttcataaatatcataagcatgtttggtcaaactagattaaacctcgtatactttttttgtgaatgatttttttatctttatgttattgaactaataatatgacactagtttttattgacacaagaagtgaaatcaaggattttcttatataacatatgatgcaaggatgttgaaaatgtaaaattccttgggtgtgtaattaatttatcatttgtgtaggctataagattagtctttgagaataagtgaatactcaacttaggctttgtttgttggataaatataattatgttgttttagcacaatgaggacaaaccctttttaaacctgaaagggtcaatatggtgcaaacttttgatctaccttctttattcaacacctttgatggaattcattcaaattcaataacattccatatttttttcgtattgtattttcattttataatgtgaaaaattttaaccattgaaataaaatggtctcatcatgtactaggtgccttcttgatataaggattcatgcttgagattcaaggaccaaaaaaatttaaattggaaacttgctttgatactaattgtatacgaatctcaactatggactacattgagaggtgttagcccaagggttctcctaatcatgttttgataataacaaaccatggtttagttacaattggtttgaattataaagaatttcaggtattaatttggaatttcatcaaatgacctaatgaatgcaagatcaagacttttggaagacttttaatcataggaaacatatataagatgaatgcatgggtgcacttaggatttacatatcatttcatgcatctttgaaaaactcggtttatgctttaaagttacatttccatcaaaatccgagatctatcaaatgaaccttaggcaaaacgtttcaaaattgacatataattttacctaaagaccttgcctaagtgatagaagcaaaaagaccagaaaaagataggttttcagacaaaaaatggtgaaccgatcaaaacactatctaaaccgactcaaccaaataaggtaccagttaactggttccttctcccggtcgagatccattcaagaggtgtaaaaacattctctctcttccaataacttttctttcacagtcgaggtatttgctttcccgatcaaggtctggtcaagggccgatcaaggtccgatctagggtaataattacctgccaagcattaaatgttcaaacggttagtgaaccggttgaccccttagctcaactggttgaggttgttttttggtttctttggctcctaaggttagaaacttataaatagagagctctacttcatttatgagcaagagaacacctgcatttatttgtttacctacttgttcttaacttaaaagctctcatttcttttcttgatgcattaaatcttcatttgcatatcttttagtacatctttgtgattcatcttaaccttaagttgtatttgagtcattgttgagctaggttgagagattaatacttgttaattgagtgttaaagcctccaagtgagttaaaacttgaagagattgtgtaagagcccactggagccggaatccaagtgtaaaggtgattagaaacttgattgaaacttcaagttagtgagaccttcactaagttaggagcttgaggagagtggacgtaggcaaggaagtgctgaaccactataaaatctgagtttgatttatctaaccttatttctttatatttgcttctcttgtgcttaaatttgttgtgtttaaaaagaatttttaaaaactcaattcacccccctttttgggtgtttttctcttttaagattaacctttatcttctccaaggggaatgggtattgaataggtgttttgttactcttaaagaaggctatcactccccttgtggaagaatgcatgagggaccaacactcttccaacaatttaaataatacaatatacatacaaatacaccaacactccttcaagatgtatgtaaattaatattcaataacacccatcacatacccaaatatccatcaatttcatagtcaaaataaaaattaacaatttaattacatacaaatgcaccaacactccatcaaaatgtatatagatattcaacaacacccatcacatacccaaatatccatcaatttcctagtcaaaataaaaattattttactactttcctaagcacatatgattcaagtttagcctatatatatcctcattaataatcaattaactcaccatcatagtgtaaattcgaaatttcacatacaaaataaacatggatcgattgtcattaaggttggattgattacacaatagagcacaaaaagagtacttggtaaaaaaaaaacattacccatttactctttgtgatcttttattacaaaaatgaattaagataatcataatttaagaaccttgttgattcatttatatctatctactactaagcgattttgcaaacaaccttgatcttaaataaacaagtagtccaatggaggattttgaaagacccaagttaggagtatatatagaaattttgatctaaaattatcaatctacttaaagcactcacacaaattaatgattccattactaatatgtgacaaattcatgcaatcacaaccttgaacgatagacaatgccttgacaaaaatattaggctgacatccactaccccatgtaagcaatttattcccagctcaaaagataatatgagcccgtatttaccccatattgtcggctttccccatttgcagtatgaaaagcacaaaaaataaaaggaaaaacgaaattttgatttgatataatacgcataacattgagatacaaacacaagcttttttaagactaaattatatctttccagcgctattaattatttgtgcatatactgcaaaatgtggggataaactcaatcaaatattggaaaataagaacagcccaacctgcaaactgcaatgaaatcatggtctgatatcttatcaattgaaccatctcgcattttagccaagaagggagaaagtacataaagaacttcgtagaatcatgtgttaatttgacattcattttaagacctattaacagattagttttccctaattttctcttcacttcataaactgaaaatgatttgtttcaaaaggtaaagttctcttttttttctcaccatattacttttttttcttaattttcatcatgatgaaacccaaaaatcaagattcttctaaacaaaaccttcaaaatttttacgaactccattaatgagcattaaattttaagcttcagtctgcacatgtgattaaaatcttcataattttgaattgctcaagccacatgtggttgttctctgtccaatatattatgtttctaatcatagtatttaaattaatagcaaaataaaagggaccacagcactgcatcacgccaatggtgtagcattaaggtcatcggtcaacaaactagtaagtgtcacatatcacaatctacctggctctcttgattctttccaaaattttcctttcttaattagttaaatataattacaaaaggttagcataattaatgtctaatgctaggatattttaacaaatcaaatcctaaaatttctcaaataaataatcattttaccacacatatttgctcatttcatcatattttgaaaaagtttctagtagcaggttatctttcttttatttttccttcttatttttttctatgatttttcttctttttgattgaatttgttttgcttatgatgcttgccagatcttatttagggtttttagattcagtttttgaaaaatgaattctggagttggagaaactaaaagaaggcagaaaggtgagaacttggagaatgtatgcttgtgtctcttatatatataccttatttttgttcctgatttttttatttttctcttcatatcactttattggtagtgtatttggtagcccaattatgggaagtgaatgaaaaaattgaaagtacaattgaatcaagtacattagaagcttttgatcttgaataaagtctggctcttttgagtttgataaatagttctatctttccagacaatagactaaccatgatacttagtgaatcttatggatgcgtatagatcttcaaagatttagatgacttatattgttattagcatttacaggagtacataacagatgacatttaccgtaatgcactgcagtaggcacaactgaactatttaagttcaatcatctataacctaaccaaaaaaaaagaggaggaagtaaaaaaaaaaaaaaaaaaaacacaaagaagccttgtgtatccttgttccttactacaattcaatgttagcaaaagaataccaagtgatgttttttagctttcattaagttgaaaagttagccaatccttaataatgcgtgctggcagtttttgccagaatgttatacaagagaaattttctgattcatctatagtagaacccagtatgagcttctatgttagtatcttacatcgttaattttcttgataaccatggtttctaaattcagtatacatgaggtttggataatgaactgaaagatttatttaaacattttattctttttgtcatttttcgttcttgttgccattcattagtagaattatttgaatatctttatggaaactgaaagtcattagtacattctcaatcaaattgaattatatagggtttatgggtatactatagttgtcagtggaagatatcattttctaggtctttgcctttaacataagaaattttaagttgttttgcattgcaatcttcttatgaaacaggaaaaggaagagcaacaaaagcatccaaccaaaatcaatcaatttatagctggggaacttcctcgagcaccaacagatcttcatcaattcaagatgtaattaaacactgtaaagaagagtgtatatacatatatatacactcattttgatctatgttgaatcatctaattcagatgttttctttccaggaagtttcaaaagttgaaaaacttatcagagaaaatgaagacatggctggtagatacgtctctaaaatattttgtggcgagagaataatgggattggttgtgggctacgataatgaaactgctcaatttaaggtttagtactttcagtctcatgtgaatatatactcacagatgtatatatgtatgtattcatgcatgtatacaagttcttctggcttatgatggaaatttttatgtggcatcttagtttagatatttgattgaacttaataagcactagttaatctttttcataagcttcaatgtcttatgtagtgagaatcttattatgaagtaaataattatgcagattgtgtatgaagacagaaacaacgaagtagttgacaaggagacgttaataagaactttagcccctcctgacctcattgatatgctgtttctttcccatagaatgccaaggtaaggaggtgattaggtttgagatcgatctatcttgtttaccttgcaacctataatttttgaagttggagttaatttgtatgctttatatgtactagtctggatgtcaaagttttcttattagctgtttacccttgcaaacgagaactatgtcaatgctattataagaatctttcaagagcaacaaaaagtaaattcacatttgaagaacatagaagcatgtcttaccttacaaaattgaacaatatttaatatgcattggtatattttcaagtaacaattttattaatttatgtccaaaaatttctatctttaggtcctttcgctttttgtgtcaatgatcaatattacatggttataacatacgcatctcaatgataaggagctagtcttaatccttagttgaacatagtgtttaggattggttttttcttcctttttccttattattattattattttggtggatgtagcacactaatgcattgcagtatccacttagtgccagtaatgcttttgttctgcagtaatacatgtaaaccctagaatctaggtgctctagtatatcaagttttgcttgattgagatcttgtataagtttccaaaatgacgtctattcggtggtacttgtcaacaatgatagcttagcatatggttacctgataaaatgtaatgacattattgactaacacatgcccaagagtgaataaagcagtttccaatatggcagagatctgcaatgctaggattctgcttaaatcatgatacatcatttttcctttctgctcggagtttttatatccatttggagtttgatcaattgccactgtatttcatgtaatattagaagtttggtctagaggtggggtcttagctgctcataaatatatgaaagatatatgctctattagctccaaaaggcacgataatattagaagttctattcttgtcatcaatagagaattttctaaatatgcatatagcaagctgattttgcatgttctcactatccacccttgttttatcttttcagattactatgtatcttgcaacagaaggttctggatagtgaggttggtcatgctaacactttttttaataatcactgatgtcttgctaatttgccaacatatatgtatatctgtgtctatgcaggcatgcatgcacatgtttgtgtgtaagattcaaatgtattgttaagttatttatttttaattagaattgatttttcaaattaggagcatatatagatgatatatattcaagatacagtcaattaagtttccaatataaaggctgatcataggttttaactagcacatgctaaatgctttgtttcctctaggtctttgagaagtgccttgatgtttcattgtgtgggttatatgtgtatacactatctgcaatgacttcaaatttgaaggggcatgtagcataaaaccaagatgaaagtgtgccacatagataaagcaactttttccaggcacataatcccttgtgtttcctttatttccactgttattggctcccaaactttttctttctttctgttttgtggatatgtgtgtctattttgttctaatttcctggctaattttatattttactaaacggtttcttttctcgtcgtcatactaaaatggttttttgaattttaaatcatctaagattgtttaaacatatgggtgttaaatgatcaaccagtaagcatgcagtgatgcttttaaaaaggataattcccttgtcaaaagtttcattaaaccatgtaatgaatgctttagaccttcactctaaagaagtgtgccatctggaattt

SEQ ID NO: 10793 - DNA, 7998 bp, Vitis vinifera
  Intron number 3 from transcript GSVIVT01027213001 (locus G SVIVG01027213001) derived from phytozome v7.0 (chr-ID chr1 3; pos 18179304 to 18187301 reverse strand)
ccattcatcgggtactgcttttatcacttttgcaaaaattaccatgatagcttattgaattaggatagtcatgtcaatctagattttaaggcatagaatgtttgttgtttagtataggggcatctgaaatcatatattgtcttgttaaggaatgtgtggatgtatttgatcaaagaacaaagggaacaacaaagctttcacaagctatatggaggatgaaggatcctgcccaaagaaggaaaagaaaaccagaaaagctgaagaacggagctcctatgctccatagtcaatactgactaataattccttaaccttccaacataggacttgaagggcctttttgacacaatttctagtgaattacttgtttgatgtgtgaagaattatgtagcatgtaaaagaactaaaatcctaccttcaaaaaaaaaaaaaaatgtaaaagaatttaaatcctgaaacctcctcctggaaagtattttgctaaagcatctattccagatttactggaaaagccttctagatcttatatttcttttgcattgaagtgctttagcacgtaatctatcagactgtcaagcactctactagccagaaagagcttttaggtagcccaaaatctgcacctaacaaggccctagccccgtgggcaattttctattgcactctttctgcttccctcaaacagtgcacacagggtgctgcactctgcataccttaatggtcatgaagtgctacaacccatctttctccttcatttctcttcaagcttgccatgccaacacatgaagatctgtttcaagatttgaaggatagcccagagaactccaaaagtagaagaaaccatagtttttaactcatagaacatatggtgcatttttatttttattttttatttttccatatcatttaccccatgttttttttttttttttacataatgtgaataaatagaaaaaatatgaatgcatatatattaaaagcatgaagtatgaagtaatatataaccaatttcacaaaagatagtaggatttaaagagtaaaattatgtcctaccatatgaaaacataaaagtaaaagtctaatgcatagtttcatcacaaaatctacagaaataaactttttgaatttttagatatgatttttagtttcaaattctaactaggcatttttttttatagaaattttgaaaaatagttcaaggtgtattttggctaggttgagatttgaggtgggcaatgggagaagaatcaaattttggcaagatatatagtgtggtgttgttccttcgaaggattcttttccatctctattctcctttgcaacttctaaagaggcatgggtggatgatgttcaggcggtagggaaggtcggtcttgtggatcccatgcttcttgaggcatttccaagactagatggtggataatgttgaagagttgctttggaagttatgtgttaggaaggagaattggagaggacacaatggtttggaaggctaacaagagtgggatattctgagttaagtccttttactttaccttttagttgtaggtattagaagtgcttttccccacaaagataaggtgaggctcttaggcttgtaccaaggtgagttttttcgtataggaaacgacttgaggaaaaattctaaccatcaaccaacttaaaagaagaggttggttcttggcgagttattgttgttcgtgtaaaattgtaaaagaatcaattggccattccctcatccattgtggggaagctagggggttatgacacttcttgttctcttcatatgacattttgtgggttcttccttctttggtgaaagagttgctaatgtgttggaatgagagttttgtgggtaagaagagaagaaaggctaggagaacacaactcctttttgcctattctagacaattttgaaggaatgtaaccgaagaacatttgaagggtgcaacacacaaataattctcttaaggactcaaggaatgaataatttctcaatgtcttaattcccaaaagggtgagtacaaattgtatacatatgagggttgactaggctataactaatttaggactaaattagggaacctaattattaggcagatttctagggatgaattaagagaaagaaataaagcatacaaccttacaaaatcaattacaatatttacaaaccaattgtagctaattagatccgaacataattcgtcaaaattcaaatcttccaaccctctcccttaagtaggtgtaaagatgtcttgcattcctagtttgtctaagatttgatgaaaaatcagatttggtaaacctttggtgaggatgtttgccagttgcctagttgaggagacctacagtatacaagtctgtttggaatctacttttcctttgatgaagtgttgatccacttcaacatgtctggtgtgatcatgatggactgggttatgagctatatttatagctgcttgttgtcataatacaacatcattggctcttttatcttaatcttaagatttgtgagtacaatattcagccagagtagcttacaaattagcctaagccatagcgttaaactcagttctgcgttagaaatgttcataacaagttattttttacatctccaagtgactaaatttcctcctaaaactgcttagtatctagtagttgatcttctatccatgatcggacctgcccaatccacatcgatataggtttccaacttgaaatcatcattattttgaaacattattctctttccaggggttgtctttagatacctgacaattttatacatagttttcatatcatatttaaagaggagaatgcataaactgactcactacatttacaacgtatgttaaatcaggtcttgtgtgcgataaattaaattagtttccctaccattcttttggcagatgccttggttagccataagttcttcattcttttctcctagcctacaatttgactcaatagtggtattaacatgtttgcaccctaacataccacttctttgcgtagatcttgcatagtcttttgttaagaaataaaaatttatttttttgatcttgcaacttctatccataaaaagtaccttagactatccaagtctttgatcttgaattcctttgctaggtagggcttcaattctccaatctcttccaagttcttactagtaataacgatatcatctaaatagttgcctcatcaaggggagaatgtttgaaaaatagtgtgatcacctaagctttgatgatagcccttcaccattgacttagtgaatcttccaaaccaggttcttgatgattgcttgagcccatagagtgattttctaagtttgcacactttgcttgtcctagatttgtgtatgaatctagggggaacatccatgtatacttcctcctctagctccatggaagaagacattctttatatcaaactattgcaagggccaatcaaagttggcagccaaagataataaagttctgatagagttcatctttgttattgacataaaggtttcatggtactctatatcatatgtctgtgtgtaccctttagcaagaatctttgctttgtaactctctatggttctatcagctttgtaattgatggtatagatccacctacatcccaccgttttcttgaagtaggtctacaacctcccaagttttattttttttccaaggcttgtagttcttcattcatgacatctttgcatggtttactgtttaaggcctcttgaattgttttgggagtttcattagaggacaaatgagtaacaaggacatggtattttgatgactatctttgtaaggacacaacatttgagatgggatgtttggtacatgctctaattcgtttcctaagagcaataggcaaattcaaatctctattagtatcaaaattgggattaacatttccttaacttgtctcccttgaggtttggctcaagccataaagggttggggagggcttgtgataggttctaggtttaaatcctaatgtggacaaaaaattacctatcaagagaaaaaaacatttcaagtacctatcatggttcagagattggagcatatgtaggtactagggatttttcttcctgaaatacacattgaaaatagctactttaggtctcttgtgcttaatctcaagagaatgaatctgcaatgtacattttgagttcaatttttttcaggacacgaggaacttgggctttgttcaatttcaatggtcagacttttaggttgattttttttttcttttttggactgtttcactctcaaaaggaataggatgagaatgataaatgatcaagaacttgattataataaaaataggaaatagtacttgataaaacctgatctaaaatttgaccaaaattttgttgtaaaacctaaacagaatcccgccatctatcttccactattttgttactctccctatgaagataagtttcaaagaaatagggtttattttcgatgaaggcaacatccgggtgatgaattttttcttggtgggaggatggtatcatttatattccctttgtgtgtgagaatatccccaaaaaatgcatttgcaagccttatgaatatttttttcttctcaagtggtatgaacatgaaaagaggaaacacacccaaagatttttggagaaagagaaccaatgccttgaaaatttggaaagaattgaaatagtacctataggaggtttgaatgcaagaaaccaagatggcatacagtttattaagtaggtggctgttaggatggcttcaccccaatagattttatgaacttccatttggaatagaaaggacttggcaacgtccagtaaatgctcatcttttcttttagcaacccctttttgttagagcatattgacacacgataattgatgatcaatgccttcgttttgaagatatgtgattaggtcattattaaagattctttcccattgttggatctgagtgtatgtgctggactccaaattatgtactgatgagtttatagaagataggaaagatagtggagaccttagattttgatttcaagacataaacctaagtggattgagtgcaatagttgacaaatggaacaaaccattgagaacttgaattatttgtaaagcaaggagcacaaacatctaaatgtatcaaactaaatggagaaagacatttagaatttttcattggaaatgaagcacggtggtgcttaacaagaacacacacttcacaataaaaatcacgacaatcaattctttcaaacaaagttaagaacactttttttgataggaaacgacataggaatatattgataaaagaaggtacaattagaaggatgaggaatcctcccaacaaagagaaacaagactacaagtaatcaaatataagaaagtacaaaaagagaaaagtagacactctagttatacgccgctaaccaatcaagttgtaatatgttaagaggaatccccttaaaaaccttagaacaaaaagcccaaaaagaggtaagaaaacaaatagaatcccaaaggtactcagaattccttgctttgtcctaaaaaatccttgcatttctttcccaccacaccacccatattaacgcgatgcacgcgttttgccataaaacaatccctctcttggaagatccaaaaccattaaaattactagataacatgtcagagatgctccttggggaaacccaatccatctttgctgattgaaataatctgtgccacaaccctatcgtcaaagagcaatgaaggaaaaagtgatctactgtttctccatgcttcatgcacaacttacatatgtcagggctaagtgctttgtagggtcttctcaattgtagcaagtcattagtattaaccttcttgtgagccaccaactagacaaaggacttgactttgaaagggacttgagcattccagacaaacttggtagggaaaactggaggcgactcagaatattgggataaggccagaaagaaagatttgactgtgaaaagacctgaaggagataaggaccaagatctcttatttggaaccgaaggtgatatgtgtagacgatcaaaagaccgcataaggccctctaaatcttctatctcagaatcagaaagatttcggcgaaaattgaaattccaagagaaggggcgggtatatccaagaattgatgaaataggaacatttttatccgtgactacgctaagtaatcttggatattggacacccaaaggttgttccccccaccacaagtcatcccagaaccgaattctatccccattacctaccacaaaccgagtaaactcggaaaactcttggtagactagtgcaatggccttccaaggacaacgatgagaccatctaactatgttgttgacatcccagccattggagtgtgatccataaatgcttaaaataacctgatgccacagagctgaaccctccctaggatatctccacaaccacttccctaaaagagcgacattccttatagatatctttccaaagttaagaacactttttcaaacgatggaaatgaaggatgtcctagaaatatatgccaaagccgaatttgatcaacttttggagaagaggtatcaagccttgtgaccttaaaacaccagtcttccaatcagcatccagggaccttcctttttcgttaaacaacacctacctcttttaacatttttcttcttcttcttctccttcttttttgatagacactcttatcattcattgatttgaatgataagagtgtctatcattcaaatgatcaaatacctttctccagcagttggctgtcaaattgaatgtcaggaaaagccgatggtgttggtattttagcaagagatgactatttacccttcttgatgccaagtaaaagaatataccctggaatactcctctcatttaattcatttctccatctttcttgatctctccaaacagaatttctctgccaaaatctctctacatgaagaaaacctctctgtcattttgattttttttgttcttttctcacactttctcagcaatcgaataatgcaagataaaagttagttattccaggcaaggaaagctgtccattggtccttaagttcagtttgcccacctgaatcagaggcagtacttcgaataattcttccaaaacaagggcaagaaattaacttttaaagaagactaccaaatcatggttgggtccagtcaattcaatgctctgtgatgccttaagtcactccttggcctcatcatcaatggcctaaacaactggaaatgatgttcacagctgtactgctcttcattcgtaatgcaattgaactgtaagatctgtaatgactgatcttctgtcttgtaacttttcaatcaactgctccctcttaactttcccacttgaccaagaagatcaaccgcgcaataagaatgctcggttcaagatttaatattaatttttgtaccatctcattaaatatcctttccataattgaatttgatggtcaactagcagagaggatgtgtctgctaaagccactaaacagcaagggatgtcaatcttttaaaattcatggtggacgtccatgaaattataagaaaccttagggagggtaattgcattctcccctgtatcatatatacttacattcaaagcatgttagcccaggatgcatgcttttgaaagatattggttctttaaatctgttcataattgttatttactagtttgaattcttacttctcatttctaattgaaaataagttttaatagtaagtgtgaggtttaagcctcatcattttgaagggccatatgccttgcctcatgcctttgcatttaaaatctgaatattagttcaagtcaatggaatctactctagttcattggtccttttaaaatttttttttttttaacttttattttacatcttaatttttctttaaccaatgtcttttgattcatgcaattactattatatggctttgcttgcagattttggaccaatataaagagtctt

SEQ ID NO: 10794 - DNA, 8104 bp, Vitis vinifera
  Intron number 6 from transcript GSVIVT01028621001 (locus G SVIVG01028621001) derived from phytozome v7.0 (chr-ID chr7 ; pos 10947257 to 10955360)
gagttattgtgctttcttagatttgggtctctcaggtaaattcatctatgattgtcatttctcaccgatttatttcttttgagctatcttttcagcatttttctaatcactcaaagatggaacattctgaaacattgtggcagccagaaaaaaaaaaaaaaatgttctactccttttatgaacaggatccttttgaaaatgtcttgtttttacatgcatacattttagaactcaatcaaacactaattgaatgaacttccaggaataacatgccccatcattgtagcttttagatgagtttttgagaacatttttttctagtcatcatatttcttgtgcatgtgtatgcttttgtgcagtgctattttttccctttctctttaggatagttttaaatgaatgttgcattcttacatatctctttatgtaaaaaaacatttgtattaaggaaagatgaaaaggtttccccctaaaaggaaaaaagaatcttgaagaccatacaatagcaagaaaggtatttaattattatggaaaaaaaagcaattaagagttctttctatccatagtaagattctttggagttaaaggaatttaaaaccttggagatgttgtttctctccatacattgataagtttccaatgactgtcataataatttttagtgttaggcaaatcttctattgcatctttaacaccttctcttttagcttctttgagttgtatggcttgcacttaccacagctaaaggggcttagtgaaaataatatttcctcgtgcttttgtagtatgttaagttaccaagcaaaaacttaagttattagattatggactattatagtatgttaagctaccaaattgaggcaaaaacttaagttattatataatgagctaacagtatgtattggccccatacttgcatgaggtgaggcaaaccacaaatgatggatcacagtgaaacagatggaaaaattggaactcaagacctctagttaaatagaacttgaatactatgttaagcgatcaatttgacctagaagcttaagttattaggtaatgctccaataatgtatattaagctatcaaagtaaaacccaaataactaattaggcttctttgtcaaacaaacagggcttgatgggtcatgccaccttgaagagggaaaagatgactcataaattctacttgttattatgcttgtatgaaaggatgataatcgatttgtattttccctttttttgttttgttatccatgtgtgtgtgtgtgtgttttccccttttctggttggctttgttgttgttattgttgtttgtgcatgttctttatatatatatatatgtatgtatgtatgtatgtactagtgttaacttctttaggtaggggcttcaaaatcatttggtactttagtagactaaatcatttttattggagttgattaatgaatgataagcgtatatattggtaggtttgtttcagaattgtgcattaggttcactattcgaaatgtttgtagcattgaagaagttagatctgtacatattttgagggaacagagatcgcatttggccatttttaatattttgaaactaggattggtggtaagagtttgcaaccacatttggggattcaaattggtttgacatatattctgcctttgcaagttctacttaaatatataaaagaaacatgataatgcgtggttcaattaccaattcaccttagtttgacttggttttttgtttgtagggatttcacaagttcaaagcctatgctaggtagggttagaatcgacattttaacatggttgacttgtaacactgctggatcaacctactttttaagtcaaaactaggcaattcaacctcatttacacttttcgtgaagttggaacattggaaagaaccaaaagaacaatagacaaaatacacaagctataattgtagctttgtgtcttaaaaaatgatgaagttgaagtgaaatagtttacaaggaataatttttcacctgaataaaaaatttaatttagaatatgatgttggttattaaaggatataagtctaggaaggcagattttgtggagggtaggcagattttagacgcagtcttgattgcaaatgaggctgtggactcaaggttgaaaagcaatgtagtgggtgtgctatgtaagttggatatagagaaggcttatgatcatgtcagttggagtttcttgatggcagtgcttaaaaagatgggctcttgggagagatggataaagtggatagaatggtgcatctctactgtgaaatattctgttttaataaatggttctccttccggttttttccaaagctcaaggggtttgaggctaggagatcccctctccccttatttgtttgtgatagctatgaaggtgtttagttgtttattgagaagggctattagtgggggcttcttatttgggtcgagggtgagaggtaagagtggtgaggggattctaatctcgcacttgttatttgcggatgatacgttggtgttttgtgaggagtctctagactggatgacgtatctaagctgacttctcatgtggtttgaggcgtgtttagggttgaaaatcaatttggagaagagcgagttaatcccggtgggtagggtgcatgatatagaggacttggccttagagttaggttgtaaagtgggtggtctcccttcttggtatttaggtttgcctttgggggcctctttcaaattagtggctgtgtgggatggtgttgaagagcgtttccgaaaaagacttgcaatgtggaaaaggtagtatatttcaaaaggaaggagactcactctaatccgaagcactccatctagcatgcctgtatacttcatgtctctcttttacttgccaagaaaagtgaggttgagactagagaagattcagagggattttctatgaggtgggggagctcttgtacaaaagccgcatcttgttaggtggaacttggtttgcttggaaaaaaggaaaggtggtttgagtgtgagagatttagctctgatgaatatagctctcttaagtaaatggaattggcggtttgccaatgaaatagaggctctttggaagcaagtcatcagtcacaagtatagtgaagaggaggggggatggtgcactcgggcagtaagcgggagatatggtgttgggctttggaaagtaattaggaaagaatggttgtttttaaatggtaggttagcctaccaagtgggtagtgggcagagagtgagattctggatggacaagtggcgtggaaaagagctactttgtgagtccttcccttctttagtttccatctctttgtctaaggatgcttgggtgtcggatgtttggaacctcgatggtgatggggatggttggacccctcttttttcaagggtgtttaatgattgggagattgagttggtggaacgttttttgcataagatccaagccttccgggtgcaaagggaggaggaagatagagtgatttggagaacatctaagtttgacgctttctgtcaagtctctttcttctattttggagcccggaggttctcctttgttccctagtggtagtatttggagggtgagtgtgcctcctaaagtggccttctttgcttgggaggcttcttggggtgaagtcttaactttggagcaacttcaaaggaggggatactcattggcaaacaggtgttttctatgcctttctgaagtagagatggtgaatcaccttttacttcattatgtaaagatgcgggttctgtggaatcttcttttctccctttttggtgtggcttgaactctctcgtgtacagtgaaagaaactcttcttgggtggcatggagcgtttgtggggaaagctcgtaaaaaggctaggcaaatgacccctttatgtatattttggtcagtttggaaggaaagaaatttgttagcttttgggaatgaggagctttaacttcaaaaactgaaatatttttttgtatgtaatctttggtcttggattagggtgtctatagttttgagcccttcttctcttataagttttttagattggttaggctcaaagtaagggaagatggtgtgtttctctcctttccccctcggagtgcgactttgggctgtttttgtatactccctgtatactttgagggcattgtttttggtgcttcctcttctcatttaatatgcatccttttatctataaaaaaaaaaattaagtctaggaagctctaattgattctaaggagctaaagagtcttttttatttattttttattagaaacaaaaaatgtattaattatgaatagagagtttgtgagaagaatggggaatcttcctcaaaaatacaaaaaagcttatcaaaacaaattgaactcctccactatacaagaagatctacacaaaatgggacagatcacaaaagaatgtacaaatatatcatctccttaaacccgagctaagctcctctcattgttgatccaacccttttggtctacgcattgaatgccaattgagttgaattgacattgggagcattgcctttaaaatcgtcagtacaaatggcctataaaaaaaaaatacaaaaaagaatagaaataaagtagatcctaaaatatctttgacaacctccatttatcctcaaagatcctagtgtttctctctcaccacacgatctaaagcaaagtgagacaaacaatctttcaaagggtcttacctctaatagagctccttaaatggctaaactcatatatgaaatgatcattatgttgcataaactcctaagttgaaacccaatccatcttggctatctaaaatagcctgtgccataggcccaaagtagttaggcaatgtaaaaagagatggtcaaggatttgatgagtttattgtcttgctatattcaaatctcagtcacttgaatgaattctatatgtgccatggatcatatcctctctaatatagaatggatttttttgcttagggctttatgtgcaaaggttgaaggttgattaggaatatctagagcaagttgagatgaagggtttattaaatttaattaagaggttccatatgtggtttatgtaacacaacatgcatagaagtttttttctcccttaaagagttgaagggaaaaaaaaaaggtgggaaatgtgagcaatcatatgtttcctaagcaatcacaatttggaaataatctaaatcacttaaaataaggctctgtttgggaagtgtttttgaaagcagttctgaaattttttttttgaaaactattatctaatgttttgtaaaacaaaagtttgtttaggaacttaatgttcttaacttgttttctatgtttttaaatgtattttaaacataacttttatctgtagtgctttattttttatcattcttcatttttgaataattatgtttagtccttagaaaataagtgaaaacaattaacagatgttctctaaaacactttgggtatgtttggtaattgttttcaagaacaattttatgttttttagaacaaaaaaattggaaaacacgttgggtaattaaaaattgttttttgttatctattcttaagaacaaaaaaattgtgtttttaaagaacatcttttaattgttttttgttgttttttgagaactgttttaaaaaataattatacaaacatgtagaatgattaaaaataaagcattagacataaaaattatttttaaaatattaaaaacaggttaaaaaagattttaggttttcaaacagatttttgttctataaaatattagggcctgtttggttgctgtttttgaaaactgttctggaaaacagtttttgagaacagtttttaagaacagtttttgatgttttttttaaaaaaaattgtgtttgggaactgaattttaaaaaacagtttttgttctcaaaaacaaaaaaacatgtttggttgagttaataaaataaaaaatttaaacaaataaaataaaaaacacgtttgaaagatgttttttttttcttttctaattaataaaatattttcttcaagtaattttacattataaatttataaataatttttagatatatagttcatttgaattaaaaaaattatttattttattaatttaaaaataaaaatattttttatatttttttaaaataaatcaaacataataaaattatttttattaatatttttttatttaatcttaaaaaggtataacatattctattaaattgagataaaattgtgctcgtgatttattaatttttttttttatctctactaaatccaaaatgtcacccacttctctctctctctcgggcatcaaaaagcccttttctgaagttgccctccatcgggcatcaagaagcccttttctgaagttgccctccagccaagagaatccctaaaaggccctattttcctctgccactctcaatcctcgcaggtactaatctaatcatgttattattattatttttttttttgcaacccccgtttgattaccaagaaaatccatcccccattcgatttccgggaaatttcatcctcgtttgatttccgagaaaatccaagcaaaaaccccaaggaaaaccaaaaaaatggttcttttgctccctgtgttttctggatccgttttaggggtctctttgctattgtgccattggatttaaatttcacgaaccttgaatcaagactgagactgtgctggagaagagatgagaacgggaagaaaaaaaaaacacggagaacaagttgtttttttttgtttaattttgttctgtaaacagtaaaaaaacgaggaaaacaacattttgttgttctctaaacagtgccattttgagaacacgggaaacaacaaaaacaaaaacgaccctgtcaaccaaacgagtttttggtgttttttgttttcaagaacagaaaacagttcttgaaaacactaaacaaacaggcccttagagaacaattttcaaaaactattttcgaaaacagttaccaaacatgccttttgttttttgtttttaaaaacataaaactagtttctgttttctaattgccaaacatgttttcctatttttttattatggggaacataaactgttctcagaaacagttgccaaacaaggcctaagagatttaagctaaaaaactcattgtttactcactatcaaagaggggttgacaaccctttgtagacttgtaaataatgaaaataactattcatagcacttaaagcaaacaatctactatcttcaactcataatttagacagtaataacctaaaatgatgtaaatggttaacaatgtcatgccatattaatttgttgtagtcaaaattttttaaggccttcttcaagtgtgatagttcaagtatcactctaaggtggagaccgttcaaaaatgcatttagagcaaaaaataactaagtaaataaatacattgaacccccaaaaggtgtacagctttttcacacttgaagtttgaggcataagcctcaatgatgttgtacatgtgcgaaaaataaaaataaaaattagaaatagaacaagaaaagagaaaaaaacccctacattcatagctctgttttgtcggcttcattcctctctattttctcttcctcatcaatgtctcctcgtctcttgttagcatcaccactgctctggttcatgtaggttgcagccttgcaagtgcttctctctctctctccctctctctctctctctctctctctctctctctctctctctctctctctcccttatttttgtgttattaaatttgttggaaatgaatttttttttcctttctatctaaatcattatcaaaattacttatttgataggacattaattttttaacgatattgtattaggaatagaaatctaattcatttttttattagtatttttttccttttctcatttgatagcatattctttttccatttataagtattaaaatagatctcaattatataatttagttattatcttttgtcaaattgataaagatttatgcaattaaattattattgctttttcatgttgaaaaaaattatgtattcattagtgtttagcagggaaggttgctgttacgaccatagcttgtttaccc

SEQ ID NO: 10795 - DNA, 2599 bp, Vitis vinifera
  Intron number 2 from transcript GSVIVT01020685001 (locus G SVIVG01020685001) derived from phytozome v7.0 (chr-ID chr1 2; pos 3115438 to 3118036)
cagatacccccaaggaaaagtgcagcttcctacaggtttgcactcaacagttctgttaaaacttgatattttgatatccattgacttgattttcttaagacattcttgattttagtgttcacatatttatgctgatcttctgctgactagaaggctaaatttgttgttgtatatttaatttttatagttgcagtgatcttagtcaatatatattacatgataaattttcacaaattcccctcgtagttaatggcttattatgaatgttcattcatggaatggaaaaaataatattcaagattaaaaaaagaaaaaaaagaaaaagaaaaaaagaagtagaaaaagtatggaaccaaagtcaattggaaacctttgcattctgcaattaatgttaggatgttgttgagtcaaatttatgtaatattggctttaaatgtaaggttgtgttgttagctccttcagtccagttgtctaaagaatcagcttaggatgttgatcacaattttaccttggacttatttgaaaatcaaaagtcaaagcttctgtttcatcttgtcatggatcttggaggtaagaaaggtaagtttgtgagatacttgagtgctttctatgcaagaaaaattcacacaaaagctttgttttatattggatagttgcatatatcttttgaaaagttgaaaagtccttagagctgtttttattttattttatggtttatcaatcgatccagactgaggacaatttatgctacagtaaccgattcatctggactgtaaaggtgattgtgctttgaaattatacatctctacaggggtcgaccaaaccattagagttgtgttgtacttctaagttttctggacctttccactttgctgatgacatccttaaaagatcccctttccagatttgggtataaatatctcattttcagctcataacctcctaagggcaattgagagctagagagaaattgaattatagagatcttagtggggcactcctgaattgtgcttggattctttattgatttgaaaacctacaaccattctctcaattgtgtatgattctctattcaatcccatccttggagtgagttcaaggaggctatatggtaccacaccttggaagatccataagaggtgatcaaagggatcatgttggtcaactattaagagttccacataactaagccaaagggtggattaatgatagaatattttaagtcaacacttgttttcatatggtgcacccttgaatttatgaatttgtgattaaaatatatgttttgttattgggatacttcattaattttcagatttttagtttgggaaagagtatcaaagcataactttttattctttaaaattaattggaacagttgattctagtgaatgtttagataagtaagaattatgttttgaagttctaattaaattttttttattataattgatgatagtcattttggttttggtgtaccataggaggttgaattttgaaaatttggagtaaaacatttctaattcaaattttattattttagtattgtttgttttaatttttgaattaaggaatctactaaattttttaaaatttaatttcattaagaattgaatgaattatgagactaaaatagtagttgcatacagtataattttaatttcagttttggaattttgtggatttattttaaattaatttcttgtccaaattaagtaattcttatgttattagttttcttttttagttataattcatgaaaaaaaattttaaatctaaattttcgtgagaaacaaaagaaaaatgaacaaaaataaaacctgtttgaatcatatttggttttttttcatgacaactttgctaatttatagtaaattaatttctcatcaaattgcacaaagttgaagtagtttaatttttttttaagacaaaagttacccaaaattttcaaaaatgaattcggttatattttatgtgacaaattggtttaagtattgacaaagttaaaggtttgaaaagggaaaggagaaaaagtgacttgtttcattaagtttaaaggaaaaaaagatccctttttctattaagataaaattgttataaaaagcaataagttaaaaaataaacaattctagaaatgacttaacccttaaagcaagttgctttaaaactcaagtgaaataaaataaaataaaaaacatcttagtttggcttggaaagatagaattgcaaaaaatggttaaatgatcttttgccatttcttggtgaccgtattgatgattctactaaatggggcttccaaattcatattctgtctcttttccttcattttttttttgtttgtttggggagcaaatctatatgcacattattgctatctgtcaattgggcatattatttgttgatttggcattctggctacctaaattctactaaagtttcgatttcttgtatttgctgtaaaagcccatatgacatcagatgaaatgaatttgtaggggggtgttccccccaaccccccaaccaaaaattttactgctgaaattttatttacacttatggaggatgaagattttattatctgaagttcattttagggctg

SEQ ID NO: 10796 - DNA, 8660 bp, Vitis vinifera
  Intron number 1 from transcript GSVIVT01003627001 (locus G SVIVG01003627001) derived from phytozome v7.0 (chr-ID chr1 6_random; pos 491590 to 500249)
tagtcaggccaatatatatttgcaagcccactgaggtccctagcagtaccatcaagcatgtaaggatcaaatggatctctatgaacaggattatccaaaaggcactccacatcgggcaacccctcaatcaagcaaccaaagcccactgaattaattctagcaatctgttcactagcccctagagaaggaacttagaacctcctgatgaaaaacaagattcttttggaaagagaagacatcgcatgtttcttaagtatcccagatggaaggcgcatgggatactaaggctggttgaaagttggtctgatcttgatgtttggatatatgagcagcatcccagaatcccagaatcccgaactggatcaagatttttcatatacttaaactcatcctctaaaaatggaatagaagcctgaggtcaatgaatccaaatagtgaagagggtggctatgcatgtagggagaacaagcacgtggtgaagccgccaaagaagatagaggatttgcctgaaactgcaatgttggatactggacagtgagggctcatcagctttactggagtgggaaaaaagtccagtaatgaagcgaattcgacaattgccatggcatttttccataatgatcaatttatgaaaagcaaccgacatttcatctttctcaagcaatgcttcaactgagttgttgaactcatcaacatttaatacgagcttcagaattaggctccccagtctctggcattagatcataatcgctggggggaggttaagtatcctcaaagtccatgctttacttcagaaatttctggcttattttctatgacatgcgatcatcaccgaaccgctcatgcatcagtttcctcgctccagttttgctgcactacttgcccacctgtaaacgagaattatcttatcaaatgtaaattcttggatggtaatcaagtgagtctaaattgctctccggagaagaagcaacaatcccactagtgcttgggccatggatggttgaactagatgaaactgggaatcctgacctcatttgaataataaatgcctagttgttgtctcttggaatttcaccaagtaagttgtcctcgagagtgttttctctcaaaggatcttttgtggcttgctggatgcttgtctctgaagattctccaactttataacctgacatggttgttgatctatactaccccatgcatttttgtcagcagcatcatgagattctgctttaaattttttcaagtgactaccaactactccaacagtttccaggtaaggatcactgtcatttactctgttaaaacctctaagccaaggaatttcattaaacctgttttcaatgccacaatgttgaaaactttgcaggtggggtttcatgatttcgtggcattgccatgaatcctgccatatgatctgatgcaaaactagactgttgatgagatgatcttatttcttcactcggaccccagaccggaaactaggagacttgcttcttaggccagtgagaacatttaatacttggacagttaatccctttggagcttgcttgtgcagctatcacctatacttgaagccacaacaccctatgcttcaaagaccatattgccatccataaaagcatgaccatcatgaattgcatccatagaaccaagatttgcatccatcttgttagaatctgaaactgaaatgcccagatttgatcctaaaacagattccaaggtgcaccaggcttttctcgttctaggactcggacctcaaattcatctacggagtaaatccgatgtggttcatcagggctcaaattatcattctcaagctgatggctagatttttcatttttgagaactacttctgtgttttacaaagctgtttgatcttcctgaacttgctcacttgcaatgttgcttgagatagaagcttgatcttctagaacttttgcatttggtacattgcctgagatagaaactttcatctcttcattagttttagtctcttgctttgctggatattcaacaacaatactagaggtggccgcattagtttgttcagaacacatattcattgatgtggcagaaggggatggagtaaactgcatactcgatgctacaggttttgcagaaccaattcgtgacatacttggtacaataattggataagtggaaaatgatgtagttggcgggccagcacacttgtagtgtacattaggatgatctcccacaaaatccttgttatgcatcttcttttcagcaatccccatcgagtttggaatataatcttttacttggttttctgccataaaccaagaaaaagtgtatctccactactactgcttgcactactgccaatgctcagaatcaaatattctaaaaccacatgtattgagctgcatgatgcggtaaatgagttgcatgtatctgcctgcccataaacaacaattatcttatcaaatgtaggttcttgaatggcgatcttggccaccagattgccaacagtgggttccatactttcaaaacagtttcctttctctggtttcctttctttttggctcataatctagcgagtgattccttcaaagccaaaatttctgctgcagcttaaaacgttcacaatcagataacatttgttttttcggagttgaatttaccgaagtctgcgccttttctctagtgggagtcacactggaactagaaattgaggcatcacttggactaaacctaggctggggatcgtcttcctctaaattcttttctaatagttttgcttgtcgaagttcctcatgagcttctgccaattttccttctctcttcagagaaattgccttcctttaatgagccaggatttcttgttgaagggaacttttgttcttctgagaagtaaatgcctgacctgaatttgctttacttacaagcaacttcctatctgcataaaccatctctcttcttctgaggtgcagcatcaactttgctcctcaaatcttcattggcactcttcagggatttcaccagaagagggggattagtaaaagaggaaattccagaacttaaattccattctccttcttgtttttcaggaggtacatgagaaccattccactcatccccagaaaaactgacctcactcgtaatgctagtgataataaccgaattagagacacttccaaactcggcatttcctgtgcaagaagcattctgctggtgacaaatggtaagtttgtttccttggcaactcctgcagctatctttacatcaaaccctttctttgtgttgaatccattccctacagaagtgccaccttgaacataaaatcatcctttgcagaaactgcattggatgcctcttaaaaccatgctgatgctggaattggcttagaactattgatttatcaataccaatctcttcatgagtggtgccgatggatgattcagcaaacttccaatttagatgattggggaactttcttggttctgctccaaaagaaaagctagaactctatacttcattcagtccctttgggaaagagtggggcatgattgaatttattaaatttaatgcctccatggctctggagccgtttagccagacgaagtataaactttggtgtctcagcaataacaatttctagagaaaatatacctgtttctcgagagctgtgatatccttcatcaatgggtgaaatttctttaaagcaatcagaatctctttctttagatgatgatgatgatttaggcaaagtcctgaaacaatgaattgctcctaaagtagatattctctcggctacagtaggactgcaaacaccctgttccatgccattgctgaatctcatgcttgtactttttggctatttgtatcccattggtatcgcatcataaagagattttagggattctaaaaatgactgtaactcagaaggtcctgctcgatcttgatctgaaggtgaagatagacttgtagagagattattaaaggaaattcctcgtggtgtgacaagaggtctgggtgcttgatgcagaaacgtgatcagtttgaacagatggaaatcgtgggatttcctgtgatggtttaggctgctgtataatctgcatgggatgagcttcagttgaatggtaaaacttctcttttccaaggggaggttctggaagaaccagaaaatttgagtttccaggtaatatatttaggaacttatccctctggtttatccaactgtctctcacatagtccatgtgtactggcgcttcggaaagtctctagttccatctcaaattcctttaggtgttgcgtgttgtaagggtagagtctcctgacagacattcctgtttccattaacttctgttgattccttatttcaaatccattaatcaactttctaatggttctaagcaatttccttatttgagatccttttccattcccactactaatgaagctaggtgtctcaaaatctttagaaacacttagctcactctgtatcataatctgaacctcctttctactaggttcaggcatctctgttagttgaaatggtgcaacttgtgttctacttgcgtcttttgcaactcgctttttgtaagcagaactcaaaggactctttggagctttctgatattacaccccttcttgcccagtctagagtacaagtataccaccagggccctcctccaaatgaatttgaaatatagaaattaaggcagcatctacataatctggcttagcatgaacaccatgaaaaccaccccacataacaaaaggttgtcttctatatcctcctatccacgttattggtggcatgcccttgacctccaaaagacataggaaaactaaaaggaggttcattagaatctcccaacccacttctcaacaaaccctttcagatgcaaatttccagtttctttcaattccatcatgtctttcatacacagcagtggtttcccatgctcattagttgtagcattaacatgataatttgcagaatccttgagccattataaccgatgaactccgcaacagatatttctattctcttttggtcaatgaactctttggtcccacaacagatgggcattagtccttgaatgcaaataaggtaccagtctcttactgctaatcgaataacaggcactctagcttatacaagggcaactgcttcgtcagtcatagctactgttttagaaggctctacataatttactttgggacttggtgagatatcaacctccactttctcagatgtacccctgctctcactatcacacttaatctagatgactgtacttgtcttgtagactcccaaggatttgagactatgaaagcaagaaggaataaagatggatctgaagcactccaatcctgtagatcgattagtgaaacataggcgagtggatacaggcatgagagtagtaaacaaggaggcttccatcttctaaacttgaagtatatctcaaagtcttgaaatcacatgtaggagctagtgtagtaggagcataaacttgcatgtatatcagttcaagtattctcccatcaatatctgcttgtcacggtcagtaaacatttcaatgagttttccatgtagttgtgatgatgctaatgacctcaaaaccacatatttgcaaacctttgagtagcttggaggatcaatgttataaaaaaaatgactcacactaggagcctgcccaaaccactttttccttggaaaacatcgcttggaaaccaaattaccatcttccatgctaggttgacctaggaatgtagcatattgattgcttggaaatgaactactgccagatggattctgctgcattgctgacctatccacttgcatatgagaatattggctcgaagtggctcttatgttagaaacaggaacctcatacaaagactgatcagcatgttgaagagccaaacccatcaagcaaagtgcctaccataaactcagcgtgtcaagcattctaatcccacttagcacagccccctgcaaagtgtacagaagctaaagaaacattttgagcattgtgcgtgcagatttaaaaacaagaataggaaaataatctcctaatgcacaatgtagttgaaaggaaatgagattattcttataccaaaccaaataaatgagaaacagacaacccaacaccaaggacgaaaacaaacatagaaatcaatcagattccaaatgaattttctagtgcatacatccagtcaacaaataacactcaaacataacaaagaataatgataaatagtgcaaaatgggagaaaacagaggatacctagtaaacttacctaagaagtatttcccaatacacttctcatgctcctaggaaaccagaaaaaccccctgtcatgcatgaagaacaaataaacagggcgagaatgcgagcataccttaacagtgaacaataatgcgcttttataggaaacaagattagtacacaatgataaatgtaagatatctcacatgcatcacagaagtagatcaaagtgagatgatcgcaaacaaacaattcattggcattattatcaaggaaaatatcattgggcccctaccaattcccaatttattaacatgaattaattgcgcaaaatttcatctttctaatgatcatggatggaagatcatagaaatctagatgaattcctttattttggaatttagagaatttatttatgtttatttaaaattgagaagatcacgaaaatcattaaaagaaaataagaaaaagtgcatgctaaagtgaaatatggcagcaagcctttctttaaactgaattttattttctaaggataaagttttaaaaacaattgacattattttgatggaacaaagatttgaaaactcgattcaaaacaagtaaattcacataaagatataaagaaatgcatcaaaaggaggatagtgtgcaccaaggtggccaatgctagagtggatgcctagggttgtgactgagaccgtattgctatatctgaagctgattcctcaactccattttgctcaattttttggtgcatctcattaaatcaggaatgtacatctccttcattatttatctctttgatacacccctcttgccaatcacccacattggtagtccttgaaaactagtactttagttgtcctgagttgcaagaaattcataactgcaatgagggccttctccagttgacactcagctaattccccacaagaaacattgttttcctacgtaatctgatgttacattcctgcataatcaatataatagcagagatatccatccaacggcagcgatgtaggtgcaaagtatattggaaaatagcccaccaagctccaagagaaaatagatgaagttaccaacatttccaactcatagccactcatggcatagttaactttaggatgaattttctaggcctttaaacattcctccaatgaatgcatcccctgctccattgatgtcaaccagcttctggatccatttgtgtttcagcatgcctagcatattactgacacaagtcaagctccattaataccattccaaagatagcaactctttggatgagatcatcaagtcaaccatcagctaggatgccagatccacatgattgcagagattcacatcatggtaatagtggttccaagagttcatctgttgtttcaccattgttttccatgacatctccaatggtgtctaaagtagcattgtcctcaactggctctggcgtgtccataacattcttatcatgtgttgattatccagatttgccttcagtatcttggattgttattgaattagctatctcagtagtttctgatggttcagcaacaacaaattgtctgatggaactttgggaatcgcctttattgtctctaacagattctgaagtttgttttatgtttgtctgacctgcttctgctttattctcgctcagaatcatattgacttctaaagttttctttgagggattagatggttcctgctgacctctggattaaaactccatgtggaaacttgatccactaggaccttttctggtaatacagactttggagatgaggataaacttgaattgttagaattttgatcgattgccaatttaggctgcacagctgatgcaacgaaattaccagatccctgggtaaacatcctttctgattcaattccttttttctcatagttgatcaaccttgctagcctttacctgacttccttgaacctgcatagcaataggttcactagcagtataactaaacactttggccatctctcgcagttattgcacgaaaaggagctctagttgtataatctccgacaaagtgattttcagttctggaacaacaaagacgcatgtcagcaaagaggcaattctagccattcaaggagagcctcttctggagaggctgctcttaaatgcttattttcgggactcataaactccatatgctccatggttttccaagttgccatttccacccgaataagaagttctttcttagccaacctgaaggaggagcaattttgaaatgcatccacactgtttccatcaaacttttcaaaccactaaggctgtcactcaagattagatcttcattatggtatctagaggaagacatatccaaatcttagggccctaaagagtcaggccaatatatatttgcaagcctactaaggtccctctcagtaccatcaagc

SEQ ID NO: 10797 - DNA, 4973 bp, Vitis vinifera
  Intron number 1 from transcript GSVIVT01015405001 (locus G SVIVG01015405001) derived from phytozome v7.0 (chr-ID chr1 1; pos 3330858 to 3335830)
ggaggtttgcttctgacttgctaattatttcttggcgagcaatgtatatatgtgtggacttaaatgttaacgtctttgtttggttgaaatttggttgtggttatggtctgttacaaggtttacttgttagtatttggattgcggttttttattgtgcaaggacaagttcattcatgatgttttgtgataaaaagtacatctatatggtttaccatagtttccactgtttgttagttgttaatctacagagttttcaattttattattgaaaatgaaacgtctcaaatttctgtaagaaaattagaaaaatatgttaattggtatatttgaaaaaaaggcacaaccttagtactcaagaagtatagaaagacactaaagaaaagaaaaaaaaaccatgaaaaagaactagaggaatcactaactagcctcaactgctcctaaactatctataaaatctaagacaaatactgagaaatgttctatgaaacttaacggaaccactagatcaaccaaataaaggtttttaggaacaactccttagcttcaatttgtagactcttccacaactttgcacaaccaatgctaattagcaagcaattgaccttgtcctctaagctaatcaaatgtaagaatcctctccaatgctacctaccaaaagaagagccaacgtctagcagtgctgttggtacccaaatctccctcagcgggaacgaacaaggagagcccaaggaaagagagttgcaggacttgaatgaaaaaaaaaaaaggatccttccccaagactccaacctcaaagatagccaataagggtccccttttatcatctgaagacaggatatgctatagaaatgccgctttcaagcttaggtttctaagctacccaaacatctgccactaaagcatctttttaaaaactggtgccaaaaagaactggaaaacagtctttaggctctaactcccaatacaacacagcatgccaaaatctagtcaggtcattacccatctaaatatgcagcaagggtcagaaatattctaactcttcccaatagctttctataggtttccattctatacttctctttcccctccttggaactccatttctctccatctctccgaactttcctgtgataacttgcctccctgggctgtcatgcttccctgctcatgatcaaaatcacttcccaaacaagaccttattaatgattgaaaggttcccaatacctaaatcagctttgtgattatagtagcaattgctaactatttgaccagatgatactgcctcttttatgcttgctccctgataagagatcacattgaatcttctctagcctattctctagtttcttttttgttttgacgcttctaacttgatgatgcttgctttttctaggtttttaattgagaaagctttgcatgaagtcctatatgagctgaaggatcatgatgtgaattgtgaaattgcattactacatgatgttttattgaatttcctaaaatatggaacattggaactttttggtccttagtagttattatatctttgtagataagaagtgtcaaatttttatatcttttattttttaaaattttgcatgtatagctaatgcaattttagcatggcatgtttttttctctttaaaggtgtatgatatagaagatcccttaactgggtaaggaatcaatcaagaaaagggatacttgcctacgccataccaggacttctaagatgactagatgattgtccaggacaaggacttaagtaactacccactttatccacctctttcaagctcacctggtgttgcactactcccacttttgtggctttgatagtttcagttccaaacatctcatttgagtcatgtttctttgtgcaagaggcatctcaggctaaattcttaaccattaatcagttgatgagaagagggtgcatcttggttagtgggtgtttatattgtcaaacaaagagtttgttagcatatattgctttattgtgttggaacttgagcactctgagattctctttttcccattttgagaattttctgggtttggtcttgttcaacatagggtttctttttagttggcaaggtgtttttgttaagaaaaggaagaggaaagtacaaaaagttgtttccttatacttgttttggtacaacaggatggtgtaattgaaaatttcttgaatggttggagttgtctatgttgtggctgaaagctcttttccttggtgaccatatactagaatcatgtgcattaagggctgcttctgctaggcaatcatcttctaattcatttttttctacaaacctaggcatttgacgctactttgaaatgttaaccttatttgcttcagagaagagtggatgatctgccggctcttgcacaaatttgtaaaggtttttgtaaacccccaattctgcattggcatgagagacaggagccctaaggtccaccctgatttcatttaaattctgtagattggagttagagcattgtagtttgtagaagtgggagattgattcgtttaagcagttagggtaaataaacttggtagcttgcttcttctttctgaatatggactttcaagtggtatttcagatgggagtacaaacaagtaaactagctggccacattcccagcaacttagtacccttctttcacttacagctatctaacacattcaggagctgtgtaactgctgttagaacgcttttcttaatctgtaatggatgtcgaaaagtgaagattggttctgtaccaggtcatgatgatatgcttgataaaggtttgttttgttgatagcattttatgatgtaggatgcgtagtagctgttgtcacaataggggtcctaaggtgtgatatgaattttttttggatagccattcgttggcttgaattcatgcttgggacccttgttggaccttggtccgttctttgggtccccttatttccaaatgtgctgagtttgccaacttttggtgtttttactatattttgcttatcaaagaagcatctatcatcttgcatgtgatgacaagcttattttatcacttctctatgatgcaaatcccataatcttgttagagtttttaatttgataaggagccagactgatgacaaccaatatgcatcagccatcccaaacttggtttagtccaaattttttgctggaaatctttatattgaatgatttgatgttcatctcatgcctagctgacatgatggaaattaagcattagctgtggtcgataaaatgttgattctgtgttgttgattttgagtcaagtttagaatgaaaccacaaatgcacaaagatgaaatcacatagagatctttaagagtaattgtactctagaaagtctatttcctgcctgaatagtatcattgcatgctgcctcatgttcatcctgagaagttcttttccacttttaaaaaaggacttgacctagaactcaaagacctacttcctttctaaattcctgctctctccctcccatatgtgcttcagttggttgccccttttataccccatgtgggcatggtttgcacctttttttgtttaggctctattcgaataaaaatgtttgtgcctatcaaaaaaataaaaaataatgatgcaacctctgaaatctttgattttagtgtgttattgtccattggttgtatattttgttgcctttttttagtagaaatggtagactgaagccacaactttaaaggtatttttcctcattgtaaatcatgccaatgtgacgtcctcctatttcctaccataagctcattcatttctcaaactcatttaagagctccatgtttcctttctgcaaacctcacctctaccatctgaagttctaaaatatagatttttttattaatttcttttccttctgttgttttttttttttttttttttttggtgataaccactacttcaatgaatcagttcataatgtaaagcaacacataaatagagatgcttgaattaaaaatgttttgataattatagtgagaatggttggtgttatgaatatgaaatttatttttaaaatttttgttttttattatctgaagttgaaacattcttcatacaaaagcaaaccatttgtttatgtaattattcattatttgatggagcctttctgggtcaagaaattaatatgcttgaatggattttaacaagttgctattatctatatgtatgctgttgtgccctctagtgtaggcactggtgatatattaatatttgcctatcgtaaatgtgctataatccatatgactacaatttaggggaaagtcaagtagaagaaaatgaaaccttgagaaattaagaacacaaggaaaatagagaatgcaatatggctggaaattaaattcaagggtgcattgtttcttgaattatagtcaactaatgtttgtatctattctcccacctgccacctggatttatcaaatgtctgctaaatccaaagaaatgtatattcttgtcatatgattgactttatgttcaattcccaccctagaaggtgaaactagatttctcaaagttaattaggaactctagttgaggataaattaacaagaagaaataggaatgagggcagaagctttggtacattttatgtcttgtatatcaaaaaagaaaaagggaaaaacattcacttgttggaatatttgtttctggcattgctaacaaggtattatgagattctggtcttttagcttagtgcaagacatcaatttggacatggggattgtatagttgacaatgaatggttgaactatatggtttggtttattgtgtgttgttgagttacttatgttagagaaaaatgaggtaggataacaacaaaatacaaatagtttgctttcagttctaatttcatttcttaaacagatgtgtctcattaggatgcatttcactgaatatgcttcattgaaggaacttgtgttttcacagatataattg

SEQ ID NO: 10798 - DNA, 11571 bp, Vitis vinifera
  Intron number 22 from transcript GSVIVT01026340001 (locus GSVIVG01026340001) derived from phytozome v7.0 (chr-ID chr 4; pos 14319474 to 14331044 reverse strand)
atcgggaaaaggttaagcatgcttactgatgtcctgcagtaaattgtttttaaacttatgtatcgtcttaatatttagttggcatctgaatttcctactgattgtggaagggatattaagtttcttcttcaaaatatattagcttatctgtttgagaatgcttatttataccatatccttggattggttctttatcttgtcctacatgtaatttagtcattttctgtccatgcttcctgttttaaatatccttgtttctggcatctatctgtctttttctcttaccattgcattgagtttccatgcctgggcttttgttatctaatcttttattgtggtgtcttgttgttccataggcatcttctttgatattgctccaaagaagcatgagaaaaaggatgactatgtttttatcatcatttcatagccataactgctgtgttattcccagatttgtgggaaaaaatgatggtggacagactatacccatagttgttaaaaacttacgatacaaagatataatacattttttttggaaatcgataatctgtatgttatcttaaagcttattttacgatacacatacgatacatgatatgatacgtgatataaagatacaaataatattatacatcttcaactattttccatcatttttacaaaaaatcaaattggtttttttttttttttgtgaaaaaaatgtattatattaattgtttaaaatgtattaaaagattaaaaattgaacataaaaaggagaaataggtaaaatagtcttatattaaaaattacatttttgttgtcaaatactaaattagaagtcaagtaaatttatttttataataagtattgaagaattttcatttgaatagtttgaatgttgacattgaaaatgatggtgattagtgaataaaaatttctacttactatattagctctttttttttttaatttctttttcggggggggggaaggaatgatgacggagatgacaaagttggaactttgaagtatatatatttgtgtgtgtatgtattaatcaacaacacaataagtgtgtgtgcctagttaaaatttggagctaaaaattgaagaataaacatttttgtggattatgtgatgaatttatatattaaagtcatattttgttaaatctttagatctaatatcttttgtaaatttgcttatatattactttatacttcatactttcaattggtatgtacacatacatatattttaaatttatttttcaataaataaaagaaacttacgatacacgatacaatgcaacacacaatacagaaaaatggaaaaatgatacaactatgactataccccatttcataacaaatggatagactttaaaacatctgacataaaggaagcagtgaatttgtacatctgaatctgtgatgcctgaagtgtggtgctctacatgttcccaagtattctctgaatttcagtttctgacttggcagccatcctcatggataagcaacctgctttctagtggatctgtgcaatgtatagaatgtccactgactgaatgggacatgtgaatcagctttcatatctaaagcaaaaattcctaccatgctctatgaaattctttaatttagtcctaagctggcatatgacgttcagttaatctgaatagttctctaataaattatatggtgaacaatcattgattcgtagtgatggatggcaataaaaaagcaatgcttggttagttgaagagaacttttggcataaagacagatccataattcaaatttgactttgcaaaattgttgaaacagtaggaaatacaatgaaaatgtcatttccacatgattttcaagcaccatataagtaaagcatagacagagaagctagtttacaattccaaacccttataacaatggtaatctctaaatacagaattgcatttattaataataaagtatccaatgaaactaatggaataccctaaaatttctgcatgactgatagctacaatgaaatgagagtgtatagaatcccaaagcactcatagagatttctgcatgtcttaaaaagttctagagttctagagagaatggtaaggacattgaaggtctctatggagaggaagaccttcttggttaggcttgaaggcgagtccggtggaaaatggtgctcacttacagagcatagtagaggctctgttttcgccttaggttttgagaaggaagaggttgggtggctgatcgaacatttgacgaaggccatcgaactgaagagttacatgggtttcaacagaaaatacaagggaaaatcctgtgtccatttaatggaggttcaacaaccatggaaggtttataaggctttcggagtttgccttcaatagaaagtcaattttcctggtaattcctaagggcgagaagggcaggggttgggagcaactaaaaagcgcgttgtcttcaattctggtggtcccctcattgaatatagacgaaaagggaaggcagtgcagggaggaaagttttatccacaaacatgtgggtcctttgtaccggtccttcacaaatgtagttagagaagaaggaccgaggagaggaggccttgttccaattgggaggtgggcgagaactatgatgtgcgaatgtccaacatattttgttaactgggttgaggttggctgtgctctggcaaaaagattagggcaaaaaggtgtggtgactatcgtccccttctcaggtggaaaaggtttattttttgtagaaacgatagaggaagctttctctttccaggagttaaggtttctcaagatcaagggggggtatatagtccagttgagaaggtggttgccaagggaaaatttggaagtcgtggggaagttcagaggaggatggatagaattacggggattgccctttcatttatggtctgaggaacatctgaagaaaattgtgaagcagtgggggatggtgacagagatcgattggcgaacattgaaattgtttgatctttgcaaggtgagagtgagaattttaatgaaggaacgggtagttctcctagctttgatcgaggtgttagatggggaatgggtgttcacaatttcagttgcagtggtcggagatgaagacgttaggcgaggtagagaaatgggtgagtgaactcgggaggattttgagtctcacccgtggacaggtggtggaagacgggttgagagagctggatcaacgattgaaggaatttcttttgttggagcagctggtagaatgacgaagggaggagaaaggcaaaaggttgaagcaattcctacggggacacatggcaagaggagatcgaaagtggggaacaattcgttccgaccctccttgtcgttcattttgaattcaaacaattagagtttagggcttgttgggtcaaagcaggatggtgaagttagggtcggaggggacaaggcccacttagttgatgaggaagggcattgagcctctaattcaaagcaagagagaagggcacaatctcctcttaatctcagtccactggtagaagcagacttgggctaggagaggggtgctaaattacatggcccgctttcgaagttgggccaagaaacagaaggaaagaagcccatttttgagaagggctctttacgaagagtagtcttctctacaaagggaaaggggtcttagaggtccttgatgctcagccgaggggctccacgatgaagtttggttcaaagaagctgtggactactctttttcctccaagttctggtttccaacaagggtttcgaagccgaagcgagcctctaacgcaggagaagccatcgtcagattgtgaagctcatccaaaggtagttgctttcagagtaggaacacagatggaacgaggatttagtgtgtgtccactcacttgttgtcgattgtctgggtttcaaaagaggtgttcagggaaaggggcttcgttgtcaagaggagacgtggttttgtgcaaatcctctaacgttgaagacagagctagctataagggccgcgtgggttttgatcatcgtggttcatcagtcacggtttttccttctaatccagtaattagagaaaagggctcaactttgtggggacttgtgaaatgttggtagcggaaaacttggaggtatcttcgtcttcacattctcagtcatctttgtcaacttttccccctccctttggcttggcacttccacctttgagtccttctgttcctgttcttcccagtttagtctttcagtctcagtttcctatgaaaattcgagttagttctgatttttttccaaaaaagacgacgatggtgctttttgtcaagtgtctgttggcaatcctaaactagatgttgtggagtcccaattagcttatctaaaccaaatgcctgagggttttaacccccttaagactttgcccgacatgcctaatgaggcctctaacccagttacagttagctagggtgaagctgagttcttcccgttgggcgagttccaaatagaaggcctttcccctaggaaaatggctaaagtttgtgaggtcttaagttctctggatattaaggtgtattctaggcagaagaacagattctccacaggtatttgagacttgttggaattggatggaggtttagggtcagcgaggtttatccatgaaaatcattagttggaatatcaagggtttgggatctaggaaaaaacaatgggtggttaaagaatttttgaggctagagaatccgaatgttttatgatgattcaggaaacaaaaagggaggtgtgtgataaaaggtttgttggtagtgtctggacggttagaaataaggagtgggctgctctttcggcgagcggggcttcaggtgggattttgattatttgggactttaaaaaactatgcagtgaggaggtggtaataggctcattttctgtctcagtcaagtttgtgttggatggttgcggacccttgtggttgtccgcagtttttggcccaaatagtctcttacttaggaaggatttctgggaggagcttttagacatttttggtcttttttttttcctttatggtgtgtgggcggtgattttaatgttataagaagttcagaaaaattgggaggctctagtttaacttctagcatgagggactttgatggtttttataagagactgtgaattacttgacccccctttacggaacgccccattcacttggtcaaacatgcaagagtcacctgtgtgtaagagattggatcggtttctttattcaaatgagtgggagcatctcttacctcaaagccttcaagaagttcttcctagatggatatcggatcattggacgatagttttggataccaatcctttcaagtggggcccaacaccttttaggtttgagaatatgtggttgcaacatcctagtttcaaagagtgcttcagtacttggtggagaagttttcaaggaaatggttgggaaggtcacaagttcatgaggaagttacaatttgttaaggccaaattgaaaggttggaataaggattcttttggagagctaaacgaaaggaaaaaaagcatcctgaatgaaatagctaacattgatgccgttaagcaagaagggattctcacttttgaactttcagctcaaagagctttaagaaaaggggagttaaaagaattaattttgagggaagaaattcattggagacaaaaagctagggtgaaatgggttaaagaaggggattgcaattcaaagttttttcacaaagtggctaatggcagacgaaataggaaattcatcaagtttttcaagaacgaaagcggtttagtgttgaataattctgagagcatcacataggagattttactttattttgaaaagctctactcgaggactcctagagagtagaaggcttagattggtcccctctctcagaagagagtgcttctaggttggattccccttttactgaagagagatttctaaagccatttttcagttagatagggataaggcgccgaggcctgatggttttactattgtagtgtttcaagatcgttgggatgtgatcaaggaggatttagtgagggtgttcgcagagtttcacagaagtgggattatcaatcaaagcactaatgcctccttcattgttcttttgcccaaaaaaagcctgacaaagaaaatttcagactttagacctattagcttgatcacttgtctttataagataatagctaaagttctatctgggcgattaagagggatactacatgaaactatccattctacttaaggtgcttttgttcaagggagacaaattttggacgcagttcgtatagccaatgagatagtcgatgagaaagacgctcaggagaggaaggagttgtcttcaaaatagactttgaaaaggcttacgaccatgtgagttgggatttttttggatcatgtgttggagaataaggggtttagtcctagatggaggacctggatgagaggttgtttgtctatggtctcttatgcagttcaagtgaatggaataaaggatgggtcaaggcaactagaggattaagacaaggtgaccctctatccccttttttgtttactatcgtcgcagatgtgttgagtaggatgttgttgagagcagaggaaagaagtttgttggagggtttcaaggtaggcaggaatagaacaagggtgtcccattttcaattcgcatattataccattttcttttctaacacttgtgcagaagatctgcaaactctcaagactctattgttagcatttgagcatatttctgggcttaaggttaatcttgacaagagtaatctttttggcatcaaccttgatcagaatcatctttctaggttggctgagttgcttaattgcaaggcttctgattggcgtatactctacacgggtcttcctctgtgagggaatctaaaggcttgtggattttgggatccagtgattgagagaatctcacggagattagatgggtgacaaaagacttacttatcttttggaggtaggataacttttatccattcatgcctttcccacattcttaactactttctatccttgtttaagattcccgcttcagtggctgcaaaaattgagaaattgcaaagggatttcctatggtcaagggttggggaaggtaaaagagatcatcttgttagttgggatgtagtgtgcaattcgaaagtaaaagggggtttgggatttgggaagatttctctaaggaatctctctctcttagggaaatggttgtggaggtaccttagggagagttcagctctatggcatcaggtcattttaagcatttatgggacacattccaatggttgggatgccaacactatagtcagatggtcacatcgttgtccttggaaggctattgtataagtctttcaggatttttccaagtatactcggtttgtggcaggagatggggaaagaattcggttgggaagacttgtggtggggggaccaacctttgggtttccaatatccaagactatttagagtagtcacagataaaaatatacctatatcttcaattctcggttctgctcgccccttctcttggaactttaatttcgtcgtaacctttctgattctgagatagaagatttaaaaagcctcatgcggtcacttgattgtttgcatttatccccattgatttcagatgcgagatcttagtctttatcttctttagggctttttacagaagtctttttttctagccttgttccacctttccgattcttctctagtttttcctactaagtttatatggaattctcaagttccttttaaagtcaaatcctttgtctggttagtgacacacaagaaggtaaacactaatgacttgctacaattgagaagaccctacaaagctattagtcttgacatttgtaagttgtgtatgaagtatggagaatcaacagatcatcttttcctacattgttctttgtcgatggggttgtggcacagactatttcagttagccaagatggattaggttcccccgagaagcatcttcgacatgatgaccatcaattataaaggttttggattatccaagagagggatagttctgtggcaatttgcatgcattgctttaatttgggttgtgtgacgggaaagaaatgcaaggatatttgaggataaaacaaggaattctgagaatctttgggatttcattcacttccttgcttctctttgagttttttgttccatggtttttaagggcattccccttaatgtgttacaactagattggctagcactgtgtagctccaacgggatggtttaacctagagagtttgtttgtttttactttgtagcttcttgttttcgtattcttgctgtttagtttttctttggtgggaggattcctcatccttctcttgtactttttatttttatcaatatatctctttgtcgtttcctatcaaaaaaaaattgttgaaacagtgcctgctgggaatgaaatgaaatggagcccattgggcacaatatctgaaatttggctaacaacctccctatctttatgcaccttgcttctaaacaccgtcttggatctacaacttggtctaagaagtctaaacatgatagagcacttgatgctgattttcttagttggtttgctacagcatttctgtctcatctgaaggtgggatccttgatggtcttggtttggtggcatggggatgcttaaactagttgcttgtctcatctcataatcaaagtcagcctctaccttcttcgatcttttgagtggagtctaggagcggatcagcttgtgaaatgtgtcccatgttacttttatctcatttctacttgacaagggttgaacatttattgaaccacctaagaatctcttgggtttattcttataagggaaaactgccttagagattaggcatttatctttgtataagtagatcattatattgaagaggaaagagacttttgacaacttgtaaggaaactttatgaaaattattggacagaagtgagctttagaattgttatatggcacctcaaaaattttatggagaaaatcccaaggaaatccaaagtcagatatttcttaagaagttccaacaagaggtgttggaccttactatgtcaagtatattcttgttgaaatctttctttttggttaatcttagattaaatatatctccttatttcctcaagcaaacttgagttggaggtccaaaattccatcaaaggtcaggatgtttgctctgttagtggttaataaaagggttagcaacaataacttactgcatattagagaacctataagaaccattagccttgagggtgtcatagtcatagtgctgtaacatggcttttgtcaattagttgatcattcaatttcttcctaaaattccaacctcttcaagatgtcataatgttgtccataggctttgatacaaaactgatgtaggatctttagatttccagcactaaagaaggttttgtttgttgtaaatttagatgagaagtcaaagaaatgaaataataaaataaaaaaaaggaaagaaaggacaaatccttggcaatcatatcaaggttctcaagcaatcacacctagggcttcctaagcaatcacacttgggtgaaaagaaaggatacacttagatccttggcaatcacacctttaagaaacaaaatagccactaaattcttggtacattctattaatcgaaattgaagacatgtcatagaggggaagtatgggaaagaagaagggggttcgtattctgtgaaatgagaggtaggtatagggttggagtatggaaagttattaggaaggggtgagacctcttcaatggtagggcttcttttgaaatgggatgtaagaaaggtgaagtgttggaaggtagatggtttgggcaggagcctttatgtgagttctttccctccttgtatgctttaacatcgtccaaagatgcttaggtagtggatttatgggatgaaataggtatcattggaattcgtgtttctctaaacacttaaattggaatccgtgtttttctaaacacttaaacgattgggggttaagtattgttgaaacatttttctcaagattgcaagataaggcgatgagggaagaaaatgatagggtgatttttaaggtgtcaaagaatgggattttttctattaaatccccgtactttgtcttagagacggtgaggccaattcctttcccattgagcattatttggaattcatgagttccatccaaagcgagtttttttgtttgggaagcttgttgagggaaagtattgatgtttgattaactgcaaagaaaagggtggtcattggaaaatagatgttttctttgtaaaattgaagaggaatcaattgattatattcttcttcattgtgtcaagtcaagagttctatggcagttgttctctctttttgacatagtttgggtgctctttaaagttggcatgactcttttgttaggacaaaatggaataaggtttggagagccactcttctatgcattttttggataagttgaaaggaaagaaaccaaagggcgtttgaaaatgggttgtttgatcataagctaaagtgtttgttcctaagtactcttttagcatgagttgagatgtacattaaaaaaggttcaatgctttttattgatttttagattggctaggatcttgttgagagtaattttattttaatcaaagagagttgtttttgtgttctctcctttgtggccttgccattttgaatttgttgtatacatcctatgtactttggtataccattttcttttttagtatatatacaacatttttattgccgatcaaaaaaattaattgagattgaaactatgtaggtttatatagacttacaaagccacttttcctaataaaggctaaaactatatcctaataggaatacaaaattgacaactgtatatgtttatatagacacacaaagctacttttcctaataagactaagaatatatcctaataggaatggctccttttcctaatcaaattaaaaactacaaaaataggaatttgattaaaaaataaactattaaaatcaattctttaaaaaaaaaaaaaaaaaaaaaaaaagaataaaaagaaggattccaactaaaattctgaaatgctaaaattcctaaactatttttggcaaatattgtttcccatcacataaggaccaactctcggtgttgctaggttcacaccctattgttggtattagtgaaactaagttctcaaatagctgcttgtggttttcctttgggttactaggcttagatatgatctatgctacctgacatgaacttctcatccatctccttgtatctatcttttttagacttctatttcatttttttttgtttcttataaaaagaatatcctctttagattcatttttatttcattatatgaaatggatttgctttttctgtttctgtatgtaattaatgtcattttattgaactccaatgtttattttaagaagtcagtcactttgttgtcataatgttcctgctattttcagtcggttgcagaattggcagaggatat

SEQ ID NO: 10799 - DNA, 4640 bp, Vitis vinifera
  Intron number 3 from transcript GSVIVT01010232001 (locus G SVIVG01010232001) derived from phytozome v7.0 (chr-ID chr1 ; pos 18013293 to 18017932 reverse strand)
ggaattagcaacagtgaggaattccggaggtatagtgtgtcaattgatttaatctgcttatatgatctatattctaccttttactcatgctatctattagtagtataggaatgggaagctataactttcattatgcattatcctttttctatacaaaatacataagattaccgtactctagagtcaactaattagccctctggtggtttcccagtttttcttttgcttttttgaatttagaatacacattctttctggggcgcatctcttccattatttccttttccctgtatttttagactgatcatatgcaaaagatgctcctagaaatggccaagcatgctgtagatatcaagcacccaagcctatcaggttggaacaactaacagtcatggaccaggatatttgaatttttgtccaacttttagttatgcagaccagtgaggtgttaccgtagaaacagaggctgtaattagtgtggtatttgaagaaataaaaatgaagcaagatgaccacaatgataaaacccaaggatttcaaaggtaaggatacttttgcagccttttttcttatattttggtatgaggcaaaggattgatcatccttagtagtgcttattatcaaaggactttaccctgtgctagaaactaagactaaccttgaatatcataaactttgcaattaagcttctaatgttggctattttgatttttggattctagtatgtgagtgggcaatgcattagttgtgggaccttccttaacatatacaagcatttgagtaatggttgtttagtaatgtgcaatagagttgtgtggccttgtaggcatttgtaagtcattgaatccttgcaaaggcctagagagtcaggtccttatacctacccctaatagtagtcttccaccttagtatggcctccccgaatctctttctcttccttgtaaagaaataatagaagattgttatgaacctgaatggaatccagaatggaaactctttagagtagatcccttgaatccaaacaagtttccaaaatttcccaaacacatcaaactctcaaaatcatcactcctttcaaagaatcctctctagttttggtatatagatcttctgtggtggcaattcaaacagtttctatcggcaaccatgaaaccatctttggtattcctatccatccatcccatatcccaaggactataaaaggaagggctacaatggttcacatctgagtgtcacaaggataggcattcaacctctttcctagaaagaggaaatgttagttggctatgagctcttctgatgttagatggaacaagttcaatgatgatattcacaaagattgaatcacgcccacacaatgttcatcatccttccaaattacactagtgatttgacttgacctactcttgcaaatacaattaagattcttgcccaactttagaagttgataagagaccaggagaaactttccttgcaacacctaactcattgatatacaattctacagaagctagtcccagtcctttctatggcctccaactcttcccccatgacattattctggtttctgaaaatatcactcaacccaaaattttaagagaagcatccttgaagagaaacttcctcacatttccaccagtgtaggaatcctcttatgaacatttctccaagagatgtccattagtacactttacatctccttgaaagaaaactcctagttttcctaccaaaccttggcatcctacctttgtacaaatgctagctagaaggtgaaaagttccaggcccacacttgcctagaaaagttcttttaccctccatagcagatcttctacaggattttgtctttttccacctcctaactttagaacaaaacctataccaaactcttgctacctgaatcagcatatattgcagagtgaatgatgatgaaattatgggttctaagtacagatttatgctacaatgtgccaagtaacaaagtgaagttactaacttgagaagatagttgcttaagcaaattgcaaagataagtttcagaaaggtttgtggcagcttttgtgattttcaagaaatggttgcataacattctcactacagcaaagagaagcctggcttagtcataaacaacctgtagactccatatcacagagaagcggaaaaaagcttcacaaaatcacttggataagaaacatggcagtaaaacaagagtttcttctctgtaaatgatgtgatctatccaagtttggctacatcaagcaggaaagcttctactttgtacacagtgaagggagcctttacgcccagcatgcccaaaccaatcataaatctgtggaagtagaacgtaagtgagaaggaactagagatctttcttagattagcttggcagattgttcaagtgacaatgacaataattcaaaataaaagtgatcagaaaggcatcttagaggttgatgaagagtttgggcatcagtcctcccctacacccgagtaatggttttgattgacacagatttaaaccatatgatgtggggaagaagaaatgcctcctggattctggacttctctgaagcagcttcccaagtagtttcatagaattgcccacttgattctgcagctgtactcaattcagatgtaccaaaaccccacatatgaccaaggaatgcattgatgacctagtagatccaagaccagcacatgcactcagtctcttacattttaaagaaaaaagggttctcaaacaatgttgtactgggaacagagaagtattttgttggcccttacaaggattactggaagatacctcaccattctatctctcctaggcattctccaagatgaataggtctgcaatggatgcctcagaatagcatttaaattaggtctgatgagagacgagtttgataattccctattaggaattaagtcttattgactgatgattacttggcagctgtgctctaagaagaatcatttgggaaagataagtctatggcattacaccaggaaagacttagctgtgcgatcaagaaaactgactccttcatagcataccagttacttccaaattagaaggtgaagttacattatgtcaaggttttctcaaatgtggaggagaatgatgcgagtatgatcataagaaaggggaaaattgagtttgctgcatttaggtgttgtgttgtgttggaattatattgcaatctagtctgtaataagatagctagacagcattagtaattaactagttggctaataggaaaattaggttttagctagtaactgatgcagagggtacatgatgctgcagtggattttatgtttgcatcactgtgacatgggtggtgtaacagcaagagttggaaaggaaattctttactctctgagagttcctttcatgaatttttaatcaatggttatcatcactttgatacatgagtaaggattcaactgttattagggggttttagtctataaagaggggttgcatctattcttttgttctttaagcacatttctctttgtggtaaattgcctgcagttcatgtgattcaaactgtccttttttcttattgttatattctttgttcttcaagcacattttctccatagctaatgcttaatctgatctctaagaaaccttaaacacaatttcccaactgaaatgctggattttggaagattctctgtatagcatcactttcctgtgggtgctaagcaaatcatttcatcatttgtaatagggatttagctgtcagttgtaccaacattggcattatgccaacattactacttccaatcgcctaagtaacctttcttcactgatactagatggtccatcaagttgaaatgaacttaaatttgatcaaatgacaagagttcatgaatttcctccactttctttccttctagtgagtttcttcaatatacttgaatgtacacaaaactcttcctctctctctctctctttctccctccttctccctccctttctcctccctccctctccttctctctctgtcttacacacacgcacacacagtgtttctcccttcagactggtccttgcatagtggatcatgatccacaatgcactgcaaaaaatgcagtgtcccacacttttaagttaatgaggccgaagtgatgttattttctagttaaaatgatggtgatgggtttagtcagggttgtgatggtggctgctagttaaaatagttgtgtgggaaccaacaatagtatgcggttgtgttcgctattggcaaaagaaagttgcattgttttgtcatcatatttgatgtgaactaaaagaagcaatggtgaagatcaatggttatattggccactcttgatctggtttcagttggtgggttcaaacttgtgaatttaaagcataggacctaactttcttattgattatgcatgtgttggtagttcatcagttgataatttgaacaattatttaacttgaacagatgaattgtggttcaccatccaatctgattatggtcatggagagcttaaactgaaataatttcttttgtgagtagaataatatggctaccaaggccaaatcttcacagcacactgttttgtcattacttttctcatgattataactattctttcttctcaaaaaatgcagat

SEQ ID NO: 10800 - DNA, 12598 bp, Vitis vinifera
  Intron number 1 from transcript GSVIVT01010106001 (locus G SVIVG01010106001) derived from phytozome v7.0 (chr-ID chr1 ; pos 15606254 to 15618851 reverse strand)
tccttacaacgttttaatcactggttccacaaaaggttagtgtttttcatccggttcccatttggtattaatattattatgccctctttcactcctgacaagtgttaagatgcctttatctacttagagctgaatcgcgttttctgtaacttatccttttactttgaatgttttcatatttttggcagtgttgtagtcctctcaaattgtttagcggttgaagaaggggtttttgtttaaattactcttactctgttacgtaaacaaatagctttgtaattaaatgttcttcttttcacccaagggagtctggctagacaccctctggtatatatagaaaaaataaaataaaataaaatattattaattagtaaatattagagatggggtgtcaggcccctatttctgagaagtcaaaacttctcttctggatgtatgtgggtatttatcaaaagagcttctggatgtgtttgggttcagctcaacaaaagcttagtaattttatcaaaagagcttagtgttgatttttgtagaagcagatggttagccaaagaaggtagcttatgctcgattaaacttttataataccaagaatgtctttgaaattattggtttggcttcagcttctagatcaagccaagaagaaaaaggctatgcccatgtaggtctaaatgataaatctaagttgatggtttgagttgtagaatgcaaattctaggaggggctattttatggggtgtgattttttaattgaagtatcatttggggaattgataatatgttaacacaatttctcagtaggaagtgtacccttacgagaaataaaaacaaaggagaaaaaaaaatgcaaaatcgtatgtaatcgaatctaatggaggtttttggcaacctaactgaggaaaaaggaaagtgatctgataagcaaatcatttagtttctatcagcgagccatgttgaagtttagagtttgtttgagagtgattcttgaagggttagaagcatttcttaattctcggaagtattttgctcacaaaaaataggtatttggaaaagttttagaattcacttttaaaaatctaggaattactcgaaatgattgttaaactagcacttttaaagtccttttttgttacttatctttctatgatggtatgtatacctatagagagttgaacatatttgaggaggctgaattatgaggttgtggagtaaggaaaagaatgatatctgcagaaggaacactttttggttatgattttaggtctcataagaaagtttatagataatatgaatattttgattaattattgtctatgtggaagtgataatatatttccaaaggagggagggtaactttgattcgaagtactttatctagtttgtctatttattttatgtctttgttctatatgccatgagctattcgattgaggctagaacatattcaaaggaaatttctttgaggggtgtggctttggagcataaatctcatcttgttaagtgggtggttgtttgcccagacaagaggaaaagggacttgggggttaaaagtctttcagttcttaataagactcttctttgtaagtggagtcgttgttttgcgattgagcgaggggccttttggaatcgggttatccatggtaagtatggggaaacaagaggggggtgggcaacttaggaggtaaaagaagggtatggggttgggttgtggaaagcaatagggaaagattgggatattgtgagatctaggtgttcctttgtggtgggtaatgggtggagggtacttttttggaaggataggtggtgcgggaataaccttttgtgtgtgttgtttccttcgttatttgctttgtttgtttctaaggatgtgtgggtgaaggatgtttggaattcttcagctgaaagggttattcatcatcctcctattgtacttctttttctatcaatatattcatgtgtggtttcctataaaaaaaattcttctgctgaaagggagggtgagggctagaatccttgtttctctagtttgtttaatgattgggaggtggattgtgtggagagatttttggcttgtttgcagtggcagcaggtttgtaaggatgtggaagattctttgatttggtcagtgacaaagagtgacaagtttacaattaagtccctttataatgttttggaactagacttgggtgggtcttttccaatgagtggaatttggatttcgtgggtccaaccaaaagttaacttttttgcatgggagtcagtgtggggtaaagttttaaccttggatcacgttcagaggtgaggttggtctttagtagatcgggtatttttgtgccttggacatgaagaatctatcgatcatttgctgctttattgtgaaatgacaagggttttatgggagctgatttttgtcctttttggggtgtcttggatactttctttgtaagctaaagatactttgctgggttgacatgattcttttgtgggcaaaaaatgaaagaaggtttggcaaacaagccttttgtgttttttttggtcggtgtggaaagccaagaacaacattgcattcaataatgaggttttttcaacccagaagctgaaaaagggagtttgtttgctttctgtgctttgagtttaagttgattgtagatgattgcccattgactttagtaggtttttttgaatggttaggtacttgttgaggttctttctgtaatgttttggttaaggcttggtggtgaagggaagtttgttttcttttatactttgggccgcttttatggcggctcttgttctttaatttaaggctttatttatcaaaaaatataaaatttaaaattttgcttatgtgggatgtggcattttcattttataaaataaaagttttttttttaataaaaggttataaatgtaatttttgacgatcaatctccttatgttcaataaaatataatttaatctttttgttttaaaaaaaaaaagaaagttactaatattttgccaaatatttttattttgtttcacgttatcccaatttttccaattatattagtatgtaattccaattttctgaattattctattgccccttttcccaattctccgtagcgatcatggaaaagatgggttttggtcaaaagtgggtcaaatggatcaaatggtgcattcaattaacaaaattttctattttggttaacaagattctcactggtttctttcaaagttctaggggctgaggcaaggaatcacccttctccttacttatttatcttagtcagatgttgaatagggctaaggaaggaggcttctttttgggtttcaaggtgggcggatgaggagagaggggttggagcttacacatcttctagttgccattgataatttaatcttctatgatgccaaccttgagcaactagaatatttgagttggactcttgtgtgatttgagactattttgggattgaaaattaacttagagaaaagtgaattactttcaattgtggaagttgctaatgtggtggagctcactatggtgttggggtgcaaggtgggagcctaccctctacatatttgtgacttcctttgggagctctccacaaatcctcgagggcttgggatgcaatagaggagggattccagataagttagaagtgtggaagagccaggacttctcaaaaggagggagtgatgagggaaagccttttaaagtttattcaaggaagaaagggaagacctaagtaaactttaagcaggattaatattaattagaattaaattgggattggtatttgttggagtctaattaggattagctatgttgagagagagagaaagaagaaaaaccttaattctcattcatgtcattaactacttacaattgagaagtatatatatatatacaagcctaggagaactaactaccatacatgtaacctatattaaaaaggaaagactgtacactatatatacattatattcaacactcctcctcaagctggagcatatatgtcatatgcaccaagcttgttacaaatgtatttaatcctaggacctctgagagatttagtgaagatgtctgctagttgatcatttgaattaacaaaacttgtagcaacacatcctgatgcgatcttctctctaatgaagtgacagtcaacttcaatatgcttagtcctttcatgaaagactggattagatgcaatatgtaatgcggcttggttatcacagatgagtttcatctgttcatcctttccaaatctcaactcttgaagaagatgtctcaaccatatgagttcacatgttgccagagccatagctcgatactcggcttcagcgctagatctggccactacatcttgtttcttactcttccaagatattagattgcctccaataaaaacacagtaccctgaagtggaacgtctatctgtgggtgagccagcccaatctgcatctgtgtaaccaacaacctgagtatgacctctgttctcgtacaacacaccttggcctggtgtgcttttgatatatcgaagaatgcggattacgacatcctaatggctatcacatggtgactgtaggaattgactaacaacactcacaggaaaagaaatgtctggacgagtaatggtgaggtagttcaatttatctacgagtcgtcgatatctcccagggtctcctaaaggctccccctgtcctggtacaagtttgacattcggatccataggtgtgtctaccggtttacagtctaacataccggtttcttccaggatgtctaaagcatacttcctttgggaaaggaccacaccggaactggattgagctatctcaattcccaagaaatacttgagtttccccaagtctttagtttgaaagtgggtaaaaagatgttgctttagtttctgaataccatcctgatcactacctgtaatgacgatgtcgtccacataaacaaccagataaatacactgccccaaggagttatgatgatagaaaactgaatggtctgctgtactgcaaagcatgccaaactcttgaacaacagagctaaaacggccaaaccatgctcgaggagattgtttcaagccatatagagaacggcgtaacctgcacactaaaccagactccccctgagcaacaaaaccaggaggttgctccatataaacttcctcgacaagatcaccataaaggaagacatttttaatatctaactgataaagaggccaagaacacatagcagccatggagagaagcagacggacagaagcaatcttggcaacaggggagaatgtgtcaccataatcagaaccataaacctgagtatagcctttagcaactaagcgggccttaaggcgatcaacctgaacatcaggaccaaccttaactgcgtagacccaacgacagccaactgtagatttaccagagggtaaaacaacaagatcccaagtgccattaaagtgcagagcagccatttcatccaccattgcctgtcgccagcctggatgggaaagagcttcatgggtgctctttggaagagaaacagaggatatagcagaaacaaaagcagaatagggtgaagataatcgatgataactcaaaaaattgtaaataggatgaggattacgagtagagcgagtaccttttcgaatagcaatgggtaaatcatcaggagaaggcagagccggggcaggagaagccgaaggggtaggaagtgagtcagcaggtgcctcagcaaaagggagaggagcagcgacacgagggcgacgatgataaacctaaagtggtcgaggaggcacgacattagttggggagacaatgggaaggggcaagacttcagaaacaggaagagactcagaagtggtggaaaagaatggtgagtcctcaaagcaggtgacatcagcggagataaagtatcgatgagtctcaagggaataacaacaataacccttctgaagtctggaatatcccaagaagaggcacttcatggctttggcggaaagcttgtcctgtccaggagtgagaatatgaacaaagcaagtacaaccaaagacacgaggaggaaggaaataaagtggttggtcagggaaaagaagggagtgaggaatctgatcgtgtaagacagaggagggcatacgattaatcaaataacaagcggtaagaacagcgtccccccaaaaacgaaaaggaacattactatggaggaggatagtacgagctgtctcaacaagatgtcgattcttgcgttcagctaccccattttgttgaggagtatgagcacaagaagactgatgaagaatcccatgacgagacataaacgaagtaaatggggttgaaaaatattctctggcattgtcactgcgtaacacacgaatagaaatattgaactgggtttggatttcagcataaaatttctggaaaatagagaataactcagcttgatttttcattaaaaataaccaagtacatcgagaatagtcatcaatgaaagtgacaaaatactgaaatcctaaagtggacgcagtccgacaaggaccccaaacatcggtgtggacaagctcaaaaggagactttgcccgattattcaaacgctttgggaacgagacacgagtatgtttcccaagctgacatgactcacacggaagcgacgacaaagtggaaaaacgagggaccatcttctggaacttggagagactaggatgacctagacgattgtgaatgaggagaggagcatcagtggaaatgcaaattgcagtagatgaatctgaggtgaggtgatagaggccttgagactcacgtcctatgccaatcgtcttccccgtactccggtcctgcaaggtcacaaatttatcagaaaaggtaatagagcaagtaagagtacgagtgagtttgctgatggaaataagattaaaaggacattcaggagtataaaggacagaagtgagaggtagagaaggcagaggaagggccaagccaatacctttagccacagtttgagaaccattagctaaggtaacagtaggtaaagcagaggtagtagtaatagaggagaaaagatccttattaccagataggtgatcagaagctccagaatttagaatccagggtccaagagaagatgtgtgggtaaggtaggcagaggcattaccaggctgggcaacagaggcaatagaagcctgagatgtctgagatgtggaggagctcggaggctaaggcagcggagaatcagaggactgggccatatccacttatctggagaatgaagtatgtttggatcgaagagagccctaatacggcttcagattgcggcgtggcaccaccgaaaaagggagacgacctcagatcgcggcgtggtaccaccagaaaggtagaagaacacttcccaaggcacgtgcagggattggggtggagaaaaagtagccggagcttcgccggaaagactgtttggagggccgacggagacaaaaatccccaaaagaggtacgtgcagggctcggatgggagaaccagggatgtagggaggttggtcggcgtcaggcgaagctggaggaggaggcgcgtcgccggaaaaggcctcacgcgccctcacgcgccggcgcgtgagatgcagtcgccggccggaaaattgcgcgtggccggcgcgtgggtgagattttggttccggtgcctttacaaaagttggagatctcctccaggcgctccttctggtatggtcggtgtcggaaaaagacgtcgccggaaaattttgcccgcggtgagtgttttcttacgacgatccgactgaccggaaagtattgggagatggggaaggtgaccggaatgaaacacggtcaccggaaggtttcccggatttgatgacacgggaaactggaaagaattaggttttctcccttggctctgataccatgttgagagagagagaaagaagaaaaaccttaattctcattcatgtcattaactacttacaattgagaagtatatatatatatacaagcctaggagaactaactaccatacatgtaacctatattaaaaaggaaagactgtacactatatatacattatattcaacaagctagttgagttataatataattagaatttgagtcatgataggttattagagtcctagtagactttggatgttataattagaattagaatcataataggttattagagtcctagtagactttggatttcttagagaagcctataaataggctaatcaatgtaaatcaaagagatgaattgatataaataatattatattttctttcattgcaaggttgcaaccctcaatggggagacttcattgattttcttctaggtgagactcctagaaggctttagtgagactctaaggttttccatcttttcttcattgtttcttctttctctgtatttcttatcttataattttctctaccataaaatttattctttgttcctctccttgcaccctaaaaaataaaaccctagcccacctacccttgagtgtaggcaaccatcctagggttgtcctacatcaaggagacttgctttaatcaaaagtacattatctagcttgcccatccatttcatgtctttgtttgtaattcctagaagggtgggcttatggttggagaaaattcaaagagattttctttgaggtgggaggagcttagagaaaaacctcatttggtaagttgggcctatcatttgctcatataaaaaaaatgggggctttggcatcagaaatttatccctcctcaataaaggctgtcattggcaagtgtgattagaggtttgcacaagagagagagtcccttttggaagcaagtgatagtaagaaagtacggggaagaagggatgatagttctcgaggggtgtaaggaatggtaatggcatgggcttatggaaagttattagaagttgttgaaaggattttaaaagtagattttgctttagagttggcaatgagagaagggttgaattttggaaggatggatggtgtgaagacctttcactagaggagccattcttggatttgttctctatagtctatagctgctgtaaggactcctagcccctaggtagtagagatgtgggagcaggtaggagagggaggtaggtggagcccttacttctctagacatttccatgattgagagcttgaaggtgtggctaccttcctttagagattacaactaatacaaatcataagagaagtagaggataaatgagttgaaaggtctccaaaggaggcatttctcttttaagttgttttattcctccctagttcagactggtggggagtcttttctgcaagtgtagtacggaattctttggtgcctatgaagttgggtttttcgcttgggaagctacttgatgattgattagctcagaaggatgggatgtgttatacagaacaagtgtttcttgtgcaaaatggatgaagaattgactaatcacatcttccttcactgcctgaaagcaagtgttctatggaagctgatttttttccttgtttggagtgatttgggtgttacatgctacattgagaagaacccttcttagttgacatgaatctttcgtaggaaaaaaatggagaaaggtatggaggatagcttccttgtgtgtgtttggactgtttggaaggaaagaaataaaagattctttgaagatgtggagtagttgaaccaaatattcaaatatgcttttatgagtacttttttggaatgggttagagcgcaaattaataaccgatcattaaccatgttaaacttgttgattggcttagctccaagggaagggaagaagttttttaggtttcctttcttcttttttgcttttaagcgcatattgtatgcattgtgtgtaccttggtgtgccctctttttagacgctgttaatatattttctctttgcctatccaaaaaaaggtaattctttctcctcttctcttcaatgcctttgttcttatgttattgaatcatcatttcatctttttaaagtattaatcctaggctcttgcagttatgctaaccccagacccaagaaatccaaaaagacaaatttctgttcaccatagaagccttgaaccctgctaacaatgtcttgagaaagagagcttttggccctaatattgacaattcaccccttcaaaaaccctttagctcactcctttcaaatggaccgaattaaggtagaggcactttctaaattatcctttttgtcttttccacaaaaccacctcactgacagaggaggaaatgcttgactgactcttgagaagcccgaacaatagaaagaatgtctcgagaaagagcgcttttggccttaacatgggcagctcatcccttaaaaaatcctgtagctatgctccttagaaatgctccaagttaggaagagagaagctttctaaaatatacttttcttcgacaaggccagcttgctaagggggaaggtcttcacctctgagccaataccttggaaacctgaagcttgacagaaacaacaccacagtgattgagccaccaagaaatgaagcaaaatatggtgatggacaccctcttcccatcaactaataaacatgagaatcttgtctcacactgcctcccacataaagaagcacagcttagatagaagtctaggaatccaaacatttgatgctggtgaaggatgggaatgcttcatagtaagcatctccaagatgggcttaatctgaaaaaagtcactccctcagtcacctgcatcacagaaagaccttgcaaacctttgttaatatcacggaggttttggatcccaaacccctaacagcctaggagaaacagatgaccaccaccaccctaaatgaaatttctggagtttttctaatttgttgctggctgaagtaggaagaatgaaggatgacatataacaaaagggcaagcttgagagagtacttttaaaagtgtgatcctgaaattcaaattattcaagtcaatttttaaacctgattgtatcatgaaattcaaagcagaatgcatgtaagatactgctgctcgcaaggcaaattgcaagataatagtgtgtttaatccaataacagggaagttatctccagtgcttggcctccctgtccccattcagaagctcttgatgaaaccacctccttagccctcaaggagaagcaattcaggactccattgccaaaataaaaaaataaaaaaattgaagaaagacagataaaaagtgtagttattgaaaccccctacaactctggaaaatcacacaggagttccattcaccaaaattgataatctgacaatggaaatgcagaatttgatccacctaacccatcctgccaaatctcagttagaaaatgaacatatatatatatatatttatttattaaattttgatatacataccaatcccgataaggaatactagggtctagaatcaatagcttcatactgataagaacaatatcagggatttgcttacctataaaaaaaacattggggatttgtttatatctaaaaggcattctgaaatgctgaaacaacttttccaagcacagtcctaagtctttaggtctaaattctttaatgtcctctgcaccaccctttttaggggtcaaaactacaaggatatctattttaagcttttcttaaaggaccaaataacctgaatctctcgcaagaatccctagcccttgtatttaacattctcccaattgtcaccaaaagccattggaaatccatcaagaataggagtccctattcaaattacgaagctttgctctgatctgccccttcgtaaagaaccttattagtctaacactgttctcctcaccaattgatgtcaaattaacccctcaatatgaaaccttataagcccccctgatcttcatataactgcttgaagaaaccagaaatcccttccttaactttggcttcagtctacacacactatccatcttgatcttgctgaggtattgactctctgatgggcattggcaatcttgtaaaaaaatttagtttattgtcaccctctttacatgataacaaaataggtttctgtctccaaaaaatctcttcaaaaccgataaacctcttatatttttctaaggccttacacctaaaatgcacttcttgctcaaatagagatccttcacttttgtcactgctgaatctgctccaagtctcttgctataatagtcacacaggcgttatattgccagaatctcctcaaagctctttgactttcttgctaaaataaaatttgcactttctacaaaatggtggctggaatatgatcatataaccatataatcaactgctgaatggcctttcctttaagccacatgcttttaaatctaaaagccaattttcccagcctcagctcccaccagtcaagaaggatagggagagatttggaggtaggttcaatttggatggcatatgagtgaatgaatttttaaaatacatgaactggtaatgacacataaatcattttatattttttgtttttaggtttattttaattggttatttatatcatttaactttatttatttatttttttgtttgctatatttttcaggaataggttttgcactagctagggagtttcttaaa

SEQ ID NO: 10801 - DNA, 7259 bp, Vitis vinifera
  Intron number 15 from transcript GSVIVT01032018001 (locus GSVIVG01032018001) derived from phytozome v7.0 (chr-ID chr 13; pos 23490920 to 23498178 reverse strand)
ggcttgaaaagataccccaagcattcagctatgttcaagaaattcctcttataatagaggagatccacaacagtatcttttcaatatatgaattcaataagatggagatgatcatctctttgtattcccattgcataatatctttggttttgcactagaagtgctttaattaaatctataatgcatattcttatgtgttgattttacagtatgtatctcattttattattgtcttgtctttcaaagtaagatcatgttaagagtttaagtgacaaatgatatttgtactttcaatcctctcatcaaattgcgtaatactttcatatcctttcatctaattgttttctctgcaatgaatggctaataatagcataaaatatacattttataaaataaagtcatttatattaatgtaattacatagatagttcttgatatattggtgtacaaaacaaatttctcttaaatagagaattttgtatccccatttcaaaatagcctagatttttttcacagaactattgcaattaaatgcataacgcatctttttgtgggttgattttacattttgtctctcatttcattattgtcctccctctcaaagtaagatcgtattaagagtttaaatgactaaaatgatatttctacttttatatcatttcatcaaatagttttcttcataatgagcaaatactaacaacataccatatgcattttatacaataaaaaaaattatatattataattattagaaagaaataatataatttgtaaacccgtatttttcacgtacttcttcacttgatagcaagactcactttttagatgaaaaactatatttttataaaaactagagttatcacttatttttatttatttttaaaagggaaaataaaataagaaatatatccctaaacaaaaggactcgtttttggaaaaacccattttgaaactcgagtctaggtctggatgtcaagttacttatcaggaatgtaccataatggtaacaccccttttaagacctaaaaataggtctctacttactaggttgagtgaagtatgacaattaatcgataaattaatgataggaagcagaggtgattatctaaatcctaacaatatgccaaagccaaataatcattctaagacaaaagcataaaagatagtgtacatacctggactgcgactcaaagcactatcataaaaacatcaaggttagttcaaataacataatatacaacatgcattttggtcttagttagagtcaagtaacaatcaaagcaaccaataacaatattaaacatggagatgttcacacatgaaacatacaaatctatagaatttggagataaaaggtgaggagcgtacataaatagcataaattatttacagtgtatttccataagacaaaggagattagaataggttacgataacaaataacaagatacctaatcctaacatgcatggtatatgtacgacataaaggaaatgacaaaagtctaaggaaaatatcacttattcacaagagtcatacaaactcattgctaaagttgaactaatgcacaatatagcaagaagtaccaaaattagagactaagacaaaacattcagcaagaggtagagcagttgtattcatttcaaaaatcctaaacaaatatctaaaatcattactttatcataaaaaataaaaaaatcatacaacatcctccttatgtctacattataatacaacaaccaatgtcaggttatcagatgccaattaatcttgaattaaacaacaaagtgagtataatgcaaaatttccaacaagctattagaaaaagaaatcttcataaataaatctaaaaatatatcaaaaaagaatttgattacaacaattttctgcaagcatcttttatgtctagattatcatccaagtgaccaaacaatcattcaagatttagaataaattcacattacaagaaggttccaaaaggtccataacatgtcagaatacaaaagcatgcataagccgattttcaaaactagctcagagggcccataaaatcacacaaaaatcacataagtcattagaaagtctagtttacatgaaaaataataagaaaatcagagagcatacatcaatttttaaataaaacaaacataccttctatccagaatttgactagtgtagtgtgtgcatcttagaaaaaatatatcttatattaggaaaaacatatttcaatattttatgtgtcaaaattcaatttcaaaaaatctagaatcataaaaactttaactcaaagcattcttttgttatcttaaaaatttgcattcaatgaaacctagggctaacaatttgctccctttttatgataaaaatactaagattgctaaaaaactctttgtatataactttatatttaatttaagaagatatttaatttaagaattttgaggtgtacttaatcattataagaagcatcaatatcataggattgctaaaatatatttgaattataaaatagtaacctaataatacttctccacccttttgttatcaataaaagtaagtatgataaagaagtcatggtatcaacaaatttgcataaaacaatatatcatcatttagtatttttgcaaataagattgtgtctatctttttttaaaaaaaaattgttttccaaaaatgatttggtcaaacttttatactaagttcttggaacttccttaaaatcataaagagccttttttgaaaaaataaataaataaaatgaagacatgacttgaaaaaatattagcagcataaatggaatcaaattttccaacatacaatcttcattcatatatatatatagagagagagagagatacattcaaaatgtacttcaatattcatttggtataaactaacattgaaaaatatacaaagacaagtaccattctattttattcaacattaatttagaagcaatggtttcttatcgatcgtatcttcttccattttcaaaccttcgactactatttctaacaaataaaccactttcatccatattagttctaaaaatccaactagttcttatctctgattgatcattaagtttaggcactaattccattatattgtttccataaaatgatgtaacattttctctttgcatgaatctaaaattcttcattctaacctcatgaaaattttaaattcaagaataaattcttactcttcttgtatcaataatttggttttttaggagattttgttttctttgctcactgtttttatgtagtttcttcaacttcatttgattttacatttgcctccacttcatttggcctatcatagagaaactttggagttttgctccagctatcaaattaaaacaatgaaagaacttcctattaccaatgaataaattgttaactaaattttatggggaaataattattttgaaaaatcaattttggatgcataaaacataatacatataaagaataaagaaatgacaaaataataattatattcttaccttaatccaggatattgataatacttatgatatgaccttgagtcacctagtaaattgttggatcaaggtcttcaactcactactctcatatggtagataaatggcgtatgttgctataagtaaacaactaaaggcataagaatgagaatgtgacttgagaccttaaccttataaaagagatttataactcttggtctttccatcaacaattatataagagttatactcattatttacaaatattatgtataaattaatagataatgatgggttaccaacttaaatgtattcaagtaattattcataaactttatgtacaaattaaacctcataatgatggagttacaaaagttgtatcatcatattcatataaataaaaattttctaattccctatttataattttagtcttttatacacaaaactcttgaatgctcaattaattgattcatctacctatcaattgatactcttaaataatacatatcaattcattatacaaatataattatgaataaccacaaattatataaaaatgctaacataaatcatattcaaattattaactaaaacaataatgaatgaagtctaggaggattataaattccttgatctaggtttggttcaaaatcacaagtaaacccttgcatagctatagaagagcttaataattctatattaataagccttaaagatactagacacaacaaatattctaattctttgttgggaaattagtaacatcttcttggtgtggaggactagtttatattaactatttttcaaaattttaaacaaagcaatgaacattatgcttgacattgaacaagagatagataaagatgacctataatcccctcttaggttagccttttctaaatccctttatagccttcaaaggctaagaaactggaaaaaataaacactagacaagtttcaagacaacctacatcaatcaaacactaataacatgttaagatatcattttaacctaaaagcttagaatttatttaggaactatttttaaattttttgttttctcaaaaaatagttttctaattttaaaaaaatatatatttgaaattttttattgaaaatgatttctttgagaattcattctaaacatgttattttttaagtgttttttgtaaaatatttgagaaacaataaaagatataaagaatattttaggaattttttaaattataggtagaagtgctacttttagagagaataaaccaagaaaattagttttcatattagaattctcaaatatatatatatatttcagaactatgctcaaaaaaaaatttaagaaggttgccaaaaaattattttcatatgtgaattctcaaacaaaattttgttcataaaagtgctttttttttataagaattatgcttaaaaattattttaaagatatattttcaaaaaatattcctctattaactttttccaaaaatattgttaaaccaactcttaattttaactatcaagtcaacaatttatgtcatctagacttgggctaaaacttcaacacttatatgataacaattttataccattaattttgccctaattaaatgttaaggatgtagtttaaataaatttattattgatcattctgcttaataatttaagtttctagattgtttgatgttatcaaaggttctatggcaaaatcatgaatctgaaactccaatttatcaatactcggactcaacaaatgttagctgagtcacccttcttaatttccatcatctccctcctttgacactttcaaattaggtatgcttgaccttaatctgattaatttcaatagagatcttcaaatatttacagcaggatgactaaaagatcttacgtatatttgaagaaatatccttacatatatttcaataaaagctgctcccctcttcattatctaaaatcagaagtactgatccatgtggtcttaaacaaataaatccactctccaacttgcaactatttatattaataaatcattgattgctatatgcaaatgtctatattttaaattgtctacagcttagaagcagtagacataataaatcgatggtgtaaaatatgattgattgaaggacaaggtttttgttattatatctgtattaatgacatagcacccatcccaagatgagtgctcccctattttgacttccccaaaagcctcctatagcatagcacccttcctctattttcatggatcaagaataaaaaatcactaggtatcttaccatttaatttaaggaaattttcatgaggatagattagtgcttccattatcttttctcagttcaaagtagcatggattttaattttttggttttttttcatcaggaccttgagatttgttgtaaatacacgctatcactattggtttcaaatttcattaaataacactcctataaatttatttcactatcaaatttaatttttgaagagatgttaagtaaaaatattttaaataggagttgtcaataattctgtaaaaactaaattttattcttttaaaaataaaatttaagtatgaaatatatttataagagtactaattaatgaaatttattttatggttttgttatcaattttttatttttctttaaaaagttttaacattttattagaaatattcaagtttttcataatggcaaaaaaacaaaaaaaaaaaaagttaatatttaatacaattattcttatgggacttcaaacttcaacttcaatgtcctcctactaaagataattaagagtccgttttgttgtaattttaaaaaacacttttactttaaatagtagttttgaaaaaaaaaaaataagtgtttgataaattttagaaaatatttttaaaatttttttaaaaaatatttatagtgttttataaaaaaaatttaataaatgattctcttaaaaatactttcaaagaaagcattcttattaaaaacactctgaataaaaatattatcaaatattaactaaacgatatttatcaagttataattataaaaaaaatatttataatatctaatatatcaaaaatcatggacatatatcgatgtttgtaaataatcgtctcattttgactaatcctcctattagttctaaccatattttgataataatacatataatatgcctatggatgaaattttcacaccaaaaaatgccttttggagagctgaaaacgaaataatcctgtttttttttggtgaacttttcattcatttctcatcataattagcatttgagaaaagttttgaagggttttttctttttcatattaatgaaaaggtggaagctaaatgattgaaatttgggctcatgaatcattgcttcaatttatataaatcttgtgagtggttagtcagcttagaaaaaatatcctccttattctcctgatctaccaattaatgacactccaagacaaattttcttgggaatactaaaatattatttatcatatcgtcaatagtcatcccatcacgttatcttaactgaatgacttagaaatatatatatatatatatatataaaatatagataataaaaccttattttatagtaaaaaatgtcatgacgtcggttgattgatttcctcaatttagatctatataaagggcgtgaagatgaaccttcaaaccacagcttctcatggcagctcatcagtgctcattgctcctaggcctactgatcttggttagctcattggcttggactgaaccagtggaagctgcct

SEQ ID NO: 10802 - DNA, 1150 bp, Vitis vinifera
  Intron number 2 from transcript GSVIVT01023570001 (locus G SVIVG01023570001) derived from phytozome v7.0 (chr-ID chr1 4; pos 9465917 to 9467066 reverse strand)
aaagggtcagtttatctctcagaatccttctctttttaattcttatgattttaattttccttttaacattgttatcaatcaaattattggaggaaaatacagaaaatttagattgagctggttcttgtttctctttttttattttcatttttcacctaaatttaacttaacggttaataatagagtttaatataattaaatatttaatttatttgtttttattcaggtttgaatggtggacgttgaaagtagtttgtacatattaaaatatttgtaaaattaattatgatatttgttcttactctaatttgaaaaaataatattcaaatatcctaaaatatttgaattattaatattataaaatttttataataattaattatataattattatgaaaatttgtattggaataataaaaatgatttctaattatactttatcagtaaaaaaatgctagaaaattttctaagttaacacttctatacagtgtacatatctttgtataatggttttataattgaagtatatgtttgattattgaaattaattcactaacttttatatttttaatttgggaaagaatatcaaattctattttttgatttacaaaattcatggacttatttactctaatgaatatttagatgaatgtaaattatgttttgggttttttttaattaagaaatatatattagaattagtggtagtttatttttattttgttgtgtgataaatgtatagaattttatggatttattttttattaatttattatctagataaaggaatttttttatagacaaataaaaagtatttaagtagtattttttttatgataagtttttgtaatttataatgaattcattctcatccaaattacgggtggtttaatttttttttttaagacaattagataagaatcaatcaaatgtatgagagttatattaaaatgaattccacaggaactctgctatttcttgactgattttttccttacaaattcttatagttttagacaatgaaattcaatttgtttaagcatgtacatgtataattttcttttttcatttagtcaaaatatataaataacaaaatgatgggatgaactctgcaggttgcatttcctagcttgaatttcttattcatcgg

SEQ ID NO: 10803 - DNA, 8069 bp, Vitis vinifera
  Intron number 1 from transcript GSVIVT01015862001 (locus G SVIVG01015862001) derived from phytozome v7.0 (chr-ID chr3 ; pos 18562617 to 18570685 reverse strand)
ttgacagtgctattgaagaaaactcgcaacctgtaatgtttatcgaaatgcatttttctttaatttacacaaccatatctccttttgattctaaaaaatatcaatgcactcattagtccactaattaagcttgaggatctttattctttgtttttagttggctttgtagtttttcatatatagacttgttaattatcacatgcttaacataggattttaactctacttaaaattctttcaaatcatacccataccatctattacctaattaagaaaaggtatcaaagtatgttttgaagtaagagttagatattgctctaagttttggtggtagtaatagattgctagaagaaatttaatcatttttaaaaatatattttataaattatgcacattattgcaatatgtctaagtgttaaactagatcaaagaaataaaaatttcattcttataaagtatgttagaaacacaaagataggctaggttgattaacaaatcgataataggacaatacaaattcagttgaaaataggaatatataaaattgataattcgtagattgatgagcaaacgattgaaggaaaagcttatattggagaatacaaagtgacacacaccatatgggaagtaggtgcttcttagtggtaccatctatttatgtcatccttgcttagataagtgactttgtggttggtgttgtggataattttaatgctaagtaaaatgggtttccttgttgtgaagatacctagagatgtgatgactaggtagttgatcatgttaaaatgaattaaaatgatcttactatatgtaggtagttcttacatggtaaaaaatgtgtacaacaagaagctatggtagtacagtggaaccaattgtcttccacttggatggttaaaattgtaagtaattaagatagaaaaaaaatgtgaaaatgaagaatcaagtgataaggtacactttaaagaactttaatatttggatattaacaaatctaatctatgcggtgaaaatgaagatgaattctccggaagtctcgtacacccaaaatcttccacctgatggctttaacatgatcttggcattttaactgataagaaggtatgaaggatggaggttgttactcttctttctttggaggtggaagacaactctcttgaaaaccttaggccctaagggggtatttatatggttccttaattaggcttaagtgatttaagtccactaaaggcttgggttacttgatctagcccaaaatgggttctaattaattaattaaccttatggtgccatctaattaatcaattagtccaatcccgatactttgctcactaacccctgtgcaaccttgtgtagttaccaaaattcccttatgcataaaagtgaactaaaagtcaatccaaccctcatagattgtgccatcaaggtatataatctcaagcagggaccactaggacttataggatagtataggcgccctcagaatccaattatgaagttaattcaacatcccattacaaagaatcagctacactccagtactttatgtaaataacaatgagacactaagtgctcaaatttttgacttgttatccattgcgttcaatctccttttgaataggtgttcatagtctaaccaagtaaacactatcaacctttcaaggcttccttttctatccttgagttatagatcttcttattatgtgttcaattgacatatcttagctctcaaagagcttaaatcaagttaaacttaaggaactacgacataatttacatagacacacatctttaggatcacccaaggggacattctatctcaatcctatgaaatatcatattgtctttattcagaatacctattgctactgacttccatcaattgtgacccaatccataggaaatatataatcaatttatgatctcatccctacattaaagccattattaactttaccacaaactcagtattctctcaaggctgagaaacaacatgatgaagcaatttggtgaagtcatgacaacttaatagttttatatcatggcttaccataggtcttgttcgatgtgtaaccatatacactagtgcactcaccttggaaaatccatttcaatggctaaaactaacaatctttccaattaggaggtagtgtactacaacctctaatggattacctaggcccatgaactggttgtgaacaagtcatttacttgcaaggaacctgtgacttggacctttcatacaactcctaatgcacccaagttacatacattgaaagagatgcaagtcataatacttacaaggtataatgcatcaaatggagataaataaaagtgaactagaaatttattaataaataataaaattcaaaagtttattacatcatgtcatgcttttaagggttttatcctaacaattatgatctacactttatcaatctaggttaaagactttaaaatctcatttaaattgatatatgatttagctttaagtttatatcaatttaatgctcaaattgggtctcttagttgcatggatcaagaatacataattagtttaattcatcttcaaccacccttcccatatatcctataatgaaactacataatttcaccaaatctaacattaagtattcagtgaatcgagaaagattacattatattccttattctaggcatattttcttaaaataatcaatcaaaaaatttaatcaagatcaccatccattcatagctccaattaaccaattcaccatggatcttgactctagttcttttcttctctataaaagtgaaaattagccactcattttttggagatctaatggtacaaaatatgtttgactctaaagaaaatgaatgaaaattgctaagaaagtaaaataaaaagttatttctccaaatgaaaaattatacagctctctcaattacaaaaatggctaaaaaaaatcttaaatgaaaattcttaactcctacgtatagtgattacaatgaacacatggtacaaaaataggtgactaatttttttagcccatcaagaattttccaattatgctaacccagtaatggaatgagcctttcaattttaaatatggagaattagcattgagttgaattcttctcacatggtggatttgatactcatatgtgcatgcaaggctttatggagaattcatcattatgacattactcaacctttctttgaatgagtctagtgcgaatagcacatgagaatgtagctggattacaccaattttgtggctgctcgaatagggatttaaaaggctcacataggtgttaaaaaatagtgtgaaaataatgctcaatgatggccttttatggagctttgcataggcattccaaccattataaaaccaatcaaaagcatacagattataactttgttggcataataatccaaagattcacatggatattcaaaattggttgtttctcgttcaaatatagctacaattcccttatcaaattaactattcatacaaacttccaaccatgaaatttcaacctttaaagttgcttaatgcatgaagttcccaaccaagcttggattcttcatttccttccaaagatcaatctctagcctttctccaaatctcttaaattcatcactcccttttgtaatttttggatgacaccaagataataggggtacatgctctttagatcctaaggctactagatctactagatagtgaaagcaaggaaacatagatctaggtgttataaaaattgtacctttggatttggatgttcccagatcctactctagttgatgcaatgatcttaaaaatctcgtgatcttccacctgatgtcactatcttcgattcttggcacatgtgtaaagtggctacacgccttaaagagagagataaagagaggctaggtttttaaaagactactagtctcaaagttagagtctaaccctaaaacccaaggggtttatataaactcttctatgggcttaagtaactttggcctaacttaagcttgggtcacttaatctaactcactacatcttaattaattaattagccataatgggctttagttaagtaaatagcccaatccagaaaaacctaaaaaaattaatcataaattcatgtgcaacctttctcttttaccaaaactctcttatgtatacaaattattaactctccataaaacatcaaaactttgggccaacaaagactataagctcgagtagggaccattaggacccataggaaaatactatccctctcaaaatcaaattttaaaattgactcgacatttctctaaagaaagtaaactgcactccaatatcgtatgatattacatcgagataaaaattgattaatccaatttaatcaatttcttgagttcatgaactactatccactagatgtagactccacatgaactgatgtttataagttaataaggtgaaagttattaacctctcaagattacctctatcattattaagtctcaaatctttctattatgtgatcaactaacatactctaactcacaaagagcatatattaaattccactaaaggatttactatgaccacatatttcatgattacaaatccttaagatcatctaagtggacatattttcttagacttattagatatcatggtacatatcttgagaatacctattgtcacatgccttatcttggaaaccccaaatttatctattcccggttcaaccttggttcgtcctagggaagggctagccaaactttcccaatgatggcgccagtttttggttttgtcatgaggcaagttgccacggttctgtgtatgttaggaacatcagtatggacattaagtacaaaaggttacttattaacaacaccaattctcccattaggaatgttcttggtttaaacaaaatctagaaataattttcaatacactttactagttcaaattttaaaccaaggtagtcattaaaacttcaaactcccgataaattggtgtccctggtctaaaaaggtaaacccgttaagattacctttccaatccttgagttacaaatcttcctattatgtgatcaattaactccaatgagcatatgtcagattccactaaaggaattactacgaccatatatagatttcatgatcacatattcttaagatcacctaaggggacatactgtctcaatcctatgagatatcatggtgcctctattgagaatacttgttgttaacaaccttcatcaatagtgacctaatctatagggatatatgaccactttagagtctcacctataggtcaaagcctcctattgattttagcacaagctcaatatcctctcaaagttgaaaatccatacaatctagtagcttggtgaagcattaaaactcgatagccttacatcatgattcaccctaggtcttatccaatgtgtaaccatacacactagtacattcaccatgagaaacccatccaaaagaccaagacaagtcatcattccaatcaggaggtaatgtactatagtctctacaagattgcccaaatccatgaatcaactgtgaactacttatcatcttacaaggaacctatgacttttatcttatgtgcaactcctaatgcacccaagtcatgtataatgcaaattatatgggtttaaattatcaaatcaatgtcaatgcataaaaaagatagttagaggaaactgaagtctaactttgttatatcatgtcttgcttttaagggctcaatcccaaactaacccaaaaaaaaaaagattgagcactatagaaagaatatgttccacaatcacatcacctctctatactatctcataaaataggtggtactttctctctatgcattttattttttagtggtattttggttctttaaattgtgtcactaccccactattatcacataataggatcttagatgatacaaccaagagaattagccctaatcccataatgaaaatcctaagccaaacgatatcctttgttgctttagaagtagcaacaaatatcacttagagtgtaaacacatatctaaaggtagacctacgagagtcctcattaaactgaaagtctaattcctgatacccaaggaataccaactcaatgcatgactcataaacatataatccctcattctcataagatacttgagtatatgcttgacatacgtccaaaagtctaatccttgattagactaatatcaacttgccatttctacaacaaagcaaatattcgatctagcacatagcaacacatacataatcctacacatcgtagaaacatagggtactagcttaatgcaatttatctcttcatatgtcaaaggcgctaatcctaagaaagacaactctaaacttaagggtagaaacccttggagtcttgtatcatgcacttgatcaaatgcttgtcaatgtaggtgatatagcacaatttcccattcttatagtccaaaaatacttcaaacccaagaatatattgtgccatcttctaaattttcatctagagataagtagagaaccaaatcttaactgatgacaatatccttatatcataccaatgagtagattgtcatctacctgcaagatcttaaagcaccatcatgctttctttcgccttcttgtacacacaaggccttttgctatgaaaatatttggttacatcatagtgatgctaacatcaagataatcattcaagaatgctatcttgatattcaattgttgtatctcatagttgagatacactgcaatggatggcaaacactctaatgaattttagtataactactggtaaaaggtttgttatagttgaaagaatgttatcaaactataactttagctacaacctagccacataaaactcagtctttccatctactttcatacgggttttacctcttccaatgcttctataggaacctaaactatgttagaacacaaatattttaaccatcccttcatagctccttgccataagtgagcactaatgcaactcactacttcatcataacctgtgggatacaaaactcctactatgatgaggcacttgtgtactagaaatactgagaatggaatgtgcttatacctttatatccatagtattctatgcaatgtaggactacctttagatccatagtattctatgcaatgtaggactatcttttagtgttttccaatctatatctttctttgccatattccttatcatattggagcacatgtttcaactctaatcaaacactttgtctcaatcccatgagatatcatgtagcctttattaagaacatgtacctattgctaccaatttccatcaatagtgacccaatccatagggaatatatgattagcttatgatttcactcataggtcaaagtcattgttaactttaccacaaactcggtgttttcttaaggttgagagaaaacacaatgaagcaacttggtgaagtcataactaattgatagccttaagtcatgacttattataagtcttatccaatgtgtaaccatacacactagtgcactcaccctaggagaccatcctgatggtcaaggactactcgtccctccaattaggaggtagtgcactacaacctctaatgggtcgcctaagcccacaaaccactataactaagtcatctacttgcaaggaatcatgatttggatcttccttgcaactcctaatgcacccaagtcacatataatgcaagagatgcaaggtagaatgcttataaggtataatacatagaatgaggatagataaaagtgaattataaatttattaataaatattaaaacacaaaagtttattacatcatgtcatacttttaaaggctctatcctaacatttactaacatgatggttaattaattttgttaaaccaaactcttgaaacatcaatgagaattgattccctaacttaatctcaaatcaggaagaactatcctttagcatattaatcattatatgcattaatacttcaattggatgaaattttatttaattttttgtagtactgatacttcttgtaacaacatttttttaggaagctgacaaagaatttc

SEQ ID NO: 10804 - DNA, 12949 bp, Vitis vinifera
  Intron number 1 from transcript GSVIVT01017195001 (locus G SVIVG01017195001) derived from phytozome v7.0 (chr-ID chr9 ; pos 5203347 to 5216295 reverse strand)
tcaaaattggattggttgttgactcgattgaaccggtttgaaaattaaaaattattataataagtgaaaaaatatatataaataattaaaattttaaaaatatttcatcattttatttgatatttaagatttaagaacaacatgggggcccacatttcatggttaaaataataaataaaaaatcaattgtggggccatgaatttttgtattacaagtcatatgatcaatgtttaattggattggtgattgaactagaaaagttacttgttcatggttcattggtcggacctcgatcgacatcataaataataatttatatattataaaattttaaataattataagaaattaaaattatatataattaaaaattttaataatttcatttttatatttgacatatcaaattaaatgatgaagagaaatataaatatattaatattttaaattttattaaatagaccatttataatatttaaatataaggatatatataaaatgaaaaaaaaattataatatttaattttatttgcatgtcttttgtattttattattttgaaattattatattaattaatttgcattattatttttaattacattatataattattataaaaataaatgtgaaagtgttttatacttttatacaataaaagtatatacgtgtttttcatcatttaacaagttcatttgagaaaatcactctaggcattggattgattttcaaaattcaagaaaagactcttgtcatcatctttgggattgtaatcaaagtgaatgaataaagggaaaattttcttttgtaaagaatattatatttgagtctataccgcacaatcaattaattttaatataaagttttgatcacatatatttttcctatagtttttggttgttttgcaagacttcaagaaatttgtgcatacacaacttaaaggagatttggattttttattaattttttaaagagttcttaaatttccttttcataatatctcaatggtttttgaatcatttgaattggtcttgccttagtgggaatatcattttccctaaattctaggttgtaaggtagttccataacatgttcattcctatgccaaaatacattagggaatttaggacaggcttctctaaccaacttttctttgaattattggataacatcttgagtctttttaacttctaattgttcttcaattctcttagatctaacttcttgaactaaaaaattgatatgattatccttagcctgtatttttttagaaataatcaaggatcttaatttatttaggtttctttttcaaggatatgcaaattcaaaaagagtctcttgatttaagaatttagtcttataccttgaccatctactctagtgataggccagacaattaaaaagggtatttcaagaatatttcttctcttaaatcttataccaaattaaatgttgtgtgcatatcccttgattattgatataagccttagacaaattgtacctaatcttaagtttgacctattagcatgccataaagaagctactcttgaatctattaagacaacaattaatcttagcgatgaactcattgttaatcacaattattagggaaacattgcattttttaaagatcgattcttattacttactatctaattaatttgttcttgaaggtttgttaaacatatgttggtgtattgtcttaattctctaacttctaacatcatcttgtttcctattgaagatctttaataatcactttcttagggaattatagttaaatcttgtcaagatttcatagaagttataaggttttatagttttttttttttcatttctagtttagaaatcgatttcttacaaatttcacataattatgtttttattgaagaatctttaaccttaataaataattctaaaattaattcttattccatagtgattacatttaaggtctttggccggcaaatatcttttatgcatatttcttggtgattggaactttggcttagattttcttcaatgttttgaaaaagactaacatcatcttgatgatttgattctattaaggattttgattttgaagtagtttgataatcatagtctcgtatgattataccttgctctcattattttcaagcgtcctattttgatgtgataatgaataattatgaccaaaattttagattttcttaaattcatatgcttaagcattattaatatttctctgattaaatttataccaacatctcattcattcacattttactctcattttttatttttatttttttgtaacttttaaagacaaattctttggtttcattattttctattttagtctcatttgattatacctttcattattttcaattgttcctatatatttttgatgtgatcatgaataattatggccaaaattttagattttcttaaattcatatacttaagattgtcaatatttttctaattaaatatatatatatatatatatatatatatatatgttaattcatatttaactctcattttttcatacattttagagaatttttttagttttattattttctatcttagtctagtttagttatacattgatctcattattttcacccatcactatatatatttgatgtgattatgaataattatgaccaaaattttagattttcttaaattcatatatttaagcattattaatatttctgttgttaaatttatccctatatctcattaattcatattttactgtgattttttcataccttttagagacaaattttttggtttcattattttcttagtcttgtttgcttatacattgctctcattattttcaacccttcctatatatatttattgtaatcatggataattatggttaaaattttagatttttttaaattcatatctttaagcattgttaatatttctctaactaaatttacctatatttgattaattcatatttgattctcatttcttggtactgtttagagacaaattttttggtttcattatttttcttagtcccatttggttacacattgatttcattattttcaaccattctgtagaaaaccacccccccaggagctttagcttattattattattattattattattgtttttctgaccgcctctcaagcgggctgctctggggcagctagaggggatgaggggtagccaccagatgggatgggtagcagcaggcaggatgacttgctgaggaagacacaaacagaggaaaaagagaagaaaaagaaaaggggggttccggggggtgatggggggggacattttgaagcttggagaaaagaagagggggcgcagggggattcagacgagagagaggaaggtgacgtggtggaatattcaggtaaggtcttctgttaatctatgaaggttattttgtgatttgctgtgggtatccaagaccctgaaaatgcttgctctgttttttttttttttgcttcctgcaattttgttgatttttcccttgcaagagattggatcctcacttgggtttgatgtttgatcaatggcattgagaacttccagtttctctccacccttgcatggctgcgttgaacccataccaatacccaccacagctatcctagttcccatccacgtccctgcacccattcctctcccctcgcatggctatgcatagccatgcatggctgccacctttcataaccgatgagcccctaaagaggagctctggatcggtgctaatcccaagcatcgtcgccgcagccactgctcccacggcggtcaaggcagcccgaatccgacggggtagcatggagagctgctcgatgtagacacgagaaggcacgaggcgcgcgcaggacgcgccttcgatctcgcctgcgtcgtacctgactcgggcgacgtcgctgccggagggagagcgatccagagagagctcaaccagctgtcgtctgcttgcgtcggcgacatgcacatgaccaccgtgaagaaaggaagctcgatctcagccggtagagcacgtggacgcgccgagaaagcggcgcgcgccgactgccagcttcatccaggcgtgatggagtcagccgccgccgccgcggggagatgttgaaggggttgcagccaggcgggacaagttggtgagggagatgagtctctgaagccgcccatgctagcattggacttgggcttaagttggagcccaggcccatttacattgatgaaggcctcatgccaattccccttattaaagtggcccatgcccacttcaagttagcccatcaggttgcccaattcctaaataatcattttaaaaagaaaacaaaacaaaacctctaatatccataattgattaatcaaatcatccccttttatttgtcatcttatttttatacatttggttaactcatcttaaagaaaattgaaagtcaaattattattgttaattatagttttatcttgaagcttatattattcaatttggctagcttaaacattataactatttattattattattatttttttgtgtatatctatttatcatattttataaatctcgtttattaaagtcaaaattctaatccttcaaaaaccccatgtctcaatttaatttttcaaaagctcgtttagaccttgtttccatcaatcggaattataatcccatacttacctagttacttaaagtctaatccttcaaacattccatatttaaatttaatttttcaatcctaaaaattcaataattagttcaaatctcattttcatccattagaattatttatctcatatttatctagctatttaaaatctgaatcttttaagaaaatcccatgccttaatttaattcttcaaatatctgtctctcatgttcatcaattggaattattatcctatcgtttaaatcttattttcatcaaacaggattattatcccatattcatctatttatttaaaacctagttcttcaaaaaatctcttgtcttaattcaatctttcaatcctaaaaattctacaattcgtctaaattttatcttcatcaattagaatcatttatttcatgtctatttaaagtccaatcttccgaaaaccccatgccttaattaaaactccaatctaaaaaaaaaattctactatccatctttattcgcctaaatattattctcattaattagtattataatcctacctatttattcaaagtcatatcctttaaaaatccaacgccctaattcaaattcttgattagaaaaattctactattatttttttactcgtttaaacattatttttgctaattagtatcattactccatacttatttacttatttatttcaatcattaaaattcaattcttcaaaaaccggacttccaaatttaaccttgagactcaaaaattccaccattcacttttattcattcaaatatcatctttgttatcattgttataaattccacgtttacttatttctttcttctaaaaattccaataattagagtccaattattcagagatccgactttcaaacttaaatttaaaaatcccactattcactattcatctgtccaaatatcgttttgattaattaataacattattccatatttacctatttatttctcttaaaaatctcaatcattaaaattcaattcttcaaaattccaatttctaaatttagctatttgaaactccaattgtccaatctccgaacttaattttcagttttccatgctccaattcccgtatttatcccactacttattattatcattatcattatcattatcatcttattcattatttctataaattccgccttcgaatgatttctaagatttccaatttttactcatcaactttcataatttctatttctcaaataacttacgattctgatatctttcaaaattcaactcccaaagtctcaattttcgcaacttaatttttctttaaaatcccgaaccttcaaatcgttttcaaaattccaacctctttcaaattcagtttctaaaaattctcattctcacattcaatctctaaaagtctaatctccaaataaactctaaaactccaattttctagtgatcttcgagattccaatttttcaattaaatttcaaaaatctaattttctcccgaatagttttaatttcgctatggctttcaaacaatcttctgctcctatggactttaataagcaagaatgaattttccgtaattccgaataatggaatttatgggattaattcatgcaatataaatcgggctttggtgggggccccacatacacgtttttatgattgattgtttaattagttgatttgatggtagtacatgattgagttattctgctctatgacatgcatgatattatttcttaactgtgcgctaaccccctttcttgatggacgctgatcgtttggtgccaaggtatgctccactcccacttcgatcgttcttattgagtgttttgattttcacatgagcatggccatcctaggtatttattgatttactcatcaattgccatgattgctttattttattagtagagacctgtttttagggacttagaggggtgctacggtctctaccgtaccttctcgataagtaacctgacccccgaactcgatccggtttttcatagaccacattttccaaaacaaggagtcacacttagggtttttctttcttattttgtttaccctttaaaataaaacaaaaataagtggcgactccaagtcattttcaaacaataaataaaatcaaaatttcaaattaaaatcgagctcgccatcgagtgggaaacgcatgagccgaaatgcggggtccacacattcctatatatatatttgatttgagaaaaattatggtcaaaattttagaatttcttaaattcacatatttaagcattattagtatttctcttattaaatttatacttgtatctcattaattcatatttgactctcattttccataccttttagagacaaattatttgatttcattattttcttaacatcatttggttatacattgctctcattattttcaaccattcctatatatatttgatgtaatcatgaaaaattatggccaaattttagattttcctaaattcatacatttattacttcaaatgtttggttccacaaaaatttgtgggaaaatgaaaggaaaataaaaaatagattaaaaatcgataaattatttttatttattacttcaaactcattttgtttattttaattaatcgatataaagattaaataattaaaagatacgtaagtttctaattagttttaattatacttgactttcttttatatttttcataagacaatcaaatatgagaaaatcattttcctttatattttttttttatttttttaatattttcttggaaccaaacataaccttaagcgtatttaatatttctcctattaaatttatacctatatctagttaatcggtatttgaatctcattttttcataccttttaaagacaaattctttggtctcattatttcccatcttagtaccatttggttatgcattgctctcattattttcaaccattcctatatataaatttgatgtgatcatgaataattatgatcgaaattttagattttcttaaattcatagatttaagcataattaacatttttcttattaagtttatacctatatctccttcattcatatttgattctcattttttcataccttttagagacaaattctttggtctcattttttcctatcttaggtggtgtttgtttttttagctttttgctgaaaacaatttagttttaaaatttaggttgtttgtttttctactttttcatgacttattataaactttttactaaatagaaaaaaccaaaatatgtaactttttctaaatagagaaaataatatattgattttttttactttttaatacttaatagaaataaaatactacaaaaacaaacaacctaatatttaacactattaagtattaagactctatttagaattaagtaaaaaaacaaacaccatcttagtcttatttggttataccttactctcataattaatgtcatcatgaataattaagtaaaaaatttgtgaatatttctcttatttaatttattttcaagtcttcaacaaattgctaatgaaataatttaaatatatatatatatatatatatatatatatatatatatatatatatatatttatggaaaaggataaaaatgatgaggaaaaagatgaaaaaatgataatatggaaaccacgtgaggaaagatcgattgcctgaccaattagcaaaccaaaagaacaatcaacacgtaggattgaattgtactttacagtcaaactacttggaggcacagtttgatacctttagattctatatatagaatgttccttttagaaggaaaaaaatgaaaatctctttatcaaaaaaagaaaaaagaaaagggctttggtttccttgaaaggttggatccaaccatttatagtatttttgttttttaagaacaactttgaggacaatctcagtagctatatgaaatcgttctgatcatcccatgtattattgacaatgtttttctaagacttgttcgatcttcaatttagtaagttcttctatactctctaatatcattacctttttcatgtgactgtttttcttttaaaaatcattagcattgtgtgtgtctatatatatagttggtaggatagggtatttgaaaagtgtttttttgaaaataatttttaaaaataatttttgaaaattgttgtttgattttttataaaacaaaagtctatttaaaaacctaaaatattattaacatgttttttatatttttaaatatgttttaaaaataatttttatatgtagtgttttatttttaatcattcttcatatttgtatgattatttttaaaaagtaatcctttaaaaaaaagcgaaaacaattaaaggattgaaaatacaatgtttttcttaaaaaaaaaaacaaaacaataaaatgctttttgttttctattatcaaacttgttttcttgttttttttttgttttttttatttttattctggagactaaaaattgtttttaaaaacaattatcaatagaacctaatacttcatttgagtgatagttattgttttaattaatttctatgctcgttattgctttactaatttattttttaattagcaaagaaaaaacagatccacaaaaaagtttacaccaagttccataggttgtatgctcatagttgctttaataatccatatatattagttattcgccattaataatttttaatgtatgatattatcaattatgaatatcgattattagactaatatgttttttttattcaaaattaaaatacggttatattactaaaaaatgtattccatttattgaagcataaatatgtttacgttttcacaaatacttttattagaaaataatgttggttaacattgatattctcttactcaaaatcaagttgattattaattttaattaggatagagaggcaatcctaataaaaagagttgctttaagatggaagtcatttttcaaattatttttttagtttatcatttttaaaagaaaattttgtcttaataacaaaagttttcattttattttatttacttttatcttaaattttaaagcaactagctttaagatttaagtttaaaaaacaaataacctcctagatttcaagcaatttcaaagaggttaaacctgcttaaatcttatttgaaaggtggtgctttttttgaaaaaaaataaaattaaataaaccttgcatctaaataatacttaatagtgttaagacttaagtcatttttaaaattatttgttttttaacttgttactttttataagacaattttatcttaatataaaaaataaatttttatattttgattttaaattttaaaataatttgctttatgacataaatgaaaaagaaaaaacaaataatcccattactttgaaacaactctaaaaaaaattcttaaagtaaatttttattttttttttatttttatttttattttttaagattctaagcttaaagcttaataaagtggaatgttattaaatatttaaattgtttatttttcattagtctaaatagagcgaaatatcatttgagtgtttgattgtttagtttatataagtaaattgtttgttttcattaatgtggatgttattaaacattaattttttttatatccgtaaggtcatggtttggttgggtggatgtaatacatggtagaataagtagtgagatatattatctatatcttttttatattccttataggataagtagtgagatatattatcctatgtattataaatttatttttcttttattattttttattttttatcacttatttagtaaaataatttttttattgtgaagttaaatttatggttaaaatagaagaaccaaaaaaaatttacaaaatatattataaaaaaatatatattctattttatttcttattaattttacaaattaaatataagcataacgttacattacctatctcattaaatatgttaccttggaatattatatccattagacttgataatcttaaaaatatatggaaataatttattttaggaaatgcattggatatgtcatctcacaatatcatatcgattggatttaatataaaaaaataacatatttaattgaaaaattatattttaaaatatgcatttttcatttaatggaatttgatattatagaatataaatactctatcctatcatatctcacataccaaacatgcttgaaaacatgtataaaattaagtattatatttcttcttattttaaaaactaacaaaacattcaataattcacatttctatttacttgctaaagaaagtgtaagaaaccaaaaattatcaactgtgaaagtcttaatataggaagttgaagggaaaaaaaaagatggtggcatgtgtacattattatgaagtcgttgtgcagactcttttatagtcgatttccctcaccaattttctaggctatgtttggttcccgaaaaatatgagaaaaaatatgaaggaaagaaaataaagaggaaaagtagaaagaaagaaaaatataaaaaaattaatatagatttaaatttaataaattactttagactatgtttggttctcggaaaattaaagagaaaatgtgagggaaagaaaataaaaaggaaaagtggaaggaaagaaaaaataaaggaaaataaaaaataaatttaaaattaataaattatttatatatgtttcatcaaactcatttcacttcatttcatccattatataaaaattaaataattttaaaatgtataaatttctaactaattttaattatatttaattttttttaaaaaaaaattatattgaaatcaaacatgagaaaaccattttcctttacatttttttttctttccttggtactttccgggaaccaaacataaccttaatatatttcttcaaagttattttacttattttcgtctattatataaagattaaataatttaaaaatatataaaattttaacaaattttaattatattttattttcttttgtatttttcattatgaaactaaacatgagaaaatcatttttttttcttttcttagtacttttttagaaaccaaacataacttaaagaatcacaagaaaataaaccagtttcaaatcttttgacgcttcattttctgtcctaccaatcactatataaaccttccattctatatgatttttacaatgcagtagcagcaatacaacaagacataacattgtactaagagagagaaaaatgagtttatattctagactccaattgctattataccaaaagtcttaattaacatataaatctaaataaataataatttttaatattgatcaaattcctaaaattcttttagtttgactttagcttggattataatttcaacagttcgggttttggcgggttcttgttggttttgcaggagagttcttcctttttgtttgcaatgtcgactcctgaaactcgtagagctggttctatgagatggaggacccctgacgtcgagattttctcccaatctacgaggggtgaggatgacgaggaagctttgaaatgggccgcacttgagaaaccccccacctacaatcggttgaggaaaggtttgttgctgggatcagagggtgaggccattgaagttgatatacacaaccttgggcttcaggacaagaagaatttagtggaacagttgataaaaattgctgaagagtacaatgagaagttcttgttgaagctcaagaatcgtatggataggtgagtttgcctgatagttgtttcctacattttctccccaaccaaacaactttctttaactttttaatgatgagttttcatgtctcttccattttttcagagttgggattgaacttcccaaaatgaagttagatatgagcatcttactattgatggagaagcttatgtaggaagcagagctttgccttcattctttaatttcatttttaatcaagttgaggtaactacaatgcaaatgtagatcattatctatgcaataaatactcttttcgatatgtatacttatagattataattttccttctgttttaaagaatatcttgcatagtcttcagattctttgaactagaaagagaaaattcactattctttgagatgttagcggaatcatcaaacctagtaggtgagagtatgaattcgtttcgagtgtaaaaatggattacttaataaaacaaacgaatagttcctttgaatttagaatatactcaaagatctatattcaattgttgtgcattttttttttctacagattgacgttacttttgggtcctccaagttctgaat

SEQ ID NO: 10805 - DNA, 5633 bp, Vitis vinifera
  Intron number 2 from transcript GSVIVT01034645001 (locus G SVIVG01034645001) derived from phytozome v7.0 (chr-ID chr1 3; pos 13505877 to 13511509 reverse strand)
aggttatattggctcaattcgacctttatcgtcaggttggattttcagtaggcacttaattggttcaatttaccgagattattattatctggtggattccctgcatgaacttcatagtttattcaatgttgttgtagattttggttgcatttagattttattcttgattatccaatgggttagttttttgggccctctgttgagtcttttccctatttcaatcttatgattcaatttgaagaaaatctgattgagtatattggtgagaatgtccggaaatagtcatggttgtcagatcaaatctgatttggaatgttgttactcacttactattttgactaatattacttgcattgtgcttttgaggttttgagctgtgctatggtagacttgtgtgtttgctcggttattaaacttaaatgtgagcttccttatttctttttaagaaggaaaaaaactatacatttttaatctcttatgttaatttttttgtgatttaatcacccatctattttctccattgtaatgctactagaaggccttgggaaatgccctatggaatgatggggagtggggtaaaccaccaaacatgttaaaccttcttgaaagaatgaataatccctgtagattgaattctgaaactggtagagtacatacaaataaatataaggttgattatgctacaaatactttgactaaattagaaaacctaattactaggcagatttcttggaaagaaacaaaccaaatgactattcaaaatcaatcgcaatatttataaacaaattatagttaatcaggtttggacataatttgtcaaatcttcaaacacttcccttcaagtagatgcacattgtgtcttggattccttaacttgtctaagattgataaaagaccatgtttggtaaatcgttagtcaagttgtttgtgaggtgcttaattaagaagaaatatggtgtacaaatctgctagtgatctactttctttttgatgaaatatggattaaatactacatgtttggcatgatcatggtggattaggctatgagctatatctatgactccccccccttttttttatggataaaaaataatatatatcgaaaagaggcaccaaaagagcgacttaaggtacaaaacctatactcccaccgccaaaaagtctcaaaacagtagattgatctacaaaacaggaagggctccaagagcctcaataagagcctaacaatcaaagaaactaactagagtctgaggacaaccatctatagacaacttagccttcgatcatagaaagcaaacaaaagcactttttagcctttggatggaaagcatgtcagtattgaaggcaattctgtttcttgccctccacattgcccaaaagatgcataaggggcctgctctccaactgttttgtgctttttatcaacaaaagacccatgccaacccagtagagtctctctaaccgatgagggaagcacccaagacaccctaaaaagagcaaagagcaactctcataagacccttgtctttaagtgtgatttttaaacagattcaacatctttttttttttagtttttatggatcacttctactaagaaaaccaatctcttgggattcttccacaatggtgctctaatgtgcttttctagttttcatccttgattttgccctcttccatcgattcccttattcccacattagggcttgccgcgaagtatcccactgcaatagtcatgccaaagcttgtctttgttcttagacttccttccttatcccttgaaacttgttggctaggaattaggcttaatgactgctgagttaaaactttctggggtctgattgttgaatttacccaatgttactccttgatggatttcttctccttgtgtataggcaaaaacctctcttaagtatggtaaaggttctttatctagcacttgaactttgacttgatcaagcttaggatgaagatcaactagaaatttgaagatcctctctcattccatcatctccatcaacttctttgtttcaattatagattacatcttgacttgtagccacaacccttttagagtgttataatactccatgaaagtagataatccttgcttggtggagtttctttggtgctctaacttcaatttttggattgctagacctattattaaataggtttgagtgtccaccttgtagatctctcttgaagaagtcaataagatacaagtcttattgatctttggttgcatagagtttaaccaagacatgaccttgatttttttttattttttatttttttgcatcctaagcctcaaacttaggaacaattgcttttgagatgggggtagttcctaataacatatatgatttttcacttaccctttaaaagtagttcgactgagaaacttttgactatttgattttgagatattgatatgaagggtaggatttccattatggacggaaatgggattaggcaaaatgtttagatgttgtgggcaactaatgaaatagtttaggagatttttgacataaggaggaatttctagggtttgagaaaaagatatggtagatttaaattagacagtgaaggtcaagcatgataattggcaaagaaggccaaaagagaagctggcaatgaaggcttagaagaaggttaagatgtaataccatttgttaggatcaaggcattagccatctcatttgaaaaccaattgactaacactgtgtagctccaacgggttggtctaacctagagagtttgtttgtttttactttgtagcttcttgttttcgtattcttgttgtttagtttttctttggtgggaggattcctcatccttctcttgtacttcttatttttatcaatatatctctttgtcgtttcctatcaaaaaaccaattgactatcagtgagttcaaactaaatctctttatatggttcaacatcagattcattttagggcttaaccgcctcaaggctcattatgaggcttaaccatctcataaccatctcacaacacatttattttcaggttttttttcctcctcttgaggcttgtacaagcacctatcctagggtttttttccatcctaaggattataacaaggtctaaccatcctagggcctacagacccatcctggggtttttagggtcttttcttgagtcgccatttttggggaaggacatacttgattgactaaaaacctctcgctaacattcgtgactcgaacccatgacatgactttgatacaatgaagaagtgaataatttatctttgtattaaattccaaatgtgtagaatactgataaatatacacaaagattgacgaggatacaagtaattttgacctagatcatgaaacctaattattaggctgatttatggggaagagatatacaaaaaataaaataaaaaaaatgatagcaatattcatagaaaaattataattaattgaatctggacataatttttcaattctttcaacacatctagtgcctattttatggaggaaacctagcattaatggtgggcttggttagcctttcagaagaatacaataactattgttgattctcagaaaaaaatgcatttttttttccattcacttagtctcataattacctggtaaaatagaacttttggggatatttgaagacaaatcaacccaatctttgttgctgagttttcattttttttccctccaaaacaaatgatggagtttactcagtggttgttttggcttattttcttctctctgctgtgtttttatgctcctttatttttgttttgccccctctttttgtatctctgtggcataggatttttttcccctttgagttgttacttattttatttaatttttatttcttctcaatatttattttgttgattttttctttttcttcaaaaatttatcgtcacaacttggatcctggagatctaaagacttgatgactgagctgcttaaagggttctagggtcaaaatgcaaggttaaaagtgagatttacagtgtaattttagtgaaaaagattagttttaaaaaggttttgaacttcgtgtgaattggatgcaaaggggattaaaaggaaggggaaaagagttggaggacctatatggttgatcctcaaaaggatgattccagatggccctggtagccatcccaggattcccagcctagttattgaaagtatttttgggccttttacctaggaatatgcacaaaaactgcaactatgtccctgattttcaatctttgtgaggacaaaatctcttcctccttttacaactccaccagaagattggtgttctcataacacaggttgaccaacaatggtgcaaatattctcatgcctaatcctgcattttattgacacataactcagctaactcccgcaatttatcaacacataacgcagcttatattctcattattcaccataagtgtcattgttaacaatgagacatatattgacagcatgaatatgtaggcaattcatctaccaatttagtcatactatcttcatatcaatgttctatcaatatttagagtccaacataatctcatccaaacaatcagtattacccaatattactttctacatcatttgaacaactgcatccatccatgcaattattataatgtaatgaatcatcagttgcgtgaaattttaacttctaaacactatcatagtaattacacaagctatacgtatctccctacattccacgatcagtagtcagagttctccattctttcctggatttgtcaatctaaactaaaatgcgttagtaagaatcatcccagatttaacttgtagaaaaaatgagatacatggaatgtaaaaacaaacctgaaagtgaatgggtttaaaaatgatttggtgactaaggtagagatgcactttaggcatggacttatctctatcacaatgctaaatgactggcaaacttacccaagcagtcatcagaaaattgcagtagacttgctggaaacctcctcattcgtgacattttcacctcaagcttctgaaacccaatacaaaatgaggcctctggttttccatatactttatgtgtcaagcacagaagtgtttccaaaaatactctccacttgatttagtctacagattcagactaacaactgttgtttaacttcgttttagtaatattttttgcagctccaacaaacactaggtacaagccagtggagacaattcaccactgaatttatttactgttaatttctcccttgaattccatgaaacattaattggctcttgtaaaaaattttggacttcaaatgtattttttatttagttaatgaatgattttttattttattttttatttaattttttttatatagttttcatttctttaatttatttggaagatacgattccatcatgagtagaaagttcatactctgatgtataattatgatgaatgggctgagagtcagccttattgacttccagattcttttcctattaagctttcatggtatggaggtctttaacttctggcacagaatgttccttttgatgcagatttcttttttattgttgttgaaaatattattatttcaacttgtaggcagagggtaaagtactcagagggccacaggagga

SEQ ID NO: 10806 - DNA, 1686 bp, Vitis vinifera
  Intron number 7 from transcript GSVIVT01000243001 (locus G SVIVG01000243001) derived from phytozome v7.0 (chr-ID chr7 ; pos 20466068 to 20467753)
attgaaggcgaggctgacgaactgaaggtattgtattttctataactcaaaatgttgaagtttggctacaaaaacatgaactaattttggtagattttcactttaaaattgtgctttgattctcaagattaatagaattattagaccataaatgctcatctgacagccattatcaattgcttgtgctttcaaaacctacctttttctgcaactagaaacagatcgcttactgttgatgtgctccttttttagttgaatctcattgaaaccggcttcaaatttatcaaaattttcaagaacttcaaattttattttgattttttgatgttctagaatcttaaaaatataaatttcttactggattttgatgattctcacataaaataattaacatttttttataaaaaatatccaacttttgaagttcttgttactcttctcaatgtttagggggatccataggtttaaaaggtgcaatgtgcacctaaggtgcaaaagtctcctatagcttaggcacaaggcgcaacacaaggggtacacctaagtgaaataaaacttgacctaggatgcatatcaattttataaaacatgatccaatatccaatccaatcaataaaaggtttaagattcgatcaaaagattcgaaacatttaaaagaagcaatcaacaaaaaagtaatgaaattatataaatttcaatgtacaattaaaaatttcaagaatagaattgtttaaaaaagaatgtattgtttgataacgaggagcatcaactctttttttgaatatgttcttccttagaaatttgtttacttgggtaaagcagtacgtagagatagattctatgtctttacttgattttgttgagtggttgggtttttgttagatgaaggtgttattgttggggttctttattgtaggggttctttcttgttttttgtgctattaggcgtctcccgtgtactttggtgcatcctagtggcactttttattttttaatgaatgtgtttttatctatccaaaaaaaaaaaaaaaaagagtaaagtagattagatgaagcacgcctcttcaacaaggcacgtgccttggcaagcaaagcacgataactagggagtagttgtgctttgggcctaggcacgctttaagtgtgccttttaaaactagggggggataaaatgttatcaaaaccaacatgtgaaattggccatttgaaaagactatgatgctattatgtgccaccactccacttccatgttctcttatcatcaggtcatatacttttccaacagccagattacatatgaaatggtggcactgtagttacttgtacagggttaagttactggttagagaatgttggacgaatttagtgaatctagatataacacaatcctcagtatattacaatggtatgatttcagagaatggtaatttggtcgagtagaacatttatcatattcatattttctgcagtgaaaatttgggctaccgtttattaaaaaaaaacaaaaaagaattcaagattctgagccccattatggtcatttatctatgtcacttttatttctttttgcttctgtcatctattatacaaatatcggatatgtatgcatatctttcaaatcctgattatattatcattctatttctatcagagggtattcttggaaggaaatccttatctcctggt

SEQ ID NO: 10807 - DNA, 3831 bp, Vitis vinifera
  Intron number 5 from transcript GSVIVT01033779001 (locus G SVIVG01033779001) derived from phytozome v7.0 (chr-ID chr8 ; pos 17895307 to 17899137 reverse strand)
gcttcctcctgtcttgttcgggttgggcctgacaggtatgcttcattattgactgtgacatctgtcaatattgtaaactactaatgcctttaaatcaataaaattttatgtggatgtaagtgtggaacttataaatagtactcatggggaccatggttcaaagtcgcaattttggttgagttggggggtttgagatggatcggtcacagcatcttggattgttattaggcaatttgcatgatgcgagttaaaattttaatttttagagaaataaataatagatggacttaacaaaataataaaaaacatgtatcacattttacattgtctaaataatagtagaatatggatttggattggtttatgatataatgataatattaggaattgacaactttactgttaataatacatattcatgtaattactttgtactaaatttagttaatttaattatgctttgttttaagctttaagacattagtttatgttttaaaaaagccaatctcaagtcaatgctaaatgattagggattgagattgtgaagcctttttttggcaaggctataggataaggtagtagtcaagggaggagagaataaggtgttttgattggagacaaagtggaattttcttagttaagtccttttacactagccttgagttagggagatcggtgttgttccctacaggtattgtgtgaaatgtgtgggttccacctaaggagaacatttttgtttgggaggcgacttgggaaaaagctatgactcttgaccagctagagaggggaggttggttgttggccaatagatgtttcctgtgtcgcactcatgaggagtcaattgaccacatcctatttcattgtggcaagatgaggatgttgtggtagcttttgttctctctttttggtgtttcatgggtggttcctttctatataagagaacctttgttaggttggcatgactcttctattggaaggaagcagaaaaaagtttggggagtagcttttttatgtcttttttggacaatttggaaggagagaaacaaaagattgtttgagaataaggagttctttgatcaaagattgaaattcttgattctgtgtaacttgttatcttggactaagttgtttatagatgaaagctcgattttttttttttataaataaaagacaaagatatattgtatattgataaatagataaagaggaggatgagggatcctccccacaaaatacaagaatttgatttgagtttgacttaagctcctctaccatgcaaggaaacctatacaaaaattagttcaattatggctatatatcaagaccaaacaaagcttctctcattgttttccaccttttttgaattataaactaaacacccattaagttgaataacattgagaggagtgtctttaaatgcaatagtacaagaagcccataagggggaatagaagtgaagtagatcccacaatgtctttgtcatccttcgcttttcctaaaaaatcctagcatttttctcttattacatgagccaaggcaaagtgaggcaagtgattatcgaaagggtcttgtctctagcaaaactccccaatcctctaaaaaagatggacaacatgttgcaaatgctcctgggtggtatccaatccattatgactagattgaataacttgtattataaccccaagcttattagacaatgtagaaaaagatagtcgatcgattctccatacttcatacataagaagcaccaatcagggttaagagttttgtaaggtcttctcaattgtggcatgtcattggtgttcacctttttgtgtaccactaactaggcaaagacctttactatagatgagactttgatttccatacaaatctggttggaaataaagacctggaattgatgaattggacaaggctataaagaaagattttatctagaataaacccgaaatcaatgaaattcatttttttttttcgtatattcactttatgctaggaaattgacaagcatttgaaatctatgagatattggatcaaaacttgaaatatatattcttgagtgtacgtaaaggaagattcaatgcctttgattgattttgttgattggatgggatcttgtcaggagagagagttgttttttgtgttctctcttgtctggctttgccttttttgtgctcattgtatttgtcttgcataatctagtgcatttttttcttttgccatttatatacatctctttttgcctatcaacaaaagaaaaaaaactcgtaacctttttattttaatttttttgaaagtaattgttactagtattggtttatgttaaagacaaccaacttcaaatcaagttcatgctaaaaacaactaaattaaatttcctataatcaaaatattaagatgtaagaaaattaagttggtgtttaagcctagaaaagggttgtttcttggtgttttgagcaatgggggcacgagagtcagctggggagagtctcattttctggcttggtagggtggtgattttgtttggatgtttgtcacttgcttttctctttgttttcttgttggcctttgggtagtttttgtatacttcatgtgtacggtgatgcgtcatctctaagcgcttttaatacattatcttattttacctataaaaaagagatatataagaaattaaaaatataacatataattgctacttaaatatttatcatcaactcaaacatgactcaattatccatgtttactaaaacatcacttatattcattatttttaatctattaaagattacccatgcctattaactattttctagtaaaacttataatgctataccacccaatagattcatccatacctgtacttgatacctaaccaattattaaaatatttcttcccttctatttttattcacttaaatggtaaaagaagatccaaagatggtttgtgtcatggggaaactctgctgctctttcagctgtaatgccaaccaacaaatcatagggtttcaaccatggacaaatagaaatcacgatgaagcagaagatggcgatatttatgagtacaactcatctggcatgactcttatagaagtagataaaatgaggttttttcctcatcaattattacttttcttcaatcatccatcacaatctagttgtagattttctctttttgattgattgatgcaggaaatctttgagaaatatagaaattcttgcactttttcaatcattgttgctgtgttgtggtgtcgtggcaatgcgatttgtgatcacggtgtgaatcggctgtcttgggctagtggaaaaatttggaatgggtattgagctggtattgtcatcgctgttccaaatatgacttggctgattggtcttggtgtctcttgatactttgaaccatgcgtggggctacctagtctagttgatattccttatatgttgctctggttttactttgaattattgtgagtttatgcccaccaataggcatttatccatcatttgtagaggtataattagcttcttgggttgtcctgtttgtagccctcccttgtgtaacttctctttcctctctctctctctctctctctctctctctctcttcctccttagttcttataaggggatctcatcttttgtgtgttttctcttccattttctattgcaatagaatctcattcttattaaaaaaattctcttgtatcatatattgaattgcagtctctgtagcatgcctcatcattgaatatattagcaaactatacaaacatctcagagtataattgtattactgcagggagtttctagttgatttggttggcaagccagggt

SEQ ID NO: 10808 - DNA, 4500 bp, Vitis vinifera
  Intron number 2 from transcript GSVIVT01036450001 (locus G SVIVG01036450001) derived from phytozome v7.0 (chr-ID chr1 4; pos 22167286 to 22171785)
ctcagatcctatctaggtatgagttcgaagtacctgtttcttgacgtgtatttttatttgttttaattcttgaaaaagacctgtggttttggctgtaaatggggttcttgttttaggattctattatagctattagtggtttttatttatcgtttacatttgtgactctataaacttaggtttcagttgaaaaccctagtccactctataaacttaggtttcagttgaaaaccctggtccttggagctatatgcaatagaggggggctttcggaagcctttctattttactttcagttgttgaatggtgatggtctcttgtgcttgttttcatgataaggtagataggctcctttctgcagaaaaacctccattgcaagcacccacctggtatttcaggtgggtttgagtcctaccatgtgtgcacatgatggttgcattcactaagcacagaagttggaatctcaaaggctaaaagcatgaaaaggattggtgaggagtaatgggcccttgagatgcctaaactacttgatataaatttgaaatgagctgtaatgcctgattaagcaatgaagttctcatttcagaagcctgtagctccttgtcatggagtccatgagtttctttctcttgtttctcatactgaactcatttaattattttattatgttgagaagtgatatcaaaagtaggagttaggttttattctttaagggtcatatatttggtagcttacatgcatattgagactttggttgattgtcataattcattaaatgtggagggatactcattcacatgtagttgaagtaaatggataatatttatggttaataaaatttaatttggcatgtataaaacttgaaaaataagtactaccttgaattgtttgatgcataaattgatagcagtaactgagtgattaagtctggatatatggattaactaggttagctaagctccaaggttttgatttaatataaaccaaaagttacaagttggtctcaattctactggaactacatagaatcatgtaaagaatttccccaggtgattaatgttcattgatgttggttatgggttgctactatgtattcaatgctgctgcagaagttgtaagtgattctggttagtttttctgtattgcaaaaccatctttcctctcttggctcaattaggatttatgtgttgtgtcaaggatggtatttcagttttctcttgatgattgaaagtaaatagtacctgatcatggagttatagtgtcttgggagaggcacattctaatggttgtttggtgtctcaagcaatttcaataagttcaacttcaggtttgacttcctacctaattgaatgtaaattaacgttttttaaacaactagtagtatgttatgactaggataagctggaaaaatttactaagttcaattatgtgatcactcttgtgattgaaaagttagggaaataaaggaatcttgatacttaagaagatgggaggtaaatatagtaatatgcttgggaattgttcttgaaaattgttttatattctttagaatagaaaactgttttctaatttagaaaacacctttaacaatttttttactgaaaaatagttttttgaaaataggtcgttatattagacaatatagagattttttaagtattttttgtagagtatttgaagaaacaattgaaaatacggaggatgttttgggaacattttcattatacatatgttaaataaactgtgaaaaactgtttttcatatttgggccatgaaaactgtttttaatatttgggttcccaaataaaattttgtttctcttcaagaattgttctcaaaaaattgtttttgtaagcattgtgaaacagaccctagttttttctttttctttttctttttttttttgggtttttggaggttgcttgtatatgaagagttgcttgaggagctatatgtctacaagaccatgggttgctattacttccaatgcggttaatttgttaagttccatatgtcaagagaagctaagactttatatatgaaatgacaagacatgctttccctttaacaactattgaaaatttctttataaacaggtgcaaggtcggggatggagcttcttaatgcccagtggggcacttgccccctttgagaatttatttgaatccctaacacaaagtgactaagtaaaaaattaccactaatttaaattgagaagtttgttttttttcttttacttttttgtttggtttgaaataaatttctgaaaccttgcagccctaatgagattcccagctttgccactttgcaaggttgcgttgaagaaaaaggatgaaaaagaaaatgctgcacatcctcaacaagtttcccaggaaaaagccaaaaatttaaaaaccttggggaatcttatgaggaactccattgcataaatttatggatgatcactgttaagataacatagttgctattccataatttcaaactccaattgatccactcccaaaaacttctcctgtatcttacctttaaagtcaactgaatgactgctgaaccagaaaattttctcataattaagtccttggagctgcatttgttgctcatccggtctagatctagtgctagtgaggagaaaggatttttcattgtggaaggtgtttaacagaggggttttttgtaaattttttttctaaggtgcattcaatggtttcttcccattcctttatagcatccttactatggagctcttgtccccatacaatgcagatttttttcatgtggaagctggaagttttgcagggaaaagattcttatcactgatcaattgatgcaaaggcaatgttgtatggttgattggtgttttctctgcaagcttggcagggagtttgccagtcataatccgtttcattttatggtggctagatggctttgggtgattgtcttctcaattttttgaatttcttggggtgcttccttgttctatggacactctagtttgctatagggttagttttgtgcaaaaaagacatgggagaatatggagaactgtaccgtttccctgttttagtgctttgaaaaggagcaaaataagtgaattttagaaggatcagagcaattggtttaaaggacaaaaattcatcattgaagtctcaattatcatggtccctaggagtggatgggttatttttttgttgatttcattggtagattgtgattgccttgaggcttgtgctagttctcctatcatgggcctcctcttcttctttcttttgcatatcaattatattccttgtactgacgttagcccccacccccccctttgtgctgttcaatgaaacatcgtttacctatcaaaaggatggaaaaattattagacatccagccttccatgaggtcttgtaaatggcatgctatttagattgtgatatcctgaataagaatacttttctaaaaaatttagattaataggaagcatgtcactcttttttccttttagttttgaaaaaacaatcaacttccatgaaacaggttagaattgatctatatttcaatacctttatacttaattctcttggtttgttttctttgatttcctgggaagatggccttttcagggaaaacaaaggaaatgacagatgcgatttaattttaatacagtgcaagcatgcaaggcagaaagaatcaagtgtatgtttgtgtcaataaaggactcttgttgttgctgcctttgaaaataattcagtttaggaatatttatcaaggatggacatccttattacaatattcgtgttcatattaaaatctgtgtttttttttattatttctcaacttttatcttttggaatgaagaagtccttgtatgttgtctatgtcatatttgttcatattaagtagcaagttgattgtatgtgcatgggtgcatgtgttgtgtcaatttgttcattctagtatatggaatactgaatatatgatatctggcacatgaaatatatgaactataatttgtacttaacattcagaccttgcaactaaacaaaaatttcaagtttcaaggaatcagaaattgtaaactgaaaggctttgcttctttcaaactcctgtttatgcttattttgactagaggtgctcgtgcctttattattgtagtgggcacacagttgtattaacatgctagttttattgcataccttcaatgagcacaaataattataattgttgcatagacacaaataagttgtatacaatatgcactgtgatgggtctacttttctacttttgcctcgtattttgatctagactctctacttttgtatttatacaccatcctgatctcacaatatgaaaaggatgtgcgcaagtggattggattgtgacctgtctgatggataactgtttgtcttgcttagttttacataagttggactgggcactaaattcctttcatattgtttgcttaaaaatttttcagatttcagaggcctccaggagcaataccatcttcca

SEQ ID NO: 10809 - DNA, 2868 bp, Vitis vinifera
  Intron number 1 from transcript GSVIVT01021602001 (locus G SVIVG01021602001) derived from phytozome v7.0 (chr-ID chr1 0; pos 7879028 to 7881895)
ttgattttgtcaccccttcacaagggtgagttcacccactatggcattgaaactagattgattgtaaattcaattttgtattttaatatatgactagtatgaaaattatggaagttttcttttacacttttactattaccctttttaagattttttttttttttcaattcgatgtaaatgtaaaaaaaaactactataaggtgtttggtaaaacttaatacttattacttaataatttaaattgactttaagttaaattatactaagttattgacttgaaacttattacttaatttttactttaagtattaaagttatttaataaaattaacttaaaatttattataaatcattaaattgacatatttattatcataagctataactaaggtaaaggaggttgagtaacaatggaggtcatggagtagcaaaaatatcatggaggtaattaggacaaatacgaataaaaagataaaatgaaaatatggacttaacaataagttaattgtttttacttattacttaatactattttttatttttagtcatatcattaagatattttatcaaatatacttaatttacttaataacttgaattaatttattaagtcggttaaccaaacacctgcaatgttttctacttattactgcttattagtggttaactctctcatgaagcattaaatgagacattctctaaatatattcttagaaattcttcattcaaagccaatttgcataatgtcctttttcttaaacactcatgttctggtaattgttcttgatttgatcgccttcatatactaaaggtgaagggatttttaaatgtttccatggtgatgagatctaggaatattgtctttttcaactttctccaggtctttgaatatattttctatttgaagggcacatatgtgttttgtttgagtattcctaagcatggagatgagatctaggattgtttcctttagagtttatgaagtccctttgtcttcaacaaattggtttgtgtgagatttctaggaaatttctgctacagacaatgaaacacaagatagataatggacttctggtggttgtagctgcaaccaccattgcccatttcatcaagttgtggcagtggaatggcagagaaattgggttctgctggattcattatctgctccaaatagccaggaatttttattttgtcacatttcacaagggtgagttcccccactgtggcattgaaactagattgattgatatatggtttttctttttcattttcattttatttttgtattttttttgttagttatatagttcatttcataattttgtttcattcattgtgattttggactttacatgctttaattatgattttcattgtctatgaatacggttctccgcaaatcaacctggaatgatacaagtaattattgatgagttagacatagagtagacttatatgaaaatcgaaaatatgattaatttgggaatgaattttaattgaatatcatataatagggaaaaggaaactgattgtgaaaaagtaaaaaaaataaaactttatataggagtgctcaagcaccacaaatgctcaagctgtcctaaagacgttcaagtgctgttaagggctgcttaagtgcctagagcgcttgagcacccttgagaggcactcaagtgtttgaagcttagataataaaacattttttaagaaaattaccatttctaacttctatccatgtgtatatatatgtgtgtgccttatattatgtggttttttaagcatcttaagcattaggtcatcatcctttgcgtttaaccggacaatctcaaaagatctttggttcatgagtttgtggtaaaggattacatcctgctaaggtgtttgggaatccactaaggagcatagaggtattgcatcgtagatgtgagagtaggtataggtattaacagtgtcaattacgaagtctgtgtacctatttcttcaaacttagtggcgtatagctttacaatatctgatgatcctgtgttttttatatccacaaagtctctgggagactttgtaagttgttttccagtaaagcacttgtgtatttgtgcggttgaacttcttggattaattaataactaacaacttaataaaagaattcataaaaaaattaaaatgtgattttttgggctaaattaaaaaggactacctattcacacctatctaggtagttcaacggtacaggatctcaaactttcattttcctcatcagagattttagcatgatgaaacacaatgtgaaatgtgaaatcccttttggaaaactaagttgaaaactcttttaatgggcatactcagaagtactcttcttcaaactaggattaacaaaaaggaggatttgggatgggcagcccctattcgaatgtccccaatggaagcagaacccatcccaaccaacttttagcatggcaatgttagaaaattaataacatgatatggggccacgagggatgggaatgggacaaaagaaaagaaagagtgagatgacacaccacatgaaaactagaattcatccataagaaaacttagatcttatttaactccaaaaaagataagcaaataaaaattcaaaattcttggagtttttagttaagaaaatgataaggtatgaaaaaaaaaacacattaatacgttaagagtaagaaacaacaaggagtatattaaacgaagcagggtgttaaccaactaatcaattagttaaaaccataatggatcaagttatcatatgttactttcatgcaaaaaggttttacagagcacttttactaatgttgcctctattttgtttgtgtgcatgtttgcttcactctttgaggaaacaggaca

SEQ ID NO: 10810 - DNA, 14320 bp, Vitis vinifera
  Intron number 27 from transcript GSVIVT01032250001 (locus GSVIVG01032250001) derived from phytozome v7.0 (chr-ID chr 11; pos 13940784 to 13955103)
agaacttccgtgtcaaggttagtacttctgtaatcatagattatattaattgtggagcttgattttttcaaggttagatgtacacacatagatatgcatgcaactatataaataaagacacttatatttggtgtgtgtgtatgtgtgcctgcaagctgttgtttgttggaactgaccatatgcatcttgaataaataagttgaaatgtggagaaaaattatatttctcattcatatttcaaaagtatacaaccaaagaaatatatataaacagcagtagaaaagaaagaataaagaaagatccctacaaattagggattatatacacaaatatacacacagctatatatactgttgtataacttccacagcatatattacggctatttatatcctctaccgctgtaataattttcaacaatcttcaacagttgtaataatcttcaacagtccccctcaagctggtgaataaatattatccattcccaggtttctaacgataaacaaaaatgcagtatcccttaatcatgtagttaactcatctgcaagttgacccttagttgacacaaatggagtacatattagtctgctatccaacttctattttataaaatgtttgtctacttccacatgcttggtgcagtcatgttgcacagaattagaataatgtgcaatatcaattgttaacttgttatcacaatacaacttcataggtcctttccatataatcttcaaatcttctaaaattatattcaacaatagaagctcacaaattcctaatgttatagctctaaacttagcttctacacttgaccttgcaactacattctgcttcttgcttttccaagttataaggtaatcccgaggaatgtacaatagccagaagttgatattctatcatcaactgatccaacatagtctatattcgtgcatgcttccaatgtcaattcattatctcttctaaacaacactccctttcctagagtaccttttaaatattgtacaatcaatgtgtttctcgaagatgtacttcttttaggttgtgcataaattgattcaccactcctacaacataggctattgtggtttttttaggaaaagattccagatttttcattgattataaaattggtatacaaggctaaatatatacacagtattgctaagaataaaaaaggaaaataaagactaccagctaggctatgaagactaacatatctctacagttgatacagctaatttcctataatatcctaactaataaattacagaaatcagattagccaactaatatacaattataaccaaaaactctaatttaggaaaaatgattcttgaccgattctttacactccccctcaagttggacggtagatatctttcattcccatcttgcttgtgaactccttgaattgatgtccagtaagcccttttgttaatatatctgctacctgattacttgaagaaacatgagaccagtttataagcccaacttctatcttctctttgatgaagtgtcgatcaatctccacatgcttgattctatcatgatgaactgtgttatgtgcaatactaatggcagctttattgtcacagtagagcttcattggtatcatcaagggcattctcaattcactcatcaatgacttcatccaactaagctcacaaattcaaagagccaatgctctaaatttagtttctgcactagacctcctaacaactacttgcttcttacttctccacgttattagattccctcataggaatgtacaataacttgaggtagaccttctatcatctacagaacttacccaatcagcatcagtaaaagcttccacatctaaacttgtctcgtttagagaataatagttctcttccaagagaccctttgagatacctcaggattctaaatactgcttgtagatgatcttctttgagattgtgcataaaatggcttactaaactgatagaaaaggcaatgtttggacgagtgtgtgagaggtaaattaacttccccactagtctttgactatcaacctccttaccacctgaatgagtactcatcttgatgtttacatctattggggtgtcaataggtttgcatcctaacaagcctatctcttgaagaggacttagaacatacttccttggagacaagacaattcccttcttgaccgagctaccacaatacccaacaaatatcgcaagtttcctaagtctttgatttcaaatgactatgccaaagctttcttcaatctcagcatctctccttcatcacttcctatgaggataatgtcatcaacttaaactatcaaaatagttattttaccattacaagaatgcttgtaaaacattgtgtggtcggtctacccttaagtatattccatgctcttcaccaattgagtaaacttttcgaaccaagcccttggtgactgcttcaagccatgcaaagatttctttagcctacacacttttcctctacctaattgatcttcaaaacttgacgacaactccatgaacacctcttcttccaaatcactatgtaagaaggcattttttacatcaagttgttgtagagcccaatccctctttgctacaatagacagtaagactctcactgtatttatctttgctactagggcgaaggtctctggtaatcaataccaaatgtctgggtgtaagctttagccactagtcttgctttatgtctttctatgcttccatctgctttgaacttgactttgaacgcccacttgcaccctactagtttctttcctgctaggagatcaataacttctcaagtatgatttttaaagaaagctttcatcccttcattaattgcttctcgctattctggaacttgtagtgcttcatgaacatcatgaggaatactaacacaagacaaattagtggtaaatgctctaaatggctcatttagagcaccataggaaacaaattgagcaacaggatgttatgtgcagaatcaactagattttctaagagcaataggtaaatcaagatcatcaaacaagggtttaggagttggatttacttgagtgttcgactctatttccaaagttgaaaattaaccctctacagaaggcaatggatttcttccgcttctcctagaatatgcaatccactcctccttctcaattttttcttctggctctctttctttatttttttcttcttcattttctgggtctcttccttcatttttctccttctttattttctggctatcttccttcatttttttcttcaactgaaatattttcaagaatttctcctatttcttcccctaactcctttctttgggatacttccaaaaaattctcttctcctctaatctccccctgaagagaattctggttctgtaaggctagttctcaaagaaagatacatccatagacataaaatactttgatgattgtggatgatattgggtaatacccaaggaaaatgcatttttgtgccctaggatcaaacttgctatgattgtggccatgatatggacaaaagttgtgcaaccaaaaaccttaggagttaggaatgaaaacaaatgatgagaggcaaggaaacattgttttagggtaattatgggagtttcatattttaggatacgggttggcattctattgatcaaataggatgttgtcaaacaacttctccccagaacaccttgggaacattcatttagaacatcatggcaggagcaacttcaagaaggtgacgatgttttctttctgacactccattttgctttgaagtgccaatacatgatcatgatgaatgatgaatgatgaatgattccttctttttgtagatactctcctagaatatttgagtaatactctctcccattatctgtgcgaaggatcttaatgttggtttcaatttgatttaagatcatcttgtgaaattgtttaaacacaccagcagcttccaacttttctttcaataaatacatccaacatactctagtgtgatcatcaatgaatgttataaaccaatgaactctagtattagttttaacacgagagggtccccaaatatcactatgaattaatatgaaaggacaagatttttcataaattcgaacgggaaacgaagccctatgctgtttggcatactcacaattctcatatttaaattgagaaatatctttattcttgaatagactaggaaacaacagttttagataagagaaactagggtgccctagtctacgctataaccagatttctttattctctcctatactactttcagcttgataaacctattttatttcatcaccttgcatatttcttctaagagaaatagtccatcaacctctgtaacactaccaatctacttccccgtacacaaatcctaaaaaatacaatggtttgggtgaaaattagcaatgtagttcaagtctttggtaagtttgctaacggaaacaagattgcaagacaagttaggcacatgtaatacaaatttgagactcagattcttaaaattttgaacaatgccaattccttttactttagttaaggaaccatcagcaatttttaccgtttgagtcccattacaaggagtagaagaacaaaacaaacttgatttccttgtcatatgatcggttgctcttgaatctacgatctaagagtcaaatttcaagtatttagtagaaagggttgtactaaaattacttgattgggccaaatttgcaaagggaatattttgggaatttttgaatataaacctatagaattgctcaagttgctccttggtaggatttgctcaagccagtccaatcatcgtcctcgtgctctggtcttgaaatttacaaagtgcaaaagaagaggtcaccataaagttcaaatccttcgtaagcttatgaattgaaactaaattggtagacaattttggcacatgtagaacattttttaaaacaaggttttgatttataactacatccccttgaccagcaactataaccattgttccattagcaatagcaagattctttttactagaacagggactataagagacaaacccatgagaagattggtttatatgatttgtagccccaaaatccactacccaaggtccttttgagatcgacacattaagtgcatagggttgagaattacctgaaaaagccaaggaacaagtacctacaccacttgtaggtttctttaatatccccagaaaatatcttagcttctcaatctcttctctatttaactcacatcactcctgagagaattcttctcctcctcttgattctaccaaggtcaaatgtgtttgtcctttctctctcctccttgattactctttgtcatccaagaagtattttgagtatttgaggacttactatggagtttccagcacctctccttgttgtgtcgcggctttttacagtaggcacaccttaaagagtctttattacttgcttttgatccttctaatagcccattatttccttctactccaccagaataggcattcaactgtttttggtttgatttctcagttctacgatttacatattttgtaatcaaggttaaaccatatgtcaattgaggctacatcataactccttttcatctttcttctccacgacttatggcaattgtttcattaagtgaagaaacttcttcctttcataacacttgcactcaaacaaaatcaaactcaacgttcaatccagcaagaaaagtataaatcctctctttttccataatatgtttaagaagggttgcatcatcattgcacttcatctcaatacattgataatggtccaactcttgtcgtaagttgtataaaatctaagcatattcaatgattaagtggttaccttgtttggtaagtaaatgagatctttatcttaatctcatggatttgtgaggcatcatcaaattccataaccaggacatcaccatagggtctttttcatcccacataatgaactccgaatcatctagtttcgatcccatcccaagaaaatgaatcaatttacccttccctttcaagggggttcgaacaaattaagaccacttcaaataattttagtcattgagacgaaaaccttgttgaatattctacaactctcttgttgtagtgttgatgacttcatttgttgttggattagaaacttgttgattggtagattccgaaacctctgacaagggttttttttttaaaaacaaaagtggaagaaataaaataagagactaaggaaggattgtaacaatgcaggccataataagaaaatgctttgttttcatattaaaaaatagaacagaagttctaacaaaaaaaccaaatttctttaggtttttaaagaaaaaaaccaagcaatgaatgttggaaaatcaacaatgaaggctgaaaaaaatagaaaacccaatgagcctaatttggctctgatacaatatgaagaaaaattgaatttgtcattcatatttcaaaagtatacaaccaaagaaatatatatatatgtacaacaacagaaaagaaagaataaggaaagatccctacaaatcaaggattatatacataaatatatacacaactatatatacagttgtatgcacaattgtataacttccaaagttgtatattacagctatatatatcctctacaattgtatattacagccgtaataatcttccacatgaaattgtaacccttttcatctagtttacactagaactctcaactagaattaggaagggttttttggtttgtgattacgggatttttggcaagaaatagagaacaaatggaggtgtttgggggggtttggtgcacttttttgcttcctttgggtttctgccaccaagtctttgagggcattcatttgaactttttgttgctagattgggaccttactttaagttccaacctgatagttggggagataattcttatgtggaagctgcctcctgtggattccataaagttacattttgatatttgctcattcagtgatttaggatgactaggtttagaggagtggttagagataagagctttttccaaacctattgaagaattcctgtctctcaagacagagatactagctcttttagagggtactcgttgtccaaggctttgaatctctcccatctttaggctgagggaaattaggtgttgaagattattacagttgtcgaatattattacagttgtaatatgtagttgtaaaagataaaaagttgtaatatacagttgtataagttgtacagctgtgtgtacagttgtatatacatgtagcttggtgtatatttttgtatataattcctactttgtagggattcatccttattcttttttttcttcttttttctttcctttccgctgttgtatatatatttcattggttgtatattttcaatatatgaaaagatatacaaattttctccacatggtatcaaagccaaatcaaactccttagggttttctaattttttcagccttcatcgctgattttctagcctccattgctggttttttcaaaaacttggagaagtttggttttttggcaaaacttttactctacttccttgttgtggcctgcattgctgcaatccttccttaacttttatttaatttcttccacttctgcccaaaaaacatgtctgaggtttcagaatctaccaatcagcaagtctctaatccaacatcaacaaatgatgtcatcaacacttcaataggagagttatagaatattcaacaaggtttacgtctcaacagaaaaaattatttgaaatggtctcaattggttcaaaccttattgaaagggaagggcaaattgagtcctcttcttgggatgggaccaaaaccagatgattcaaagtttgccacgtgggatgaagaagattccatggtaatgtcctggttatggaattcgatgatgccagaagtcaatgatatgtgcatgttttttacaacaacaaaggaaatttgggaatcctagaggcagacctattccaaagttcaagatgttgcacaaatctatagattaagacaaggatttcatctatcaaacaaggtaatctctcggtcactgaatatgcttagattttacaaaacttatggcaaaagttggaccattatcagtgaattgagatgaagtgcagcaatgatgcagcccttcttaagcgtttaatgataaaagagaggatttacacctttcttgttggattgaatattgagttcaatcctatttgagtgcaagtattaggaaaggaagaagttccttcactaaatgaaacaattaccataattcatggagaagaaggatgaagaggggttatgatggagcctcaatcgacagatcattcagccttgattacaaaagatgcaaatcccaaagctgtaaaatcaaatcagcagcagtcaaatacctattccaatggagtgggaggaaataatgggctatcagaatgatcaagagcaagtaataaaaactctctatggtgtacctattgaaggaagccacaacacaccaaagaaaggtgctggaaactccatggtaagccctcaaatactcaaaatacttcttagacagcaaagaacaatcaaggagggcaaggacaggcacattcgacctcagcactatcaagaggcgagggagaattctctcaagaacgacccgagttcaatagagaagagattgagaagctgagatattttctagggacattagagaaacctacaggtggtacttgttcgttgactttttcaggtaattctcagccctatgcacttaatctatcgttctcaaaatgagcatgggtagtggattccgaggatacggatcatatgacccaatcttccaatgggtttgtctcttgtagtccttgtcctattaataagaaaattgctattgttgatggaacgttggttatagttgctggtcgaggggacatagttataagtcagaaccttattttaaaaaatggtctacatgtgtcgaaattatctaccaatctagtttcaattcacaagcttacaaagaatttgaactgtatggtgactttttcttctactctatgtaaatttcaagaccagagcacgaggacgatgattggacttgctagggaatgtgctttattttcttgaggaacctgatgggcgaaataacactaagggtcctattttgttgtctctgctttctaagtcttccctttaaaataaaaatagaatatggttatatcacttttgtcttggtcatcctttctttaggattcttaaagtaatgtttcttggtttgtttaaaggatttgatttgggtcaatttcattgtgatgtttgtgaacttgcaaaacataagcatgtttcttttccaataagtaatacaagagcttcaatgccttttactcttattcatagtgatgtttagggaccttctacagttcataatatctttggggctcattggtttgtctcatttattgacaattgtactcgagtgtcatgggtttttctcctcaaacaaaaatcaaacgtcaatttcacctttcaaaattttttccatatggtgaaaaatcaatttggggttgagataaaaaaatccggtctaacaatgctagggattattttaatcaagtgttgtcaccattcttcaaagaaaaaggaatcatttatgagtctttatgcactaatacaccacaacaaaatggtgtggcaaaacggaaatggatggcgatggagaagatggaagattttgattttgtgaggaagggaaggatgaaagatcaagcaaaaacaaatctttatccttatcttccatgaatgatgtctccccttgaagataaggattgggaaagtaattttcagtttcaacgaatgtttgccactagcttacaccctagtttacctgttttagttaataaatccaacacatacttttgttgggatataaagatcccatgttgaaagtgagccacttcaatgccaaggaagtattttaacatgtcaaattctttaatctcaaattcttatgataaacaccttttcaatgcctccattccttgcaaatcatctcttgttaccactatgtcatccacataaactaataaagctgtaactcaccctgaagtggaatgtttgacaaacaatgtgtaatcatcttgactttgtttgtaacccaaagctttcattactctagcaaacctaccaaaccaagtcctgggagactgttttaagccataaagtgtttttttcaacctgcacaccttattcttttctgactcaaatcctagaggaacctccatatagatttcttcatcaagatcaccatgtaaaaaaggcattctttacatcaaactactgcaaactccatccataattagttgctaaagataatagaattcttacaacattcattttttcaacaagagcaaatgtttcaagataatctatcccataagtttgagtataccccttaaccgctaatcttgcctcataatgttcaagtgatccatctactttatgtgtcatagtgaagacccatttacatcccactaacttctttcccagaggtagttccaccaagtcccatgttttgtttttctcaagtgcatccatctctacctccatggcttctttccactctttaattttcaatgaatggatatgtagtttttttagtacacttcctaacactctttctaattgctataggaagatcataatcatcaataataggcacattactttcataatcttataagtagaagttacctcaatattatcaataccagagattggttctaaaatatgaacttgcattggttgaacagtgggttcctttttccttgaatatacctgcaataggcgagaagcactttgaatctgtttatcctttgtcgccgaaactaggagtacttggatctaactcatttggtaaaagaatggaaatggatagcgatggaaaagacggaggattttgattttgcgaggatgggaatgatgaaagatcaagcaaaaacaaatctctatccttatcttccatgaatgatgtctccacctgaagataaggattaggaaagtaattttcagtttcactgaatgttacatctatagacacaaagaaccgttttgttggaggatgattacacttataccatttctgtgtagaagaatattccacaaaaacgcacttaggagctcttagatcaagtttcccacaattatttgaatgaatatgaacaaaggatatacacccaaagaccttagggaccaagtgatttgttgttttgaagtcaggaaaaaatttcaagaacagttgcatggggctattataatcaagcacttgagtaggcagtctattaatcaaatgtgtagcggttaagacaacttccccccaataatttttgagaatatttttttggaaaagaaaggctcgggtaacagctaaaagatgaccattttccgttttgtatattatagttgtatattacaattgagtatatcttttacagctacatattatagttgtaataatattcgacagttgtaataatcttcaacattaggctattgcaattttatacatagctcgtaggaaaaaagcctatgagattattatagatgacttttgcaaattactaatattgctcaaagcttgacatgctcttccttagttccactttatgccaaccatgacataaatcttgtagaaaaacttctctttgaattgtttcttctcaaatttgtaggttgcttgtaggcatttatatttttcactatctctcagttgcttggcttatttcatttttctcttgaggtagtttggactttttgttttcattttttatcatatgtgcgtattttgggtaggtatctcatcttggattatgcttactaattaatttcaatggattgcttgccttgtaccaaataaatgcacatagactctcataacatgttataacctatacacaaacatagactaatatctggcatcccttattttagctcctcacttgattaagttctctcttgttttccttgaacacattatgacctagaaggatgctaccttagtaggtgtcacacccttgaagtttgcactaaatttttcacgagtgcgtagtgctaaggacccttccttagccaaccttccttcccagcgtttagaaaaacaaagtaaaagcacagtaagaacaaagcaacggggacacacacgaggttacgggaaccctttcccaacttgtattatttcactctacaagacaaaattgtttcttgaaccagagtacaatactcacacccaagcatacgagaagggaccctttccccaaactctctccctctgtttcaaggctgcaggagcccttttaaaagactcaagctgcagttacaaatttgaattcccaaattcaaatgttggagccaacttggtggttatgcaactggccagaaccgcccataactaccttgcataaccacccaccacccagatagtggcctacacatgtcagccacttgcaccagctatcatccctcagccaactgcaggtcaaatgacggcttgacttggtcacttgctgtctgagctagctgccactagctagctgcactgccatctcctcaagccttgcttgccaagctgctggagagtccccctaacaagctacctccttccccgcaaggtgcctcttgtgaccgggtgcccattagcatgtctttgatcaaggccctctgagccaggcagcatgcaccaaccatctgaccaagcggttagtgcatcagtgtgccttcctcacactaatgtgtgaacccgtgccatgtctaggtgcccatggcttgggcttgctgcttgcttcccctatccggtccagcttcataacaacgagccatggcattgcgcccatggctgaaccctcttggtgcacagggcattgcgctcctatgctgtgcataggcatcatggtgcgagtcagctattgtttggagccatcagaccatggcattgtgcccatggtttcatcagctggctcaccgcacaaggcttaggcgccctcgtgcctgcacagggagggggtaggccgcaccaggccccgtgccgttgcggccactgggtgcacaccacacatgtcgtagagcccatgtgtgcgtgtgctcgagtcatgtccatatgtcctaggcatgcccaaggtcgtgccatggtgcccccttggtacggtcaaggctacccttggtggctccttcctttgagtcacctaccccccgcccccttaaagagtaatacgggcggttttcattgtttctggaggagacatcaatatgcctgaggagacataatggaataataaataattataaattaaaatttcaaaagtccctcagccttcatctgcaccacctaagtcaggtgcggcacgatgcccatctggtgcgcacgcggtgcatgtctggctcacccgcagtacacgcgcggtgcgagtttggccctctcgcgatgcgtgtctagctcgcccacggcctcctcacatagcccctagagtttgaaccaccaaacctccaggatttccttgctttcagcctagtgtcacaggatgcttcaaatgaccctccccatgggcttatataggatgagggaagcttctggagactcctgaagccatctacactaagacattggtgggaagagtgtggaaggttctagagatgtctagagatgtccacacatctctacactatggtggaaggcatgagaggagtccaaggctttctagagaattctagagatctcttgtatattcttgtacatagggttgtacatagattagtgtagggagttctagaatattcttgatttgtaaggaaccctccaaggttccaaagagttccattggtgcctataaataggtaaggccctcatttggccaaggcaccacccaaatcacttcctaaccaagcaagtgagtttccaagcacttgtaaaggctttcttgagttaataagagcttccattctttaaagagtcgcctactaagcttcttaagcttttgagtcgcgagtgtcttagcctagcaagctaagcattggggagcaaggctgacttagcaagatcaagcgtcttgacttgcctaagtgccgcacgagcttagtgaacgactaagtccgtgacactaggctctcatgggtgcaaggcctacccatgaggcctattcctccatggttaagtcaagaggctaaggggctgacagtaggcttctactccttgtgcattttataaatgacgattatttccatttgtgttatgtgttgtgtaggctttcaaagcattgttaagtgctactacttcaaa

SEQ ID NO: 10811 - DNA, 3897 bp, Vitis vinifera
  Intron number 2 from transcript GSVIVT01008792001 (locus G SVIVG01008792001) derived from phytozome v7.0 (chr-ID chr1 8; pos 2123854 to 2127750)
cttccgacggcccatccacccaacaactcgccgaggtactcgctgatatttttctcttttcctgttcattctaataattgcttcagttacctgtttttttttccttcagttttctcgggaaccaaacaggattcatcattcggttttgtatgcacggtgattcttttaggatagcggagaaaattgggtttttcaattagggtttgttcatgattttcttgcaattcaattttttttttttttttttttttgttttgattactcactcgtaatgtagtagtttagcctacatgccttgtgccactaggcttacatagtgaaacgtaaattgttttccatttgaattttcatttggtaaagttattcaaggaaaaccaaagcagaatccaactatcttagctcaagcaatcctctatacgtttgccaaagttgaacctttagagagatattttctcaccataatagaaaggtgaggttacccttctatcgttctccatgaggacccaatcccttaagttaattgcctctttagaatgcgctccagtcaatttaaatcccagaaccatcttcttccagctgtccattaaccatttcatttctcacaaccatttgcctgaatgttcaatcctccagattataaaatgtttgagcttatcccgtgtttctcccctaaaatgaaatcacatgcaagatgacctcattcaacatttcctcaatgatcaaaataatgagaaattcacaacttaggtcacatgcagccaatatttaggccaacactcctaacatcgaactactgtcaatttatcaaaacattagcaaatgaaataaaaaaagccaattcacatgaaaattatgaaattccagtctcccagcacaataagcttaaattgcatagtgactcagcccatgattaccatcaattcatcctgacatgtatatggattaattaacaagagacagagaggggaattgtgagaaattagagactattttaaagaggtgcacaaattgattatagaaaatctcctgcctatggcaatcaacaaaaatttactatgaaaataaaaggagtacgagtgcctatagcctaatcatctcaatccactcatggacctgcttccctagcacacttgtagtcacacatcaagcatgacctcaatccacttcttgaaccctgtcaaggagaagttggattttacaccaacaaaggggcaaaaatgagaatatggatgatccaatttgaaataataccaatttggaaagaaaattactcaaaacactcaattttagtagaaaaccatgaattttctctcacagacaacactgccaatttggtgaattttgaagcttgagaactgaaggctttgaattttgaagcttgtcaccctgcttaaatttggaaagaaattttatataaaggattcaaaggcaaatagatgcttaaaaatgcgcagaaagatgcgaatctttaggcatcatttgattgatcactgatcaaccaattaagcaatgactgctgattgattgacctatcaattgattcctcttggtttctacagatgactggtggtccaataggtgaattgatcctacaacgttggaaaccgtttcatttcatgattagcctatttttgagctttctaaacactagagctaccaagaacttttacaatataacaatgggggactgacatacctaggcacaatcttcaggaattgctactgatttttctttttcattgattttatttcctgtagattgtcaaattattagcactagaaactgaagctaacccaaacacataactgcagaattgaaacaccaatttttttaggtagcttatctcacatgcttgttttgttgcctactacctatccaaaaaaaaaaacccatgcttgttttgttgcctaccattttgcttcatgctgcataaaatattatttgcttcatgctttaatgttctgctatgttccattagttcatacagtacaagtgttatctaatgtttagttttaaagtataggtaatatttgatcttagtcagctgagtgaattttttatgatgaccatcatatgccagaattggttgatgaagatattattgtctaggatggcaatgacgcttttggagaaaccatcctcaataatgttgtaatttctggaaaaattgaaaatgaagaagatgataatgcatttattaatgatgatgatgttatgtgacttatatgaacaagaaggagatgcagttcgttcatcttctacacactttgttttttattttgacttgtatctattgcatggcagtattgacagctagccttgatgaattgagatatccaatatccaattcagagttatcatagccatccattcagatgcattatctttgtatggatgtcagaatttgcaataagagctagccagtatcacattgactttgagcatatggattttcaattgggcaattttagacatattctttgcaattattgacaaaacataaaaaaatttcttttaggagaatgtttgaacatactctgcttcataactatgctggcacctgcaatgtttatagaatactcagatcacatcatgtacaaagtagatgtacccgaagttcaagtcagtttcttagttgccataatagaaacagccataactgtaaaaatctctcctatattttccatgtcagttccttgagccaacatgaaaagatagaccaaagcacatggtttcccttttactagcagatatgtacttggtagttggtatctcctttttttttttttctttttggtttgctagcatcacttgatccttgtttagatagaacatgatcattggatgtgcttcagcccacggcttcatattaccttaacccagaatcttacattgcctcatcccacagatgcatgttctgccagtagccttgatgcaccaacatgtctgtgccaacatttaagtgactagagtcatgccaacctcctgacttctgtgcctttttcatggcattgtgcccccagttgtctgagtcattgcccagggttgcaaaggcttaccaagcctcgtgttgtgtgtgtggagggtaatcatggtatgcaccaacaaatcattgccttatcagcccatacttgatgtaacattgtgccatgacatgcagttctaacgcacaaaatatggcttagtacccaacccagctgagagccttacctgtacttttaggtcttaggaaactagcctaggcaactcccaaaaatgctatccgaacatcacccccttaaaagtatcttaagtcattttagctttggcagcaggagacctaggatatgcttgaagaggaaaaatggattttctaaaattccaataaatagggaaattaatagtcaagtagcctttagctgcaaaatctcccttaaaagtatgagctccaaaggaaaattatcaaacatttgataatccggacagtaaaattttaccaaacgtcctagtgtgtaggtaccacatgctgtatacgttgcctgcttccagcctacagccacactcaccaaatgttaacttggaatgctccccgtgcatcctttagacctcttaacacttaagaattgcattagccacgcttgggtcaccttgtcttcaccaagtagccctcatgccataggccatgtacccttctgttgaaagctagtgaagttcataaatcatgaatcataatgaggtttttcaagttacaaatgatatgtgttcgttcacctgtaaattaagcagtttattacaagtatatgtcttcatttgcatcacttctatattttttctttctctcttgttttttttttctttttctttttctttttgcaatatttaattatcatgtttttggtcacagataggagtacctg

SEQ ID NO: 10812 - DNA, 2367 bp, Vitis vinifera
  Intron number 7 from transcript GSVIVT01003597001 (locus G SVIVG01003597001) derived from phytozome v7.0 (chr-ID chrU n; pos 11120540 to 11122906 reverse strand)
gacgggctttcacactcaaggtaatctctctctctctctctctctctcaaaatttcatttgagtgaaattctctaattttcccttattctaattgtgactttcgactcaacgttttcatgttatatgattttgtatatgatagctaaagagagcagtagacaggagattggaagtataaatgtggtgaaaactgatattcattgatgatgaattattgagattacatagggatgtttagacaattggtattatattctaggaaattacatatcttgtctaggcataattctatgatcacacatcaactcagaaggttcatcttgtgagtggcaccaaaatagaacatggtgtagctaataatttaaattgtctagtttcaatcacattagaataataattagagttttactaaattaacttctaaataaaggaacaaatcttaaagtgtaagtagtttaagacttattgatgatacaaaaaaaccgatcaacatcaagcctaatccaagacactcttggttgaaatttgaaatacttgaaatatggttaatggaagaaaacgacctcgaaatcccaatgggatataatacatgtatagatcaagtgtgtatttttgtagaagtaaaatatgaaaaaaaacatatgctttttaaatagagctataattgaacacgtaaaaggattcttctgcatagcttataatttctaaatgttatgtcatataagaaatcaaagcatgactagaagtactttcaaataaataattcaataagtagtttctacatacaaatatagaacttttggcgttttagagatgacacctatcatagtgggacttacaaagtgtaattagccttattcattcctctaattggtgagcaaaaccaaatctaatctaatgatatatcatgaagcaatcaatagctacccatttcattgggatgtagacataaatcatcattgcccccacataaaccaaattcaatcaacttcaagtttttagaaaagttggtagtttaacaaggtcatttggcaggagtgataggactttcaaagccttggaaaatttaggtcaattgcttaaggaggctctcatttgtttttgctttggtcttgaaagtctttaggcggttataattgttccttgctagatttcattaactggatggagtccttttagaaggatgtttgtttggtctcttcttttgtcttttgtctctctttgtatacttttggtggaattggattgcacctaccctctcttttttaggcaatttttcaataaaatcttttctgctctatcaaaaaaagtgttccatttcattttgtgcctaaatttgtttgatgattatggaaccaactttgaagacaacctagtttaatagagtgagcttgaagacatcccagcttgactttaagagcttgaagacatcctcgtttgactcattgtgcttgaagctaccctatctttaatgataatcttgaagattccaatactcacctaatctcaggttgccctactcatttacagccttaaaagaacaattattgacttaatttgtgttttatttctagcttgatccttgctggtcttgctgctcttccactttagtatccccaactcattgttgatgaattattggcatgtgaataatgcattgggatagtctctaactataaatttcaaatgtgacaccaaatgtcattctatttgattagtcccaaaaaacaccattattctagcatgtcaattttattttagtttattattattaattttgtgtctttatatcctcatatcaaactaaaggattttgtccaaaaatttataccatttataggttggtgttgggccctaaatattaggaaataaggatttaaggtgaatagaaagaatactagggtcatcccattaaatcaatctgaagtttgatcaccacactgtgttcctaaaaagggaagtatttcccaccatatctaatgtgggaaagctatatatgtgtgcacatatactaaaaaatcatgaagtttaagcaaatataatgtgtgttatttttatgatttttgtaattaggagtttcctagcaaacatctcacatgtcaaggccatggatatgtggttgccacatcagaaaaaacctcaaggaaaagtaagaataggaatggtctttggggaaaaataagatgtattctggtaagagaaaaaaaagaagatgcatgtcctgtcaaaaaagtgtagggatttttctctttagctgagctataataataattctcatctgatgattgaagcagtggtcgcttaagctgtcattaattattatgtttttcttttgagatgacaggctgaaactttagaagacctta

SEQ ID NO: 10813 - DNA, 1872 bp, Vitis vinifera
  Intron number 3 from transcript GSVIVT01015184001 (locus G SVIVG01015184001) derived from phytozome v7.0 (chr-ID chr1 1; pos 1630292 to 1632163 reverse strand)
aggttgtacaataatatcctactctaatttcatttttgttttatgtttggatggaagtttcaattgcttagatgtttcaaatttgctggtccatgcagcaatggtgcattcatttgtttatatcgagatttacttatagacttttatcttcattggttgccttttgattacagttgtctgtgttaattgtagttggtctgcccatactgaaattttttattttgatttccattgatcaagtggcactagttggcaggtcaatgtcgtagtgttataatatgatgaagtgcacttgttgaatttcattgtgctagaatcctgagtttttttcagtccttgactgttgttccatccccatatcatagttttgtgagataactcatcagccttcacattccctggtttttcttcagtcatgttcttttcccttttcagaaataaatgtcctcaactcctgcctcattgttagcatgcaaacagaaacaatttggcctgtgtgctcgatcctttgtaaaggctgcatctttgatgggacaacataaggtttattaggaaggtgccttcactaatatccacatagaaactggtgtttatctttaattttcatttttggaatatgatttagaatatttacataacaatccaaagctacaagggacatgcagcatataccaattcacaaagggtggataagactatgagactgtaacagagttccaaactctgttgaaattcaacaaagagatcactaaagcactaggatataagaacaacaaaaaggggtgaagagaaaactgccccacatgatgcaaccgttacactccatgaccttacagctcagcaagaaatgatttcatagaagagtatagaatggttgaaaagatgccaaaagtagacgacatatggtgggcatccatgtgtgagtatggaattgcacatgcaattattttttttgataggtggaattacacatgcaattatgcgtgatactgaaagataaaatcacaataattaactgtgaacttggaaagaagagagctacatgaatcccgaagttattttaactgaaaaaagaaataatttgatccaattaagggagcagtcaagctaaatttggaattaaggtgtggttgagttgagcttagttgatgttgggatggcaattgtctattagatgcattgggtcatattaattttttttttcttctatttcttgctaaagaaacagcaatcaaacataggttctggtagttcacatggttattagtgttcaatttttatttttattttttcttacaaaagttaatagtttcattttatatgcccaattcttaagtgtccaaattgatatcctttcttgttaccatagtttcatgtgatgcttcaaattctttgcaagtgaccatttgattccttttttgttttcatatctcttctaaatccaatattttcatgttcttttccactaaaattgctctgttgtcctcgacattccctgtgtttgtccactttgtccttcctgagaaatatggacttcgctcatattctgtctttatcaatgagagttagagggatgcttagaagatttaaaattggtcatagaacccttacatgccttggcatgtgagcatctccgttgatatctttagttcaaaatagatttgcaacatttgtatttcagaccataggtatactacttggctgttgacacctttcctgccaaacatatcttttaatggagttcttgggagaaataatgttatttttctttgatatttaataattctctttcctttgattttaattccttacaaagctaattgttgctatatttccgttttgtttcacagggtgatcactgtagattttcac

SEQ ID NO: 10814 - DNA, 9092 bp, Vitis vinifera
  Intron number 2 from transcript GSVIVT01027512001 (locus G SVIVG01027512001) derived from phytozome v7.0 (chr-ID chr1 5; pos 16070805 to 16079896)
tgaaagaagaatctgcaaacgtaagtgaccgaggccttctcaatgggcaaatttcatccagtccaaaatcgaagcaatctttctagcaatttcacctagtcctttaccttttgcaggacttggcgagaatattttgaaggctttgtagccaaaagtttttctaattacattgatcctgcatataattatatttctgattacttgagaaattgttgtttccggacagatggtgttcgagtattttgctaagaaattgtttggctgcgaggaagctaaggcatatagaagaaacttaagagagagctacaaagcttttcttgatggcattatatcatttcccctaaacattccaggaactgcattccacgcatgtttaaaggtaggtaatcaactatcataaaattacaatacctagaggccaatagaccccaacaggtgcaaaagggctaaatggtctttataactttaaaacgcatttacaaagttaaaaggagtatatatcacaattacctcaatgctaacacaacgtacttgttttgtcttataggattgatggttaaaatagacaaacactacatggtatcaaagttgatccccaacactaacatgacattgtaatgaatgtttgtctatttagttcatgtaatgaatgtttgtctatttagtttaacaattctgtgaaatacaacgaagacataaaaaagtttttaatattatatatgtataaattctttttaatcatgtaaattcattttaaacccgtgatagcatactaaacccataatgaataatgtttacatggttagtagcaagttgctacaacaaatttatacttttctatattatactaaatcttgttcttcctatttgaattaaggatgtgaaaatgcggtaaaagtgattaatgaaagaaaaccatcaaagaagccctgccatgatttcttagattttttactagaggaagcaaagaatgaagatacaattctaaatgaagcaattatcgtagacctctttgtgcttctctttgctagttacgagactacttctgaagtcattacattagccatgaaatttctcagtgatcatccctcaattgttgtagaattaatggtttgtcatccatcatttaaaccctaatttttttcttttcaatcttaaaaaggataatacatgacttggtaaattatataaccctttgtagaaagagcatgaacgaattctgaaaaatcgaggaaatgaggaattgggaatcacatggacagaatacaaatccatgacttctacacatatggtgagttgagttaactcttacattctctctctatttatagacacatatacttcttatgtttgttacattgatgaccttatcatttctctttatttttcaggttataaatgaaacccttaggttgggaaacattgtctcaggaatttttaaacaagtaacgaaagatatcgagatgaagggtaagttcaaaataacacttaggtgctacttagttgacattctcgagtaaatttcttacatcatacacaaagtcacaatttttaaaagataatagtagtaggttaaaacgtttattaagtataaaagaaccattgatataaatcaaaatatcaatggtttctcttcaataataaatttacttttagaaaatattaaaaatattctttgaaaaaaaatattttcattttcaattttccaattgaaaagtcaaagaatacaagctttttatttttaaataaaaaaaaacactttgtaaagtcataaaaatgaacgaaatttattgactttaattaattaatttttcatgattttcaattaagagaaaagtcgaaagagaaataacaaaacattttattgtttcaagtggaaaaaaaaattcttggaggggagataattcggaaggctggtttgatgttttcacatcaacttcacatccaaatctcagcaaaatacaaatgattaattcaaacatttcgtcttcaaagaaaaataagcataactccaaaaaattttcaaacatgcaaaaaatataggattcacaccttgatatgttcgattatgattttatttcatctcatcctacctaaaattatatgtaatattaaataaaaaatattttaattgattttttttatttttttcaaatttttaacaaatgtaaaatattatttttcgtaaaaataaattatggatatgtataatatttatttaattttaaattatatttttttagtagaatttaaaatttcaaaaaaaaatattgaaataataatagatataaatgcaataaagcatggacaggacccatcccatccatctttaattgcaaccacctttctttattttttagtgacaactcaatttgaatcgtcaaacaattccacgcgcgttttattgaataaatttctactatctctatcaaataaatcaccgaataaaaatcaaataaaatcacgcaattgccaaaacttgactttgacttattcctaaaatcacggaacccacatttaaaatgatttgttgcaaaattatttgtctccttgtggtggcttatacatcacgtaaccatgacagaaaagtccaaggcctgtacaccccaataacgaataaaacacatggcatccacaaaaatgcaagggccaaattattatcctaaacaataatttcataaatataaagaataattaaaaataaggtatcatatataaaaattatttttaaaatatatttaaaaactagtttcaaaatattttaaatttccaaataaacttttattttataaaacatcgtaattgttctcaaattatttttcaaaactatttttgaaagcacttcccgataaccttattcgttaatttaatctacaaaaatgtgttaaaactatacatttcattaaaaagtttaaaacttgaaaattaattgattctatggaagttttagcaaaaaacctcttgaagttctttagattctctttggaaatgtttttagaaggcacttttagcctaaaaagcattttttttaataaaaaaaaatcaatattttcacaaaatttagaaaatagttttaaaaagttaaaaacatatttttattattttctgaaaaaaaaataattgataaataattttttcaaaaaaacttttaaacaaggattaaaatacttggatatatggtaatatatctaatatctctggataccaatacaaaattcgggaaagtatatccatcaatcaattttttcggatattttattgatatttcattgatttttcaattttttattattaaataaataacttataattattttatttttatatttgatttaatttattacaaaaaaaatataaaaacataattttcttaataggtcttttttatataatctatattattgtaaaacaatctataatacaacttaataataaatatacatttataaaatttatattttttattgatgtagagggtatattattattaaatatggcaaattatatatatctatatttatatatatatagatatatttactttttatatagttttttagaatttttattaatttttatattaccatattttgtatcaaaatatcgattcataaaatcgaaatatcgatatatctgtaattatcgatattttcatccttacttttaaaaaaagtgtttccaataaaagcaaacattgctaaacacatttttaattatacaaagaaggtggctttgttctctttcttgtcaaaatcatagcctttcaagcaactgattagtgagtttatgggtgaggatgcggatgaatgttctttgaccataattcttttttttttttttttttttgtcatcaaaatatttgaatatttcgtctccaaagatggagtgtgacatatctagggatggttttcaatacgaagtttttttatctttaaaagatattttaccacaatattaatgtttttggagatgcaatagtttgtctttaatgctatactttctcatagattctaaaattaacatcttaaattctttctttatcatcattaatttatacacttattttaaaaattttcatcaaaaaaattcttttatcaccattcatttcatatggacttaacaccaacaaaaattatctccatccttcttaaaattaatgtcttaaattatcttttttattttcaatcaaatttaaccaaggatgaaaatattagttttaatggatatatcaataatccaattttatagatatattgagaaatattaataaatattttaacacaaattattagtgagacaaaaattgatcaaaattcatgaaaatgttgagaaaaattctaaaaattgatataagaagtactaatatacattttcaaattatatattatatttatataatataatttatcatattggataataatattgtatgcatcaataagaaatatgaattttataaatatatatttattattaagcttattttgataataatattgtgacattcgataataatatatccaacttgaaaatatatttaatattaaaattataatttatttaatttaaatatattcaataatataaaataaatgatgatatagatatgaaatcctaatttttagttttttatttttaacaactaattaaataaaacttaaaaataaaataattaaaactaatttattttattattatttttccatatattatatatatacttattaaaattatttaattaaaactaaatcctagaaacaaataatatataattatatttacattcctatcataggaccaaagtgcccacttggttaacacttggtcttagacgtttgattgaaattggtaggtgttgacccggtcaaagaaaatccaaagaagcaaacaaatggtcataggattgaccaactactctagtagtcagtcccccacaaacttggaagtatgttgacgtgtcaaagaaaatctaaattaataagattggtcaactattctagtggccccccatagactcaagtggtatcgtggaagccaatttgagtttgaaaaccattgcagtgaaatgaccccacaaactcaagttgcattgtggaagcaattttgagtatcattggagccaattgaacaaagcctttccaagatgatgttgtacaaagtgataatctcaatttatgattggtttcgaaaaatactaagaaaaaaaaaatgtaaagaaaaatgattttttgatatttgattgttcaataaaaaatatcaaagaaaatcaaatataattaaaattaattagaaacttatatatttttaaattatttaatctttatattgatgagttaaaataaataaaatgagtttaaagtaacaaaaaaataataatttatcaacttttaatcaagtttttattttccttaacttttttctttccttctacttttcttttgtattttttttctcttgtattttcttttaaattttatgggaaccaaacatagccaatatgtttcgtaaattcatgaaagacatcaatataggcaatttgaacaacacttcgaatctcacaacaaatcaaagaagtaatagcctataatagatctagtataaatgggatcactctcccaatttgagtctaagtaggcaagaagaccaagagagtaatttgctgagtaatggagcccatgaacaattgcacttttaatgtaaggcaatatgccgtatgatgaatagtctaagaagtagttgtaaattgactaatcaactggacaacatgtgtaatgtcaggattgttgaggcctcgcatccctggtgatccacgtagttgccaaatgggtggacgcacgatctcaaccaatatagattattgattcaatcgtactacctgcaaaaggcgtccggacagggtgtccggacgcaccctccgatggttttgttagccatggtcagagagagagataaatcagttggccttttactaggtatagcaagcttatcttcctctttgtatgaaggttaatatatatagttttaggagctttatttccctctttaatggtagggagatattttgtgttgtcatgatgacactaggtggtggcagggccatcattaccctacgggcggctgacagagatcgtgggaagcgatcataggaagtgacttgccgtcactttattcttgtcctttcatcctgcaggtggcggaacgtgggccatgacaggctgttgtgataacgtatgagacttgcttacttcagtcaatgatccggacaaacatacccggatagtgtatgtcggtcgtccggatgcgctgtggcagtcgtccggatgttatgtttgtgagtgtcgtgtgcctctccttgagggactccgcataggagaagcgcgccacatgtactcttggggaaatccggatgaagctgatccgaatgagaatgcgtgccacgtgtcatttaggagatgtgtgccacgtgtggggaggggtccctacaaggatgagtaacaataagacaatgtttccaactaactattgatgaagtgtgatatctttgagaggttcatcgtttatgtcatgtaattttgcattaagttcaatagaagtgtttgacattaagtcaagttcatcgtgttcagtttgaggaaaatattaaggaaataaaaaataataataaggaaaacggttttcccattgtttaattttactatgaaaatatgaaaaaataaaataaaatataattaaaattaattataatttttttcatcttcaaatcatctaacttttaacttttatattgaaaaggtaaaataaattaaataaatttaaaatagcataaaatataatgtattgattttaaatttattttttatttttttttactttttctttcttttagcttttcttcgatgttttcttcccttcaaatttattgggaatcaaagttaatcttttgaaaatattttatttttcattcaacttgtcatttcaaaaagtgagtttagtatttttcacattgaagattttatttttatattaaacttgtcttttgaagaaaagaatccagaatattaattgttgtttgtatcacatgcaaatttcttcctagtgattcttaatagggtgagctttttagtatctctctttaatagaatgagtatagaataaatgtaaataagtttgaaatggatttaataaatattttaaaatctaggatgggttttggataggttcgaatataactttgtcctatcttgcaattgattcataggagaatgtgggtgcttattatttgccttatcgctttagttgttatactgttaagccaatggctgcaaaagtggttgaaccccaagtgcaatggaagattgtctgtacaagtggtgccccttctcctttctttccaaactttccaaactcatagacttgtctagtcaacaaagctatgctagcttgtctatatatataagtgtcatttcacaatttttttttcaaatttatagacttttcaaaagataagtgacaattaagaaaccagaaacctagtcaacaaggctatactagcttgtctatataaatgtccccttctcctttctttccaaacttagacttttcaagaaataagtgacaagtaagcaacgttttcaaaatcgaactcattattgaagtagaaaaactttgtaactgtagcaactcactatgggagagaactatcgatggtgttggcgtccttgtcggccaccggcgtcaattccagtgtgatgtaggtggagagccgcaaggggcagcagctactggaggttgggggtggggatggttattgaaggttggggaggcaaaaggttagggttgttttgataaataaaaaataataatttaaaaaaaaaaaaaaagttgttgaactgtttggtttaggaggaatcgaccgattcaaccaattctgacggtttggtgtcatagcaattgattcataggagaatgtgggtgcttgtgatttgctttatcgctttagttgttatactgttaagccaatggctgcaaaagtggttgaaccccaagtgcaatggaagattgtccgtacaagtggctcccattctcctttctttccaaactttccaaactcatagacttgtctagtcaacaaagttatgctagctcgtctatgtaagtgtcccttcactttttttttctaaatttatagacttttcaagagataagtgacaattaagaaaccataaacctagtcaacaaggctatgctagcttgtctatataaatggtccccttctcctttttttccaaactcagacttttcaagagataagtgacaagtaaacaacgttttcaaaattaaactgatcattaaagtagaaaaattatcagtttatgattcactagtcagaattgaggtcaaatcagtgatgtcataaatatatattttatatatcattaaaattataaaaaaaaataacaataataaattctacctaaatttaaactcaaataatttttttttataaaaatgtagaattaaaataaataaaataaaaataaataacacaaaaatataaaatgtaaagattttaaacaaaatgcagaaaatagaaatcattcatttgatttaataaatattaaaaatatgcaacaatgcaataaaaaataaaatattaaatattaaaaataaaaattttaaatgcaggaaccaggaactttgtaactgcagcaactcactgtgggaaaggattatcgatggtgttggcgtccttgtcggcctccgggtcgattccggtgtgatataggcggaaagccgcaaggggcagcagctgttggaggttggggggtggggagtggttgctgaaggttgaaaaaataaaaaataattaaaaaaaaaaaaaggttgttgaaatgtttggtttaggaggaaccggcctccacagttcaaagcaccaaaccaaattggaatagtgatcggccggtcgcttttaaaatcatgaattaaaagaccataaacctagtcaacaagactatgctaacttgtctatataagtcccccttctcctttcttttcaaacttataacctttccaagcaattgattaattggaga

SEQ ID NO: 10815 - DNA, 8492 bp, Vitis vinifera
  Intron number 1 from transcript GSVIVT01032054001 (locus G SVIVG01032054001) derived from phytozome v7.0 (chr-ID chr1 3; pos 23174577 to 23183068)
aaggcccagatttgggacactgctgggcaggaaaggtttgtgcttcgatttcttgtttggtttagtaatggagaactgttgagtttttgatctgtgatggctgtttttcgtttgattgtgttgaattttgggctatttttggcggtgtgatatggtttatctacgcttgatgaggataagcgtgagtttcggataattccataattcatgatgttttctcctcttctggtcctcaggatctagattgggtaagttgtttgtagctcttctattgatttgtagctgatgggttgttttggtaactgggcactttaggaggttctagtccatccaacttgatttagactagttaattttgaatttaaaaattttgccaacagaaatacattgtaggatttgggtacacgatggatatcatactctctaccctccctcacttgtaggatttgggttcacgtgtagcctctttttttttttttttttttttttgttgggggctgacaggtgggcttgataaaggtatggtggttaggtttgaacacatgacctcccgccaaagatgcacggataccatattgaattatcaattttcctaaaaacttaagttcataggatttgggttcacaatgtatatatcactctccaacagtttcattgtcagttaccaatgtgactttttgtagaatttctgtacaattgaagggtatttttatggataagtgcatttgaaaatccagaggttgaaatttattgtttctgtgggcaaggctaaacaagtttaagtgccagtggcaaggcaagattgggtgggattacaggaatgcagacaggtagtaccgactgggaactgagtaaaaaatgagtttagattgtttagccatgtttgttagaaacaaattcaccagtatagggtaacaagatagtgtaggtgagtgaaaaagtatacaaggatgagggaagaccaaaggagatgtggattgaggtatccagagaataagcatgttcacttatagtttgatagaaagtatgaccctagatagagtagaatgacaaaagagtatccatgtggctgaccctaaatccttttgttaattctccttgtgaaattggtggatgcatattgtagaaacagttaccaacaatgtgtccttttcttgatttctttctaaataactcaacttaaaggactgcataattagctcataaagagttccttagctgaatgtttctttaccttttatcttgtataaaagacattgacagaagtaccatctgttctcagtaatatcatttacaaccatgggtattataaccttccaagttgatgaggaaccctttcgagttgaatggatacatttttaattttgaatggactttacactattcttttgcttgcagcagagactgttcatccatctagggatgacaacaagatggggttttggactggccaccctcatcttgactccgtcctgattatttgaacatatttccatccccatcccaaaatcaattaaaaggtagggcagggcatggccggtatgagaaattttcccatacccactccaccctgtttaatttttaaatttttttaaagaatttatcccatgggcctgctatctcggttggggaccatctgggccaaaggcagtctaataacatgggcataggatctgaagaggacttgggcctaaagatagaaatggagttcatcaagtgtcaggagaaggagacttgggataagcagatgccggctccccagtgctccatggctgaaagagagatcgtggatgaagccttcaggtacgggtcctattctaatctaagggttggggaatcctcttcttcttcttctcctctttttggtcggactccggtgagggagccttgcgaccattctggggttttaagggtgagccgccagagagaaaacatggtagaaggtgcagctacagggggggatatagcgaggagagagggttgttgggacttggttgcgattgactgtgaggccctaaaggttcaaaacccggattggactccagccatgtctgggccccaagttcaaaggagcgagaaggagtctgattgggaagaaagcagcttggccaagtttagcaagttgttgggattttcaatagaaggtttggagagggagattctggacttcttgtccaaaattaggaaaagacgagaaaggatacatagcaaagggttactggagaaaacaaaatttgagagggaactcaaaaggttggaatgctcagtcaaatacaaggggaaggaaaagaagaacagcctgttgaaaagcagagggggtcaattactgttgggttaatgaatctcaagctgatgagttggaatgtgaggggtgcaaatgacgttaataaaagaagaattattaagtttgtggttagaaaacaaaaggtggatttgatgtgtatccaggagacaaaaatccagtcaatgactgatggggtggtgaaaagtttaggggtggggagattcttagattggagaactcttgaagctgctagagcagctggaggggtgttggtttgttgggataaaaggtccttggaattgctggagtgggaggagggccaattctcagtttcttgtaaatttaggactgtggaaaatgggacagttcgggtttttacgggtgtatatggccccttcaacaaaaaggatagggagtgtctttgggatgagcttggagcagtcagaggcctttggggtgacccatggtgtgtagggggtgattttaatgttatcctcgctcaaggggagagaagcaggcaagggagggtgaccccagctatgaggaggtttgctcaggttatggatgacctggagcttattgacctcccccttcaagggggctctttcacgtggagtggggggctttataatcaagcctgggccaggctagatagatttttggtatttcccagatggcttgatcagttcagcaatgtgactcagaagagattatctcgacctatctcagatcattttccaatcacaatcgaggggggtggtaaaagaagaggcccttcacctttcaggtttgagaacatgtggctgagagtggaaggatttaaggaccttttgaggagttggtggcaggggatggtggtcagtggtagggctagctataagttggcaacaaagctgaaggggatgaagcaaaacttaaaaatctggaacagggaggtgtttgggaacttggagagtaataaattggctgccttacagcaagtggattattgggaccaagtggaaagtgagaggaggctgtctgaggaggaattttccagtaagaaagaagcgaaagaaggctatgctaaatgggtcaagatggatgagatccactggcgacaactatcaagggagttgtggctaagagaaggggataaaaatacggggtattttcatcgaatggcaaatgcgcaccgaagaaggcatacaatggaaagagtaaaaatcagtggggtctggctgtcagaggagcgtacagtgaggaccggaattgttgacgcctttcatcggttattaacggaagactcggagtggaaggcagacatagggggtgtcaatttgaatcggattagccagcaagaggcgaacatcttggagctgccattcatggaagaggaggtccattcggctctaagggacatgaatggggacaaggctccaggtctggacggctttacgggagctttttggcaattctgttgggagtttgtgaaggaggaggttatggagatgttcaaggaattccatgagcataatactttcctcaagagtctcaatgccacgtttttggttctgatccccaagaaaggaggagcggaggagctgggggacttcaggccgatcagtctgttgggaggattatacaaactcttggctaaggtgctggccaataggattaaaaacgtgattggtggagtgatttcctcagaccagaacgcgtttgtctcgggtaggcagattttggatgcgtctctaatcgcaaatgaggtgattgactcatggaaaaaagagggaaagaagggcctgatctgtaagctagatattgaaaaggcgtacgacagcgtcaattggcaatttttgatgagggtaatggagaaaatgggctttgggactaagtggagggagtggatatggagctgcatatcgactgccaagttctcagttttagtaaatggggagccagccgggtttttccctagctctaaggggctttggcaaggcgaccctctatccccatatttgtttatcatgggaatggaggtgccgagtgctcttcttcggagggctgtggaagggggctgcgtcatgggatgtagaatacagaggggtagggggcaggctattagtatctctcaccttctttttgcggacgatgcaatagttttctgtgaagctaagaaagaagatatgacttttttgagttggaccttatgctggtttgaagccgcttctgggctgaggattaatttggccaagagcgaaattattccagtgggggaggtggatgagatccttgagatggctgtggagctgggctgcaaggtgggtcagctgccttcaacctacctggggctgcacctgggcgcgcctaataaagcggggtatgtgtgggatggggtggaagaacggatgaggtggaaactagccctatggaagcggcaatacttgtctaagggtggtagaatcaccctcataaagagcacactggctagcatgccattataccggctgtccctattccgtatgcctaagggagtggcgagaagacttgaaaaactgcaaagagacttcttgtggggagggggaagcacgggaagaaaagcacacctagtcagttgggagaaggtgtgtgtgagcaaagagaagggggggcttggcttgaggaaaatagtccagttgaacaaagcccttcttggaaaatgggtttggagatttgctcgtgccaaggatgaaatgtggaaacgtgttcttgtggcaaaatacgggcaagaggaatttgggtggagaactaaaaaagcaaatggggcatttggggttgggctttggaaggagattatgaaagaagcagattggtgttggaacaatatgactcttaaggtgggaaaaggcaccaaaatcaggttttggaaggacacttggtgcggggatgtggagctggcccggagattccctcaactcttcaatgtggttgcctaaaaaagtgccactgtgggggaattatgggaccagaatgctggccaaggaggttggaacctaaggttttttagaagcttcaatgattgggagctggccttggttgacgaattgttgcaaatcctaaggaatcaaagaattactttggaggaggatttggccttgtggaagggggggaaaaatgggaagtttggtgtcaaggatgcgtatggactattgaccagccatagtacatctctgttccccaaaaagggcatttgggtggagaatgtgccttccaagttagcgttttttgcgtgggaagctacttgggggaggatccttactattgataggcttcaaaagagaggatgacaaatccctaaccggtgttatttatgtggtagtgaagaggaaaatgttaatcatcttcttatacattgtacagtggctagtgtgttgtggaggatggttcttagcctgtttagagcccagtgggtctttccagaaactgtaaaggaggtgattatcagctggaagggttcttttgtgggcaaaaagaggaagagaatatggagatccataccattgtttattttttggacggtgtggaaggaaaggaatagattagcatttagggggggggagctagctatacagaaaattaagtattcttttgtctgtaatatgtgggggtgggcaaaattgtataatggtgcggagtcccggtcccttataggtttcctggagtggatagcctccagttgagggctggtgggttttttattgtttttttggtcctttgttatgaggcctttgtcgcctcgtatactccctgtatgcttcgcggcatttgcctttgctaatatattggtgtttatttatcggaaaaaaaatattaaaagtaaatataatttataaaaaaataaatattataatttttataatttgttttaaatgagaaataaattttaaattttatttgttaaaaaaagggaaaataaaaaataaattaaattaaaatatttttaaaattataaatataaacagggtggggcaaggcaaggcaatattcaaacccgcctagaacccgcaataggttttaaaaattttccgaacccacccatatccgtttatcttttcccaaacccgttctattagggacaagataggtatccaaaaaaaactcaccccattgccatagattaatctaggtccagggaactgcatggttccatgcagcatctgctttgaatccttctttgtactgtgtcttctttatggtaaatgatctgtattatcctataattgtgtgatgtgaagagcatccaattgggttataccaattgggttataaaatatgtgcagacaataatttttagctactctagattttggtgttggggggaacatatggcacttcaaaatagttttacttatccttgtagtatccctactgttacgatgcacctgtagataacttagcaagttgtgtacaaaatgtgttttcttgatgtggataattcatagatagatattgtaagctggccaaataataaattctatcataatggagggttgccttggaatttaaggggcttaagtctaatcaaagcagaaaattcttttataggctagaacacatggaattctaatttattaagatgaaataatgataagattgatatccagaaaacaccatagaggcctcttctgggtaagttggcttaataattcttaatggtgagattgtaaagagggtattgccataagattagaatttggaaactaaagttctgccttcaaatgcagtaagaaaagtaatagtttatggagcatattataaggtcaagaagacacaaggacttcatttgatggcatcgagatagatgaatgagaagactgttaataagaatcataatttgtatatcatgaaaaatgtaaaaaaggaaaatatgaagataccacatgagggctgattgagatgtttggtctctaacctggagagaccaatgtgcacttaggtgagaaatggaagctagtacaaattgaagatgatagaagaaagaagatgaatgctaagaaagacatgaacgatagtcttatgcttggtagaaggtaatcattttggaatattcaactggaatagaatcgtttttgctgacctctaatagttgggacaatgtgttgattaattgattgattcatgtcattgttgagccttagtcaggctctttggtgtactgtttgtggttgtgcataaatattgctggttgacttgctcagtcatcctgtaaatttttactcatcatacttagttaatttttggaaccctataaatgctgattctgcttttagttttagtttctactatgagatgaagctacaaaataaataaaatagaataaaacaaaaaaccatttgaagaacctcaatacataaaatgggaacatttggggtaagttgttcattcttgcatccttctgaggctccaacagtaaagagttgaaggtaattcctaaaataaaatcattgaggattggaaatcgatttgctcctactttcatcaggagatggtccttgcttttcatggaggccatttacgaggggaaagtagaatttaatccgatgaatcttcccttgaaaaccctgtcagttagggagcagaggtatttttagaaacatggatggtaatgctatcttctccattttctaagccagcatctgttttggctatttttggaaggtttcgaggaagggtcttctttgggttgaggtacttcttctggagggggatgccttaggtataattgattggataaagaagggcaatagtgagagagagagagagagagagtaaccaagaagtggatttcttagttaaaaggatgcaagcatgttagagacatcaagatcattgattggagctctttatttgtgtttttctttcttttcttttttctcttttttttttttttttttggttttcttttgaggtgcctttgggttggctttttgaaggaatcattctccatggttgcaactttctccccttagtattattattttttgcatggtttcttaccccaaaaaaaacaaatgaatattatcaagtgatcaacttctctgcaactgtgacacaaaaatttaatatctaaatagttaatccttactattttgcctgtcagacctgacacaagatgtgtttgttttccctgttcacccttggtgagattttagatatcgagcagtgacaagtgcttactacagaggag

SEQ ID NO: 10816 - DNA, 4210 bp, Vitis vinifera
  Intron number 21 from transcript GSVIVT01023884001 (locus GSVIVG01023884001) derived from phytozome v7.0 (chr-ID chr 3; pos 2698748 to 2702957 reverse strand)
gaagtcattcctttccttgttttggctgtaagttctttatctattcattagctacaattcttgcgattttaaggcattggtaagggaggaggtggatcctattttagctatagatgctaatatgttatgatagttggacaaaatgcattttgagtccctcgttattttcccattagttatatgtgtatgatgtgtatatatataaacttaaaaaattctatactaaagagaataggttagctacaatatatttgtgtccagtaatttatagttaataatgaaaaccctaacagaactgtagttaactgcttaacctgtaaagtactgaaagaaaatgatgaggtgaatgcgcatatgttatcatggagccagttactttgatgatacgcaaaaccccaaagaatatgtattttttggcatcctcttctgctaatcccaccttaatgtgaaaaggtgttgcttgctttaacttgaatagtggtgcatggcagtggtgatgtgcctgaaaatggtgtggcaataacaaaggtggaatagagtactggaagagcttaatgggcttgaaacccattttagcttattatttaaaatgattggttaattaaattttgaaccttggttatgtaaaaagggaaattggaactttaaattgcatgaataataacaaattaaaaatttattattaatcaattcaacaattttttaaatccatcaaataaggtttcgagaagggttggagagagtggtggtagttgtcacaccctcgaaaatcaccctaaatttttcacctggtgcgcagtgctaaggacccctccttagccaaccttccttaccagtcttcacaacactcacacataagcaacagcaaaccaaagagaaacaaggacacacgagattacaggaatgtcttcccaacttgtattagttctcaacctacaagatacaaaattgttccttgagccagaggataatgcttacaacccaagcattcagagatcctctttctctccttcctctcttttttttctctcaaggctgcaggagtcctatttaaaagactggctctgcagttttctcctagtggtggtgcaactgctcagaaccgctctgaactgctggtataactacccaccacccagatggtggcttgctgagaaaccacccacttgcatcagcatcaattttgcctcagcccactgtcagtctatgcagctccttgacttgctcactagctgtccaagctgtatcagtgtgcctccccacactgatgagtgagcccaagccatgtcgaggtgcccatggtctgggcctgttgctttcccttcttgtgtcaggttccgcttcaacgagccatggcattgcgcccatggctgttccctcttggtgcacagggcattgcgcccctgtgctgtgcataggcattcgggtgctagtcggttgtttgtctgatgccccatctggccatggcattgcgcccatggtcttcttggctggtttgcttgcacaaggtttaggcgccctcgtgctggcgcgggaaggggctaggccgcatcatgccccgtgctgctgcagccacgggttgcatgccacacatgtcgtggagcccatgtgtgcatgctcaattgccatgccaggatgccttcttggtgcggtcaaggctcgcccttggtgcggtcaaggctcgcccttggtgctcatctcccttgagacacccaccccccccttaaagagcaatacgggccgttttcaaagtttctggaggagacatcaatatgtctgaggagacataatggaaatatttaaataaatacaaattaatttaaattctcaaaatatccctctgcaccactccttagcccaagtgccttcaaggtgcgcatggtgcctgtctggcttgcccttggtgcgcgcgcggtgcgtgtctggctcggccacggtgcgcgtgcggtgctcgtctggctcgcccgcggtgcgcgcctggctcgtccgcggtgcgtgtctggctcatttgtgattctcacactaagcttcaagggttcgaaccaccaaccctctaggcttcccttgctttcaacccaggctctcatgggtgcaaggcctacccatgaggcctatttttcccggtctagatcaagtggctaaggggctgacagtagtcctgtgtgagaagggatgttctctagcccaaagcagatttgaagaatttaagagagaattgggagtgatatttttttaatcttctctgttaggaatgaagagttttcaaagtgttttgaaaaggtatgtcttagtgttcccctctctattatttcggttgaaatggacccaatgcatgttaatcctgtcttaaatagaccttcaactttagccaccaaagggaaactctcaattgagtccaagatttcatgatgttggaagggccaatcccactgccaaagtgggtgagattcacttacaaccattttccttttactttactaagtgcatgagttagatgaaattttaagaagtgattctaaggggtctagaatcaaatcccaaacaagcctttggacctcctatgccctgctttagacttgggcagatgtattatcatcagggcgttttgtcaaggagatgcctcaagagggcataggagaacattgagccattgatagtttggaggaatatttatcattctcttggattggagaatgaagccatcgttcccattaggtgcacattgtctcacatccaccttgaagtgaggttggagaagccccttagtgtatgccacggcttggcatgcacactctgtgaacatctgtgtacaaattttgtaatactgacactgcaaaagagttgaagatagcgaccatgggggaagcatgcatatagccatgtggtgtggtccagagtagaaggcatccagtgccaggctagtggaggactgttttttcacatagtacaggaaacatggtgctctattattagtcaagacacagtgatgctttcgtgttgcaaactggaatcatgtttgcaatgagtgaaccttgtggaatttgaaagatatcaacaaatcttctgtgttaccatatgccatcatatcctttgtcagtaagttggcgttacctttagcttttcatgaatgcatttgtgtctattctatcttttcctgctttgttcatccagctcaacatcatcacttgactcacttccgctgttcgaatttccttggtgtagcattttgttacgtaatttgtaactggcctccagtctttttatgaaactttgtgttatctttatgagctatcttgataagttaataggtactctatgatcatataacactttagaagctcttctacccttaatccatctagctgtaattgtataggcaaacatcctcttcaatttcaccttattgataaactaaagaatgaaagtaactactttcaagtatttcctcatcataattttcagtttttcctcatttctacttatttgtttactgaagtcacattctgtgaactccatcttagtgctgcctataaattctgtttatttatttgccggctcatgtaaggcttcttggttacatgtcatgaacctgataagcttcatgcaagttgatcttgaaaattgcctagactggaactctgaaaagaaaaagattttcaacagtagttgtgagttttctctttggaattcagggaaagaaaatgagaggatgaataaaatattaaaagtatagattccttcctaatctctcagcatacaacaaccgcttttagatctttgattttgttcagttctgaacttggtgaggggcttcagaaatgctgttacatctgccatttgtgtactctaatgttttgtagctttcatttagatattggcttaatagctttatgtgtcagaaagcataaatttgaaatgtagagatttgttgagaggtgtctcttgacatgaaactgcatctgccattcttcacacttattggagttaaactaaaatatagataatcacgatatcatatcaagatttaaaattaatgcacttgcaagaaaatgtggctatcattctcatattataggtattcctgcattgaaaattggtatggatgccattaccttcattaatgatgagtacagttaccaattaatgttttagttgtatatcttttacatatttcaatcctattaatttctatcaggttggagtcgataac

SEQ ID NO: 10817 - DNA, 2035 bp, Vitis vinifera
  Intron number 18 from transcript GSVIVT01008473001 (locus GSVIVG01008473001) derived from phytozome v7.0 (chr-ID chr 17; pos 1610340 to 1612374)
cagagcatcctcaggttactctcctggttttgaccatgcttttctagtactttatcaatagtgattatttcatttttgtcctttggtggacatgcattttttctttgcttattctgttttttttgtgctttttttcatttatattttcttttttcttttattttgtttcagttttttttttttctatgcaagtttttttttttttttggtagatggtagtagattttgtctgatggaaaagattttgcaccttttaatataagttactttatcaccctcccttttcaaaccaatttactgccttagaatcctatgtcagaatgctagttgtcaccagaactatatttaattgctgttgtttcattatgaatattataatatggaaatctcggactacgagtgcttgtgatgctgaatgacacattcaaaagatgcttcaaaaggcatcagctcccttcttattgacaatagaaaaatatgcccttgaggggaaaaaaaatctccatcattcttgattgctctccgcaagcttctttgccctctcaacaacactaacctcctctttaggtctccatacactcccacaatcaccttcctctaaactattatgctttatcacagatccccatggccactttctgagtaaagccttgttgagaggtcaaggctcctaattccaaatccccaaatgtgttttctgaaaaagctttcaaccatcttactaaaatagtccaaattcctttgacttctttccattctgctccttatcttcctaggaaccacaaagacagacaaaaattaatggcaactaggaggagtgctcttcagaggagtgctcttcagaagagcagtctaccatctctggaaaatattgccttgcccaagaggccagcctacttttgaaccttactgagatccatgccaagaaggaaacacacagtggcagctcgtagtacttggtgacaaagctgctcaccctgtactcccgatgatgggccaacagctcaacaccacccattctccctaccagaataagtttagttttcttcaaattgattttcgagcataaaaccgccttaaaacaccggatggcctcaaaacacagaatggcctcctgacacataatacttgctcctttaggagtagaatatgactaatgaaacaatatccttctccttttcccttttcttgcccttaattatttatacattggatcctagcctccaaaggtctttctattagattcttatgttttttatttttttgtgtactagcttaacataggggaagaaaaaagaaaagactttttggaatgccaggcatggatagatcagtcttgattacacatttgctatgatcctagtgtatgaaccttgctatttagcacattattggaaaatcggtggcataatttacctatggattgtgcttaacctccttttatgcttagctgattgatcatgtaggttgataactgtaacgaagtggctaacatggtaagctttctgtaatatcatgtcgaatctcaaatactcacatgtgctacaaagcatttggatcaatcttgattgcatattctatgatcctagtgtatgaaccttgccactaagcacattattggaaaataggtggcatattttacctatggattgtgtttaaccgctttttgtgcttgggtgattgattgtgtaggttgatcgctgtaacaaaacgactaacaataatttaccttttgatacggctttctgtaatatcatgtcaaatctcaaatactcacatgtgctacaaagcatttggatctttctataactactgcctatcaatcatcatatggtatatgacctctgaagcctgttcttattatcaatcaatatagatgttcaaatcacttatggagttgatggtattttacatatttataagtgtttgttttcaaagagtttggatgtttataacttgtgtttaagtttgacagcatctgttttgctatggctgcattctgattttctgttccctttttttgtgctgcttctag

SEQ ID NO: 10818 - DNA, 1417 bp, Vitis vinifera
  Intron number 1 from transcript GSVIVT01035660001 (locus G SVIVG01035660001) derived from phytozome v7.0 (chr-ID chr4 ; pos 3090384 to 3091800)
atcaggtacttattggattttgatcaacattctcgttgtttgctgagaaaatttgaattacgtgtcttcttttttgtttttttttagtagtgttttgttttgaaaaaaaaaaaaaagaagactttggttggtttctgggagaacagaggagatcaaaagaaaagggaattaatttgcaacctcaggctttatatcctattttattttactgtacaaaaggagaagcagtttgattgggtacagttgaacttaattgattagtgagaaagctgggaaaagagaagataatgaaatcctgaattttggatattttgttgctgggagtggtgaaaacagaacttaatcctctatgctctgtttggttgctaagaaaatatttgaaaataagcgaatacataatgttaagatgatgtattatgtggtttttgactttaataaaaatgtaaactcgacaaaagaaatgaaaatttcaactgttgtattacattcaggtgattgctcctacgaggcacttgatctggtattaattgaattaaatgggttactgtcatgttggttagtgtgacaattcaggaaacgaaggaactcatttttggctttatgttttatgtttttggttttctaaaaaaataaaaacctcaagtctaatgtattcaatgcagcatgaaattctgttttttgaggcaatttgatctggtaatgattggatccaatagggaaaattcatggaaaggagagaaaataatgttctgaacaataatcttttatgttgttttgattttccaaaataaaaagaagaaaagattaaaaaatgtgttggtaattgggtcattatgatgataagataaccttttaggtagtatcttattcaagctgttggctttaattagtggttggtgataaactctctctcttatttttctttctgcccctgggtaaagatttttttgattatcattctgtggttttatttatttatttaattgtaaattttcattatcaatagagggaatagatatttctggttttttggtgctttcttttggtaaggattgtgctatgactcatgccaattggttctgcaaaatttcttttcccatatgaccataattttttatgtatggtctttaatagttttagctgctcatctggatgtattggacagccaatttttgttttatatcaagtaatgctctttgagaatgaggtgatggtggaaagaaacccactaattgttgctagtgctggttgatggaacccaactgttgctttacacatgcatcatgcattaatgttatttcttcagttgcatataaaaatgccttcagtcctaacatcagaacaggaaattttgataaccgtcgctctttatttatttattttttgcggtttttttgttttaaattgcaggcttgga

SEQ ID NO: 10819 - DNA, 3580 bp, Vitis vinifera
  Intron number 7 from transcript GSVIVT01020840001 (locus G SVIVG01020840001) derived from phytozome v7.0 (chr-ID chr1 2; pos 1220425 to 1224004)
gggaggttattgcagttgatagatctcacaacaaggtacccatacaacttttaaactaaaagtatgattttaaaagtctgtcagttccttaaattatcatatcactcctataaaaaattctgaaccacatcatactagttgaatttaatgccaaatggcaggaaaggatttagtatatgccctcaattagatgggataataggctattggatgcactatggatgaacttgtccatccttattactgatacaaatgttcaatctattattctagaagaatcagtggagcacattctcatccattataggcatgagagtagcattgcttgcatggcatggaagttttggtggaaaggatagtagtcttattagtaatatgtttgtgtttaaagtctttctttctttttctttttctttttttcttttttttttttttcatatagagagtagatccttgatgttcttgagcttgtaaatagcaagaggtaggatagttaaaagtgttcagttttttgtttttttggcttttgtgtgccttgtaaactcctatgtactcggattgtgcacttgttttgcagattgcacaaccttttttgctgggtattgtcaatctattcttttttcttgtttgcctttaaaagaaaaatctattattctagaagcatatctaaagatcccattctgaagtatgtgactatgaatctcacattgatgtcttttgtgtcagttctagtttattatcacccttttagtgctgagatgttttcatgaaagcataattcatgcaggcccttcagattgaaatttaatgtcaccaatattgactggtgaaccaagattttttttttttcaaatatatatgcatgaagactgatgggattggtggtattgcgagtgaagtaaaatataggaagcttcaactttctagctattatatactgcagccaatatggttcaatgcccaaaatcaggtgtactaaaagaagaacaaatgctgctattgtttgaatatgctgaaattactgtagtgttccttcatagctctagtaccaaaaaaagtcaaaccagcagaatcttggattttcgacctatcagtttggttactagcttgtacaaaatcatagctaaggtactttcagggtgattgcgtaaagccctccaagataccattttcatgtcccaaggagcctttgtgaaggggaggcaaattttggatgccatcttgattactaatgagctagtggatgagaaaaggagatcaaatgaggaaggggtagttttcaaaattgattttgaaaaggtctataaccatgttgattggtattttttggaccatttacttgaacaaaaagggttcagttcaaaatggagatcttggatgaggggatgtttgtcttttgggtgaaggcttctagaggcttaagacaaggagatcctctttctccttttcttttcaccattgtggctgatgttttaagtaggttgatggtgtgagcggagaagagaggtctttttttcggggtttctagtgggcagaaataggactagagtgtttcatttacaatttaccaatgacattatcttttttttctagagcttccttggaaacccttaagctcattttgttggtttttgggaggttgccaaggcttaggatcaatcttaataagaggactcttttttatatcaacattaatcaagatcaaatctccaggatggctttgatgcttgattgtttagtctcggattggcctttaacatatttgggtcttcctttagggggggaatccaaaatcaagttcattttgggattcagtgattgatagagtctttaggaggttggatgaatgaaaaaaatattttttgttcctaggaggtagaatcactctaattcaattttgtttgtcgcacatcccaagctacttcttatcccttttcaagattccagtatcaagaacatcaaggattgaaaaaatgcaaagagattttttatggttgggttttagggagggtaaaaaacatcacttggttagttgggatctagtgaataggcctaaggagttgggtggtttagggtttgggaaagttacttcaagaaatcaaactttattaggtaagtggctttggaggtatcctaaggaaagttttgccccttgacatcaggttattttaagtatttatgggacacatcttagtgggtgagatgctaataatttagtcagatggtaacattgttgcccctcgaaagccattgcatttattttctcggttttttctatatacacttgctttggggtgggtgatgggacaaaaatttgtttttggagagatttatggtggggggatcaacctttgtgtttacaattcctaagacttttcagagtcatcacaactaaaaacctctttgtttcatttgtttttggtagtgattctcctccttggaatattttttttcatcgtaatctaattgatttggagattaaggatcttgaaagattaatgatttatttttccagtgtacatttgtctccatttgttccagatgcaaaagcttggacaccttcttcttctggagtattctcattaaaatctttcttcctagccttgaccaatatatagagaaggcctttcaaagctcttagtcttgattggtgcttcctatgtagggggagtggaaagacgattgatcatcttttcctacattgttcggttactttgggttatggcgtagactattcttgtaggcgggaatggagtgggttcaacaaaggaccatttgtgatatgatggttatttcctttatttgttttggaaactctactagaggcaagactctttggaagattacctttcttactttgatgtggaatgtgtggagagagaggaatgctaggatttttggggatacttgcaagacgcttgagatgatgtgaggcttgattcatttctttgcttctttttaggcctatcgtattgatgttttcaaacctttcccttttgagtgtcattcagtttagttggctctcaatatgttttccttagggttgggccctacttggtgagaagttgagttgagctttcgagttgtatatttgtatagtctatttattctttttgtacaaatctccttgtaaaggagaggtattcatgggttttttgatcaagtttgtatttcctggggaggatttttcatccttcttatgttttattatctttaattaatacatctttggtttctgatgaaaaaataaataaaaaacctgtagtgcactcatctgtgcatttccatgatttttttttttggttttatgttgcaggtttttataacagaaggaatattaaaagtagaaatcatacttgttattatattgggggtttctgttttgtattttatttttcttaattccaaactagtaaataattcctaatttcctcttttaagcaacattatgtccagatgaattttgtttcagttgaaactgaattctccaaatttaataatccattgtcttcctgttttgcttttatagttttaaaaatttttatttgttttttccttgattttaatttgtttacaggtg

SEQ ID NO: 10820 - DNA, 10954 bp, Vitis vinifera
  Intron number 8 from transcript GSVIVT01031636001 (locus G SVIVG01031636001) derived from phytozome v7.0 (chr-ID chr5 ; pos 19325192 to 19336145 reverse strand)
gaccttctggtctcaatacagttaatcttctgaaggttaaaacgcaaccagcgtcaattccatttttttcccagtttgcacaaaatttgtccttatccccccagctcattgctttgtccattacttggtttcatgaatgactctatttacatgtctcctgtccaaatgctctgtgtgctggcttttctagtgaaaacaggcttatttcagtaaagattggaggattataaaatttgcatgttttggtgcttaaaagagaaggtatagaggggggggaggaagaagagagagaggaaaacggtgctgtatttcttatggttcatttggtgctaggagcttctaagaaaattctttcatttgaaattgttgttaatttaatcttaaagatcatcaaggttttgtttggattttttatttattttattttagtttttttggttggaggattttttgatatttacatgttagatatcctgctaactaatcaaggtaaactgaagttttgatagagtaagacttgtatgcatttgagaaagatgtaatagacttttaactaatctgttcagtgttgggcagtatattgaggctgtgtaatttggaaatcgcattgtcattgtacttgcagccaaaagaatacagttaactctcacctggagatgaataggcttttattgatttttgaatagaagagcaatcagcatataggtaattgaggcttcgtcaagtttctaatgacctaacgatggagaattacataggaaacacataaaagaacttttgatgatatgaaaataggaggattgaagggcaagacattgttaagagctttatgtctgcgtagtataagatggagtgtggtttatttggtatgttttggtgaaaagaatcctcgtactcaatatatttgatgctttcgtgatttttattttattttcacccgcaccattttattttcccaaggctgaatgcatgaagtttggagcatacgatattgaaaggtgaatcacatcagtgaaaaaaaatgtcttagagatacaaccatcatagatagaggattttggatcatagcaaggggttgggttgttgtgtcttcaaaaagcttagattgataaattcgacaaagaagtaaaaatcaacaatgttggctgatatcttagctgtatgttggaaaaactgacctaccaaaatgagatgcaacccctttttcttgtttcccaaaaaagtcataaataatctgtgaatatatgtattgattagaaacaaacgaattcatatatacgataaaggataaaaaattcttccaaaatatacaaggttgatcaaaatgaaaatagagtgaacttctgaaatatgaatatgaggacagttataatcacaaagatataagatgaaattggacaaattaacacaactctagactccttaaggaggtaaaaaatctcacaccctcccccccacaccccctaaaagcagtttgaagcttgtctcctctttctgctaaaagattgggacatttttaactaaggatacacagagatagaacaagctaagtcataagcaacattttgaatttgacgaacccatccatcctacctccaaggtcctctctcttatttagacacttaaagatatcaaaatagcataatctacttccaccgataacttagaaagacaaagagccctaaactttagcaagtcctttaaaaaagctaaaatctcttccttaatggtaaaactctcttctatcagttttaaaaatgctctcaccattgaactaccacagacacttatcatcaatccaatctctaacctacctggattactcaaagtagatccattgatatttaacttaaaactaacccattagaggtgaagttcataaagagaataaattcctttctcactctttctatctacataccaagttccaattaagttgtttaatattgagaggagtacctttgaaagttgtggtacgggccagaaataggaatataaatatattaggtcccaaatagtcttcatacttgtctacttatcttaaaaaaatccttgcatttctctcatgtcaatttatctaaatcaatgtgagacaagcaatacgccaaagtgctttgccttttttttttttttgataaataagcaagcaatagattaaaaggcaaaaagccacaaggcatacagggagtatacacaacagcctaacccaaaagacacaaaaaacaaacaccctcaccagcccttaagtggacgctagccactccaaaaagcctaagagagacgaggactccccaccaatgtacacccgagcccaactccaaagattacaaacaaaagaatttttgagcttctgtatagctaaagaccctcccctaaaagctaacctattcctctctttccaaaccgtttaaaaaatacacaacgggatggaattccaaatctttttcctttttttccccacaaaagggcctttccactgaataacacctctttaaccgtctctgggaacacccatggaaccccaaacatggcgagaatgatctcccagaggaccctgaccactgtacagtgtaaaagaatgtgatttacagtttcttcttcacaaccacataaaaaacaactgttggggggttgccacccccgtttctaaagcctatccagggtgagaatcttcccccaagtggcctcccaagcaaaaaaagtagctttggttggaaccttatccacccaaatgttcttcttcgggaaagcgaagttattgggggtgaccagcagaaaataagcgtccttaaccccaaaaataccacttcccccacctttccaaaaaactgaatcctcctctaaagatactctgcagtcccttaacaaattcagcaactcacctatcaagtccaactcccaatcattaaagtctctagagaatctgaggttccaacctccatgaccaaaactagagtcccacacttcattaaccgtcgcattcctctggaccgtcaaagagaataactgggggaagatttgggacagtgctgcattgccacaccaatgatcagtccagaacttaattttagtccctttacccactttaaactgcaagttatcccagcaccagcatgcctccttcagaatctccttccaaacccccactccatacgtcccacgaacctcattagtcctccacccaagaccctcttggtcatatttcaccaacaaaaccttcttccaaagattatccttttcaatggcaaatctccaaacccattttctcagcaaggccttgttcagaaggataatcttccttaagcctagaccccccttctccttttgagcgcacacctcctcccaattaattaagtggactctcctttccaagcttccccctccccaaaggaagtctctttgtaatttttccagcctttttgcaacaatcttgggcattcgaaaaagagataattggtaaatcggcatgctggccagcgtgctcttaataagggtgattctcccgcctttggagatatattgtcttttccacaaggctagtcttctcctcattctctcatccaccccatcccacataggagtcttgtgataggctcctaaaggcagccccaaataaacagtgggcaaagaccccaccctacaccctagcttcactgccatttcctcaatctcttccacctttccaaccggaattaattcacttttggccagattgatccttaacccggaagtagcctcaaaccaagccaaaatccagctcaaaaaagttagattctctttccttgcttaacagaatatgactgtatcatcagcaaagagaaggtgggacacatttaactccatcctacctcccccccgaagcttacaacctgaaatgaaccccccatccacaacccttcttaaaagtgcacttagcacttccattcccaacacaaaaaggtaaggagaaagagagtctccttgacgcagccccttggtgcttgagaagaagcctgcagggaccctattgactagaacagagaacttggcagttgagatacagctctagatccactccatccaccgaggcccaaagcccatcttatgcaaaaccttcataagaaaattccaatttatgttgtcatagactttttcaatgtccaatttacaaatcaaccctttctcttttcgtttttgccaaaattcaaccacctcgttagctataagcgagacatctaaaatctgtctgcccttcataaacgcattttgatcctcagaaaccacctttcctaaaaccttcttcagcctattagccaaaaccttagccaacaacttgtacaatccccctaaaaggctaatgggccggaaatcccctaggtcctcagcaccccctttctttggaataaggaccaggaaagtagtgttcaggctcttggcaaaggatctttgaacataaaactccttgaacatctccaaaatttcctccttcacaaaatcccaacatgtttgccaaaaggccattgtgaacccatccgggccaggagctttgtcaccatttagctccaacagggcagaatggatttcttcctcagagaagggcacttccaaaaattcagcttcttgggcattcagactctgaagatgcagcccttctatgtcagctttctagcctggctcttttgagagcagatgttgaaaagcatcaacaatcccttccctcacctcttgatcctcattcagccacaccccgttaatcttaattttgtccaaggaatcatttctccggagggcatttgccatcctgtggaaaaaacctgtgttcctatccccttcctttaaccacaactccctagataattgtctccaatggatttcttccagcaagacccactctttataggtttccttgacttcctttttcagctcagtttccctttctgagaggctcctctcgctttccaccccatcccaaaattcaacttgttgaagagctgactttttattgacttccagcctgccaaacacatccctattccagtctttgattctttgcttcaactccttcagcttagtagctagcctgaaactagcattccctcttaccacaaccccctaccaccaaccccgaatgaggtccttaaagccatccactttaagccacatattttcaaacctaaacggggagggacccctcctgagcccaccaccctccaacataatgggaaagtggtctgaagtgggtctaggaagcctgctttggagtttgagagtactcttgaaccccttaaaagaaatggtcatcatattacttacactttaggaggaacctagtctataatcttgctagtttgaatagtttatgctacatccctaaagttactgagcaatgtaaaaagagatgatcaattgattcgctactcctcaaacacatggtgcaatggtccagactaagggctttatagggtcttctcacttgtggtagtcattggtgttcgacttttttgttacccaccagccatgcaaaaaccttaaccttaaatgatgttttatacttccgcatgaaattggcatgaagagaaagggttgaagtcacaagtttagccagagctaagaagtaagattttacaataaataagctaaaggataataaggatgaaactctcatatttggaaaggaaagcaacaagtacacatgaatgaaggacctaagaattttaaaatcaccactttttgaatcaatgaggttatgacgaaaatgaaagttccaagacaaagagggcgataaattgagaatggatgaaataggagaatttcaagccatcattacatgaaaaatgtttagaaattaagagcaaagtggttaatctttccaccacgagtcttccaaaaaatgaatctattattgttgcccacaaaaaattttagggtatgaatggagaaatcttagaaaacttgagcaatagcctttgaagggtgacaatatgaccacctgaatgctacattggcatcctaaatattgcactatagcttgtagatactcaaaatgaccttatgccataaaacattactttccttagtaaaacttcatggccactttccaaatagagttctattcctcgaacaaatctttatgatgataccgtgttgaattggaaagatcgaaaagaagttttttttttttttttaaatacacgtgttctaacaattgttttgaatataactttataaatagttattcttaaaacatttgtaataatcttctttgtctctgttgataaaatctataatattatttaaaaattattaacacacacataattttttatgctattaaatattatgataaggttgaaaagttgttaatacacgtcttaaagataatttttttgaatgaggcttataaataattatctttaaaatgcttgcaataatattcaaaatctttattgataaaattaataatattattgcaaaatttatgagcatacatgtgagttttctttgcttttaaagattatgatatgctcaaagttatgtcatacacacgtttttaagataattgttttgtatatatttttttaataaatagttatccttaaaatatttgcaataatctttttagtcagttttgatatatttgtatggataagttatttttttcttttatgttttatgaagtgaaaatagctaaacattagaaaagtgcgtaacaaaaattacgaacatatttttattactttctaatatatatatgtaatctaatagataattgtttttttttcccctcaaaatttaatttgttttataaatgttatgtgttttcaagtgttaaaattcaatgaaataaaatttttatctccatgttactattgaaaattcatttttaaagtcatttgtaatgagtgtacattgtagtactaatggatattactaaataaagattctttattgaatcatattcaagattttaattatttttctcaattggattgtaaaagtcgattttggcaaattagactagattaaagaaagcaaatcatggacagtgttttcatgtccttgtaaactcgatgaatggaatattataccatttagattaagaaatacaccacaaatatttcactgcataatgaataatatttttagtaaatatacttttattcttgtttatattgaagatattataattttttctcattctttctaggaacatgtacaacatctacaatttgtttccgaataattgattaataatgggttagttatgagtaaaactaaaataaagttatttaaaaattgaattgaatttttaggtttagaattagaaaacagaaaagtgaagttacaaaaccattttatagaaaaaattaataaatttccagataaactagaagatttaaaaacctttcaaagttttttaagattattaaattatgctaggcctcatattaaaaatcttagccaattagcaagatctctttttaacaaattaaaaaatacatgtcaaaaatattttaattaggtagatgttagatgagtacacaaataaaagaacttgttgagcaccttctaaccttacaattgcctttagaaaatgaatataaaataattcaaatggattcaaaccaaattggtttgggaggaatattattagtttcaaccaacaaaggagaagaaaaacactagatattgtagtggaacctttaatgaaaatcaaaagagctttagttcaattgactaagaaattgaagcaataatcttagttttagaaaaattcaattagttttaaaccaagaacaattcactttcaaaactgactgtgaaaatattaaaaacatttttgaaagcaattattttgcaaaattatcaacaaaaagatagattaaatttcaaagtgcactaataggctttaaaccagaattttaacattttagaggaaaagataatattttagcaaattgtctaagtagacgattaatctaacactaacaaagttttatgctagaacatggctcagaagcaactgataagagctcagggttttagttatagaaccattacactaaccaaagtactaaatcctcaatagaggtttaattcttcattctctataaacctgtttgaagaacatcaagttttagtagatagtttttggttgttaagacactttttttttccaaaccaagatctagagtacgcctataaaagaacagttatggctttagctcaacacctcaaaaaattcaaaatcaatttattagtttagaaacaaaaaggtttcaggacctcaaacttttagaacctcaaaatattagactcaaattttagaataatatagcaataaccagtagttttgtgagtcttcaagaattagttaatttaattaaaaagtctgcccttataccagaaaaatcttagaacatgattttaaagaacaaagtagggctcaacaattacgcttttattaaacaaattagtttagaaaatagtataaccaactatacaagaaccagttatttccatacgaacaactttcacaatctcattctgctggaataaaaacagggtatatatcatactgtgaccctgaaaagtttttgttatgtatttagcgtatgtaaatcttctcttatacaaaaagaagttttagaccttttaattcaatttttaggttagagaattttgaaacacctttttttttttttttttaactatatgatgccaatctcttataatttccaagaaaaatttaaaagtattctaacttatctttttggaacccaaaacaatttggatttggcttctgaaagtgtaccccctctatttgtaacagattatacagtgatacccgcttatcatcacgtttacataaccaaccatgattcttaacaccacagtgagaactagactgggagatgacaaggccataggaattccttacctaccatagctgttgtagagctctacaaattgaagcaaggaagaaaaagaaagaagatgttttatcttattagagaaacaagtaccatgtccatatgtggaaaagagccactagatggcatattagtccaaggaccattaacaactctcgaagaggaagacttaatggatgcacttgcaaaggactttaaaggatatatcacctatgacattgacttttgagacaatgtaaatgatgaacccttctagaaccttgaaaatgcaagagaaccacaattagaacagaaccattaaaaagagaatgacaatacttactccaacttgatagaaataacctatgacttcatcacttacaatatcagattcctgtaaaatctgaaaatgtcactgcttatgtcttaccacattgagcaactgtcaattccagcttacgtccacacatgcgccacacaagagttgccgctatcctctctttctttatacatatattttcccatgtgatattgttgatcccttgttactaccaaattccaactttactctctctcctcagctttgtagattctcacttatctttgtaatttttatgattccttttttttttctttaaaaaaaaaagaaaaaagaaccagttgtgaattgtcactgctgagtttcttcaacatgtcaccagaatattgggtgattttgtggttttttactttcttgataatagtgtagtttcttataaaaaatgtatacatatgtaaacacattagttgcaagaagagccttgtttcgagttgttagtatcactcatcaatatatttgtataaaactattgataattcttccattagcttgtataaaagaaattacaaattcaaacttctaatttcgcaggagtttgtaatataccaaaagtctccaaatttcaacccatcatagccttagaaccttgactcaaggaagaacacatttaaggaaaactttaatggctcgccaaaatttttggtcaccaaatgtaatttcttacaaccattatgacacttttctttgcatttgaaatcttaaccactcttttgatgcaaacatggtcttctattctgctttttgtgccaaatacctctcaaactaggtaaatgatggcaatctgggttcttccaatgtgttctttgttttgtattgtcttgttttgttttgttttggtttctgtatttattttggcttaattatcatcaaattaagaactcaagaatcatggtgatcgtttattctttgaatagatttttttttatcagatttattctttttatattttatttgtatgcattggtaaatcacctgtcactaaccatcaagtatattaacacctgaaataagaacatcaataaagtttggagatgtggccctcatgctactatttggtgtatttggaaagaagacccaaaaaatctgaggttgtcttccatagggttaaagcttattttgcaaacaaccatttgtatgggatctttatgagggttttggttagggcttgcttttatagattcttagattctcgtggattgtggttcttatttcctttcttggcactcttatgtggaatttttattcattgaacgaattgctatctttaacttgtctttgggaatgctggtacaaccaccacttttaccactttgctaggtggcaagtgatgattggatgccagcaagctttttcatttaataaatggggaccacttcttattatatccaattgccacttgctgtgtaagcaggtagtaaaaatggtggtaaaagtgatcgtgcaagtagcgccatccattgtcttatggttacaaggatgagaatctctaggagtatatgttttatggtttcaaaataatatttataatgttctgtattgtagtcagctaaaaacaaagtatgtaggcttaattaactagtttatatgcaaagtattgacattaagtaatatggtgagataatttgattacattgtcttgatttattcaggttgcttcaagtgcattaggctttggacctcaaat

SEQ ID NO: 10821 - DNA, 8690 bp, Vitis vinifera
  Intron number 2 from transcript GSVIVT01025923001 (locus G SVIVG01025923001) derived from phytozome v7.0 (chr-ID chr1 8; pos 27202753 to 27211442)
caaccactcattttcaaattgaccttttgattgtggtggatatactttcattaacaatgtcaaaggcacctctcatattcaaatttgtggggttgattattgataggtaaacatcaaatgttctttggctttcaccatgccttaaaaatcttatcaactcaatttaaaagatattatgaacatatggaaagagatatatagaagtcaaagtcctctcttacatcatctaatattcaaatttgttagcttgattattgattagattaggaaaatatagcttttagcctgacagagaaaacctgatatagaaaactcattcatttttccttgttttataactttataagaatattttcctctactataatggagagaattagatattattttagaaaaagtccattcttcttaccataattattatcttattggagtattttccttttcatttaagaaaaatccttaaatttttattttacttttaggatatttattgataagtctttgttaaaaagctcattgctttaaaaaaattgtaataacccattttctttcatttaaatattgtcaactctaaactcaacactttaaaatacatttataataaagattttacgtttacaaagtaagtgattgtgatatcctatattggataagagaaaaagtttttgacgttatatatgtacagactcttcttaatttgtggattcctcttaatattgtagatatgttttaaagtcatgagggtctattagattcaaagtgaataatatctacacagttgggagtgttagtgcattatacattgttgtctatgtattgataattttgttctttttattctaatgtaggatataaattagaattgaaaagggtataggttagattagatatttcaaattttgcaaaaacggtttcaaattatgcttcaatttaggttttgtttatttatttttctttttttaaatttggtgaatatgaattttataatctaatagcaagtcttttagttagtatgatatattttaagttttgttttatatttggtaggcaacaatgtgatttgtgccaatttaaatgttgatgaatatttgctcatttgtaactcaagaataaaaaccataattgtttgaaactaggcttgactagaagcatgattttcttaatacaacaatttttcaaaaattcgacgatgtgtgtttttggggcctcctagatttttcttttttcaatggatagacttctttgaaaatttgtaacttgtcattccttcccatgtaaatatgatccattatgggtcaatgtgctatgcatatatacccaacatcttatgtgagatatcacaatccggcctccccactcccacatggagactcgtccctatcatgtcccatagattatggggccaaacagacagttgctccttataaagttagataagtaaagacttacatcaaggtcaaggatcatctctcatactatttgtaatggcttgcttttaaccatgtagttgttttgggtaaaatggaccctcacgactttgaaacttgtttacatggttaagagaagtatgttgcttataatgtattgtaggatatcattaccactcttgtacaaacataatatcttcattatatctcgcaggattgcaagacatttagatggacaaatacctcttatggggttaaacaaattcccacactgggtcaatgatcaactttgatatcatttgtaatgtctcactctcttcgatatagatgttaaccgttttaggccaatgaacctttacagctttaaaatacgtccatatgatttagaggagttcatacatatataatataaaaacctttatcattcatctaatatgagatattacaattacccctctctttttcatacaaatatgatattctcattatgtcctcacaaaattacagggtcaaacaaatgaaggcttacatcaaggttaaggatcaactttgataccatttataataccttacttcctcttatgtagatatcattcgttttaggtccaatgagtaatcatagctttaaaacgtattttaaagtagtaaagatccattatcgttagtacaaataatatctacacgattagaaataggtcactttacttctcttttccgcacttcaaatgttaacatatcaaacaccataacttttttttctttttttctttttttttttccttgaaggcaatctaggaatactcattttatcacttcattctctaagagaagtatacatatccttcatgagaacactcacccatctctacttaggggttaaaaggctaaaagaatcgatgcataattaaatattctaccaaagatagtaatgtctttgtattatgatgagcccttgttttgttaggcaattaagatagtaatgcgtttcaaatgatttgttgttcttgtgagcttttcaagagttctaacaagatttatttcattaacatatattgcaataattgcaaatttggtttctaatttttttaatgaagatacatggacatatagggttattcacatacctatttttttttagcaagtatcagctaagacatttgtaccgcatgcgttcgaattgttttaatcaactcaaggatcgttgtaacttgattgagtacatgctatgaggttttgtactatttgcttcaggcaatttaaatcttgcagagattttcatgtgtatccatagaactttataaatatgatgtagtaacatccatgagacgcatattcagtccttctgagattgtcaaactaattaagaaacgaaatgtgattgtgttcatgacggaagagtatgtttcatcgtagtcaatattaggtttttgcgaaaaaccttgtgctactaatcgcactttatatcttatgatctcattattctcattttgttttcatacaaatacccatttgtacccatcatgctttacatcttcatgtgtttggactacaaataaaaaaacttctcattttgttaatgagtttaactctgcttgtataacttctttccattttggccaatcatttctatgtcgacattcttccaaattttgtgctttgggatcttcattattttttatgatattagaggccacttggaaaataaaaaaaattgttaataacaatattatttcgatcccatttttctattgtgtgtacataacttactgagatctcacaaatttcaggtacttgtgcctctttaggggcaacttgttcaatgtgttcctcttcaggggctttttattcaatatatgcttctttagaggctttctgcattatttgtgcatcttatggggttatatatttaacaattttagactgatcagtcattttgatggtctcttctagagtgccaattttttcttgtgttttccttttctagagagttacattctttaagtcaacaagtttaccatgctttaagcatatcttagattcatttgttaactgtcttacaagaacgttaattcatgctagagtatttgcagttataatatgtgactttgtcactttctttatatcaataaatgcatctggtaattgatttgcaagattttgcaaatagatgatcctttgaacttctagttcacattgatttgtatgaggatcaagatgggacatagtagatgtgttccaagtaatttatagtcatttttcaagaatcggtttttctctccttaatgatgggaaaacactctcattaaaatgacaatttgcaaagcgagctgtaaaaatatcgtctatcaaagattcaagataacttatgatagatggagaatcaaaacttacataaatcccaagttttcattgggggcccattttagtgcattgtgtaggtgtaattagtatatatattgcacaaccaaagatttgtaagtgaaaaatatttggttgttttctaatcacaagttgtgaagaggagtattcatggtaagttgtaggttgaatacaaactaaagctgcaacatgtataatagcatatctccaagaaaaattaggtaatttggttttcattagcaatagtcgagcaattaattgaagacatttgataaagggttttgctaaaccattttgggtatgggtatgagcaacaggatgctcaatattcatccctattgacatgcagtaatcaatgaatgtttgagaagtaaatttgccaacattatcaagatgtatggttttaattggataatttagaaattgtgctcataatttgatcatttgtacaaaaagcctagaaaaggcaacattacgtgtagaaaggagacaaatatgtgaacacctagtagatgcatctattaagatcataaaataacgaaatgacccacatggtggatggataggcccacatacatccccaagtattctttctaaaaaaaactagtgacttggatatgactttagtaaaaaatggtttaactatcaatttaccttgtgagcaggcaaaacatgagtattcattaggcaaaagaatcttctggttctttagtgaatgtttcatgtgagtgatcaattatttaacacatcattgaagaccctaggtgacctaacctgtcatgccaaatgacaaaaacttttgagtcattgaacttctcgttcacgacaacatatgattcaatagactttatagttgtatgatacaacccattggagaaagttgagagtttttccattataagcttctgaccagatataatggaagtaatacaaagatattctatattatctacattcatagtttaaatatgatatccatttctacgaatatctttaaaattgagcaattttcttctagatttactagaatataaagtatcatttatatagaatctagttccatttgatagcattatgtttactctttcagagtcttcaactaagtttgtagtaccagatatggtacttacattaacttttatcaatgtcaattcgagaaaatatattttatctcaaagaattatgtatgttgttgcatagtttgcgagacataaatcattctcattcatcttgaaaccaaataacacatgaattttggatataactaatttttttttaaaaaaaacaaagcataatgtaaataacaaaataaaatcagatgtaaatataaaacataataatatattatttaatatataaagtaacatcaatcaatgttattattttcattatttattaaatgattagttttttcactaggacctccaaagaaatcaatatcatagtaggttaggttcaatccataccatcgttaaagttcatctctatctcttttccttttccttttcttgatgtttggtaaaagttgaccaaatgtttgggtatacaacatgtacgcaaccaatgtgctttcatatcatatgtataacaattattctcatggttcttaggaggtttgtcttgtatacacttctcattttcttgttttgtctcagtattactccacttatggtggtgccatgagacttttctttataaaataaaataaaataaaattgaggaattattacaataagaaccatgatatcggggattcattccacaaccacgaccatgtcctcgtccttgtccttgtccacgagtttgagacgatattgcattcactttaaggaatggttcatatctaattggacaagattagttatttctcattgaaaactcattattttgtttagtgataagaagacatgatattaattcgaagtattttgtcaatctatgctctcgatattgctactacaagagcatattcgaagcgtgaaatgtagtaaaagttttttctaacatatcttcttttatgatttttttttctccatacaactttaattgagagttgattttgaacaatgcgaagttatattcactaacagttttaaaatcttgcaaccttaagtgtatctagtcatatcaagattttgggagaatcacagttttctagtggtcatatctttccttcaaattactctatagagtaaaaaagtcatttaccgtaatatactcattttttaaaccttcgtgaagacaatgatgaaggaaaatcagtatttttgcataatcctacagggatgcttaatttccttctttgattgtaattccaatattcattgcattaagatgtatttcagcatcaatgatccaaaatagatagttctttcatgaaatatcaagtcccacaaactcaagttttgtgatatttgacattatcaaataacttcatatatataacaaaacaatattattagaatcaattacaataaattgataacattgatataactttttattataatcaaaaccaaataatttgcttataactttaacaatatataacacaaattaaataaacaaaatcaataataatataaatatgtaaaatcttatcctatataaacaatctcaagtttaagataaagaagtatatttagagtaattcatgttgataatgtgttatacaataaggataaatgcaatacaaataaaagtaaagataaatatatattactttgataataatatataatggggatgaagaaatcaaagaagataattaaacaagttgagagaataaaagacaaaggcaatgaaggaatgagagaatgagaaaatgagagaaaactttcttttccattccaaaagaccatttataggcttacaaaatgctttcacttaatactcacctttaaaatgagtaaagaaaagtgtttattcctttagtaatagaggtggtggaagttcacctaacatttccaatgcttaccttactttatatacaactattttctatttgtatatggctgcatgtagacacttctagtctccatcattctatgataactatgggaaataggtcatgtgcattcaatgtagactcttactagtctccattaaaggcttattactttaaaaaataaatttttttaaaaacatatttactataattttgaaaaatttatgaatatatatgtatttaaaaatggaaaattgttgggttttcataaatgggtcccactaaaatttaatccaatttaattttgtcctcacatgcatcacatcacaacatattttttcggttggactccaaatggctttcatttaaagaaatatgaaaaagtaaaaaaaaagaaggaaaattccttgagtagagtacttgacttggtgtttagtcttataaatacattatatttataaaatatcttaaaaattaatactaactccaaataattgaaataactcaaattaatctatatttgcacaactttctaataaaattatcttaaattcattttagtccatttacaaaaatattaaatttgtcattaatattattaattttattgaaatgttttatcacattttaaataaataattaaatgatttaaaatatttaaataagttccatataaaatattttatttgaaaattcattttaaaagttagtttaaaaaatgtatgaaattttttccttttgactctatttacattattaaaaattttgcttataatttacattatcattatttaaaactaatatttatattgcatgtccaatttagctttataaaacaccggattttaaaatggagcatattacataataacaaaaatagacaattaaaaaaaataaaaaatgaaaacacacaaatttatatataaaatattaaacaagaaaaattatgaacaaaaagaaaaaaaatccattatatcaaaaaattaatacaaaaaaaaagttgcgagtgattacagtaaaaatataatcatcataatcttaaaattatataccaaattataattcaaataattataatagaaacataatcatcataattttaaaattatacattatcacacatatatattatgaaatttacggatccgagaaaataaaattcaagttatcaaactctttgggaggtaaaattaaaatgaattataaattctccatgatttaatagacctaaatgaaagttagtattattattattttttttaatagatggaaatattgttcttcgtcttcttctataaattagattttgtttttttagtattattttactaaatgttgaatgaaaggaaggcgatttttcctttccttattcatatatccttttgtcacccaccgacatgatgacgtcattggtgatgaaaaaggttcattaacaattaattttgtgtacgatgactgacatattggatgatctcatcactggcagatgaatagatacctaattttaatcatttaaacataaatatattatttaaaattatctaataatgagaaaatttaactaaaaatttagataaaaatctaaaaataaaaataataaaacaagattatataaaaaatttataatctacaaaaaaatatttttctaaatataaatattatttcaaacttaaattgaaaattaaagcattctatgttttttttttttctgaagctgaaagaaggctacacgcaactgatgttattaggaggctcaaaatctggccaaaaaacttggagggtcccaccttgattatggaggcacgggcacccacgcccgtggatcctctctctataaatgggtttcaaccgtaagcggatgctttcattgtttcatagattacttaatcgattattttctacgaaaagaaaagaaacagagaaaccaaacactg

SEQ ID NO: 10822 - DNA, 6748 bp, Vitis vinifera
  Intron number 2 from transcript GSVIVT01032217001 (locus G SVIVG01032217001) derived from phytozome v7.0 (chr-ID chr1 1; pos 13093571 to 13100318 reverse strand)
gtcattagttagctcattgtagtttgatattcatcgtaaaaatttaaatcttattttggattccatttcactaaaagagatgttatgcatgggacttatattctcaattgaatttcctttggtggtacaagtttatcctatctctttgatgaacttctaaattttaattcaaattctacttcataacaataataaaaaaacaactaaaaataaaaataaaaataaaaggcaaaatttttgcacaaaacaagtgtttgagccacgagtaacaccaggtatgttaattggtctcaacttgagttgtgctcctatctctcttgaaacctcccaaaaggaaaattaccccacaagaattttgataaataacttgttttagaacctttttcatatcctaactcttaagattgaatagttgagtttaaaaacacatacttggtttattcttttagattttaacaccaacaaatattacaattagggttgaaaataaggatataactttaaggggttggttgggttacaacccaagcccaaccaaggtgaacttactcctaaggccacaaatgactctttagttttaataactttgcaacaaaaacaaataaaaaaaattggattttcattcaactcaattatctttatttttaatctttgtactaacttttatatagtattatctttgaaatacaatacaattatacaattccatggtaattaagtttcctagttagaagggaccaaacaataaaattatgtaagggaaattaacaagctaggggttgcatggatcatatcgtattggctttgtataatgtagggttaagaagcagtaaatatttactcaatcaaaatataatccttttaataattatgttataatgatctaacatgaatacaacttgtttgttatatggataatacgacatgatctgtttaacctttttaataaatgagtaaagttgatttatataagaattggcatggataatccattaacatgattcaaacctattaaacctgttaatatatatgattctaaccaacttaacttgttaacatgattgttatctattgagcctatttgaaaatttaaatttataaatatattattttaaattacattttagttgcttttaattgtttaagttttaatttttaatattaattaatttaattatataaccttaattataatataaaaaataaattaaaagttttattccacacttgtttaatgtttttataaaatatttttaatctttataatgaaatatataaatttaaatcttatcatttttaataatgaaaaatataaaattaataatttatacgaattaaatttgttaaaaataggcagaatcataaataagtgattttgacacaatcaaataataggttaatatgacatgaatatataaatgagttaaaccgattaaataatcaaacccaaacacaagccattgcttaaaccaattatgcgggttaagatgactatgatacaaataagattataaatgaggtgaatctactaaatggaaaggttcattgtataaaggaactaaaatatgattctacttatatttagagcatgtaaggttaaagagagtcacgagataaaggaaattaatcataagtgtgattccacttacatatggtgtccatgaatgtcttcccaactctaagggacacccagaatctaaataactacaaattaagttcaacaaagtcaaataaaatcttgagtgatattgatcaaattttcattctttttgtttttgttattaaataagcaaatcacaaggtttgttaggatttaacctcacatttaaggcgactacagtgtattgcatgacataccaaagggtttaactaagtcaactcaactgcaatcacatgactccctttgtctttttgtttttttgttttaaatcaaattgtgtgatccactctaactttacgaacaagtaatctaaaatgcaacttgtgaaggttcatgtcgattacaatgaaaacaaaattttcaatcatatcaaatcttcacctaccatagaaaatttggtaaaaaaatatatatataaagaaaatgttggagtcgagtgggtgcctaagtgagagtaacccaacccgattcagtcaaataagagactggaggagcaatttcttgaaattgttagaaattgcataaaaaccattccattaaaaaaaataaaaatggaaagatcaccctctcttacttctctatggaaagaaagactaatagaagtaggaaaaaaaaattctttaaaaaatttgaaagactttttgtactatgaaacatagtgtttcttgattttagtgcagttccatttataacttgagacgaataattgaacgatgaaataactattttttaaatcttaaatatttaaaagatgtaattcgaaattttcctacagaaaaaataataaaaaatcgaaggaaaaataagaaaatttaatttagaagttattgattatttttatatatttttaaaatttattttatttaaattttcttttaaattaaaattaaataatataaaaatccatatttttaaaactaattttaattatattttattttatttctattttttataaaacacccaacatgtgaatattacattaatcaattgtgggatacaagtgattgccacctatcattcccaattttaataaatacggagttaatcaattaaaatcattggcttttatagttgataatatcataaggttgcgacctatatcacgtgataaaaaaagttaaattgctccatcacatcatatataactcttatcatagagttggagggttaagagtctataattgatattacgtatgattcttctctttcacaggaaacaagccctttaatcttgtctctatatgggaattctttggtttgaccctaaattaaattgacttaaagttaaggaataatttatgcccataaattaaatttacacatgtgtaaataattttaatttaaatatttattatgaattttataaaaatataggaattataaccattgaaatcataaagtatcttctagatagaattctctctcttcatcacttttaaactatgtttcatatcaactccattgaaaatttcattcatatttcaacttctatcgttttcaatattatttaattttaatttaaatatttattatgaattttataaaaatataggaattataaccattgaaatcataaagtatcttctagatagaattctctctcttcatcactttcaaactatgtttcaatatcaactccattgaaaatttcattcataattcaacttctatcgttttcaatattatttaatttttgttcgattttttaatttaattttaaataaaattgtttaatagtgttaagttctaagttatttgattttataatattttatccctattaaatattaagaagtaaaaaaaatcaatagattatatttagcatttaaaatagtcaaatattttatttttttctatttaataaaaaaatttatgaaataaataataagttaacaaaaagttaaaaaaaaaaaccactttaatatattatttttggaatatgaaataaatgtatgtatctctaatgaatacaaaaataggacacttttcatcccttattttatttttgcattaaactcatctttttaaaaaatgaattcactttttatactcaattcatattttgaaatgaaaaattcacttttcaaattcatatttttaaataagttttttttatcctaaaagtttttatattaaacttgttttcctcaaaagacaagtttacattttttttttcattgaactcacttttactttaaatttgtcttttcaaaagataaattctattcgaactttaaaaaaaaaatttataattattttttatagtacgattttttaaaaaatacactactctggaggaaaatctctttccggtatatataaaccatattatatgaatatttgttattttatagaagaaatgtaaaacatttcatttcaatatatttatggaaaaagatatttagatttagttcattggattatcatttgaaatacattgtcaattcaatttacaatatatatatatatatacaccggcatctattaacccttttcattcaaccttataaaggattgaattacaaagtttgagacaaacttttaaaatttttacttacgaaaaaaataaaatataaatctacacttcttcccttttattttacttatttttattttttatataaaaattaaataatttaaaaatatataaaatgaaggacggaaaagtagttgagggaaggcattatatgaaacttattctatgaaacataataataaatgcactattgagcactccgccattaaaattctaattaaataaaaaaagttattaaaattttaataattttattttatttaattagaattttaatggcggagtgcccgttaatgcatttgttattatgttccatgaaataagttccatataatgcgttcgcataataacaaatgcactaccaagcactctaccattaaattctaattaaataaaaaaattatcaaaaaaatatttttttaataattttttttgatttcccgaatactttataaaattaaacatagtctttagagacctgtagatgtgtgtgtataggtattatcaacaaatatagatgttacttaatttaatggtgaaactccaaagcattaaaggcggatgccagatgatatcaagtgaaagctgtttccgcaggacccccaaataatagggcatgcaaacaaaaaccaaaccggcattctatcacattccatagattaaggctgctttcacaactacccaaactcaattctcatcgatatattataattaaattttaatgatgaaattaagaaccactagttaatattggcggactaacgtatatacactgaaaaaagtggctgagaaatgatcctataagaatgactaaaactttatgtccaaactacttcttttacaattagaaaccacttcatttaatttttcaaattaggctaaggtaatatttttcataatttgtattgaaattaatcttcaaaatatggttttgtctgaatttttttttttttaaaaaaaagggccaacatgacctgcgattaaaagagggtcagatggacaaaaaataaaaaaataaaaaaaattaaacattcaacatttaaaaaaggaggttaaataattctcttaaaaatatttttaaagaaaatatttttactaaaaacatttcaaataaagtattggaaaatgctttcttaattaatatgatttaaagcaatagtggagctagaaattttggtgacgagggcaaaataaaaaatttgtatactatattaaatattaataaattttcatattttagaaatgatagtatcaatatcatttaaataactaaaatatttaaaagtttataaaaactattcaagtaatatttgcaattttttttaaataaaaatattaagaaatttgatcaaaacatttttaataatttttaaaatattttgttacagagcttttagaaaaaatttaaaagtctcactaataatttttttggattttttaaaataattaaatataaattacttgataatggtaaaattttggtaatcaactctaaattaataaatgttttgttaaacctaaaaatctaaacacttataaaaatctttaaattaaactaaaaagagcctaccaataaaaagatatttaataaaatatcaaatatttaaataaaattaaattttatcaaaaattaaatagcatatatttgaataattgtgtacttacgtattcatgaattaaaaattatttaattaaacctaaaagtccaaatattttaaaaaatctcaaaattaaacaaaacatagctcacaataaaaaaaatatttaataaaatatcaaatacaaaattaaaagaaaattattttttagatttattttatgtatattaggatttaaataaatttaattttaatattaaataaaatttaaaatacagacaaacaaatattttataaaatctattcaatatttatgcttatctattttttatttttatttttcacattcaaaagtaattttttaaagggttaaacttgtatttttatttttaaaattttctaaaattcctaaataaacacacaaaaaaatatatatatatatttaaaatttgaggggggcatgctgagccctatggtggctccgtccagttgcacatatctccgacttttgatccctcttgccaacaacacaaaaatatatatatttaaagtttgagtaaacttgcactcaaaactagtcttttcccttatatataagggaaggccctctccctccagttgcacatatctccaacttttgatccctcttgccaacaacaatatttccttcttaacatttaggctctacaggtatccaaatatgtacatgtatttgcctttttaatcatttcatagtccaattcttttccatcactttttctgcgattggaaacctttcacttccgcctcctttaccctcactacattgagcttcttgcaccacaaccaaccctatcaccatgcatgtcttggcatgatcttttttcttctgtcttcaaattcgtttctcttttgaaaattattctgcatccacttatacaacttatgactttgtttaaatttccataggga

SEQ ID NO: 10823 - DNA, 8358 bp, Vitis vinifera
  Intron number 11 from transcript GSVIVT01009695001 (locus GSVIVG01009695001) derived from phytozome v7.0 (chr-ID chr 18; pos 10530630 to 10538987 reverse strand)
ggccctattgatcaatccaagcctgattctaagcagtatgcctcctttctttgaacttccatatttatattatgactgcttgatggtttgagttgctttataactttactttgttatatcatagggttgcacctctaggggtgtaacaatgtttgacaataactattcaagggcattggggaggtgacaaattgttagttttagaattagaaagcccattaaaacattggtactcaccactgctaataaacctcattaagattcattattaggtattgcagtccttcccctctgaattgactattgaccacaatggtagttcttgtcaattagtgatgtaggacaaccctatgatggttgtctctgctcaaataggtgggttagggtttttatttttacggtgtaaggagaggaacaaggaataaagtttatggtagagaaaaataaaataaaaaaaatagatcggaagaagatacaatgaagaaaagatagaaaccttagagtctcactaaggtcttgtaggagtcttacctagaagaaaatcaatggggtctcacaattgaggattgtaatacttacaataaaaaaacataatattattaatatcaatcaattcattcctttgatttacttcgattagcattatttataggtttctttaagaaatctagagtctgaggattctaataacatattatgactctaattctaatcatcttataacctaagtaattaatcctaatttaattccaataaatgttaatcatactttaattccaactaatactaattctaatttaattccaactaatattaatcctacttaaagtttgtttatatctttccttttctttcttgaataaactttaaaagacttccccccatcaattaggctcttgtttgtacttcttttattctaggttattttggtgatttagaaatcaggaatatcttttcagtattcaaataagatatcttaaggctcccccaaggagcctaaacgaaagactccaaataaaagttagaaagtctatcgaaaaaatcatgtgggatgcaaatttgataagttctataactatagaatacctgtcacatgccatgctgggtttccttctataaacatatagtggaaaatcgttataaaatttataatactaattatttataaagaggcagataaatgatacttgttcatgttggaacacatgctatagacattaggacttaagaccatttctaaggtctgaatcagtaatgaccagagatgtttccactaaccatgaaattacttcagtacggaattacatgaaattaaaattcatttcaattcaattagattttaaaggatggttttggtagatgatcaaaggacacttatgacttgtgcctaaactttagttaccaaatggtttgtacacttgcaaatccagtccgttagtaattttctctttatggtttattcacttgagttgcattcccatgatgtgtttctatgaactttgcttatttaaatttgaaaagaaatctgtgtgcctatttttcatacttgacccttatccagattttcttcaatatttcttcagtaagcctaaattaagttagtccagtaagaaagaagtctcacaagtgtagaggattaagattatggccaaagataagaaaataataacaaaaaagtggtgaaataattaggaaagggttcaggcattttatacttgagtttgcaaaatgaaagatgctaaaatagcatgctgttctgataaaaaaataataaaatgctgctgattcatggcctaaaatcagtcattgttttttttttttttttttgataggaaaaagagcagaagatatattaaagagctacaaaaaggctacactaggtacataggaagtatacatgtgtgcaccaacgaaaaaacacaaaaaccctcttcttactggcaacctaactaatcgataaaatcaatcatagagaaggactcttgccctggatcttctttggtccattctaaaaagttacaaacaaaagagaattttagctctttatttgaaagctcaacattatgaaaagcccttctctacctctctttccaaataatccaaaacaaacaaagaggaacaatattccatgccttctttttcctcttcctaacagatcggctatgccaactaagaagcgttgcttggactaaggtatgcaacaccctaaccactccaaaaaggagaagaccaattgccataacaaactagccttagaacaataagaaggatgtgatcccaagattcctcctcgcctttgcaaagaaagcaagtgttcaccaaagtccaacctctcttcttcaagttgtccatagttaaaatccccttccaagttgcttctcaaacacaaaaactcacttttattgaggcccaagaattccaaataatccttgtagggaaagaatctgaacctctctgaaccatcccatcatagaaagatttaactaaaaaccagcctcccttagtagccatccacactgccttgtcatccacctccctactcattgatttactatgtaaacacaaaaggagtgcttcaacacaacctaactcccaatcttggaaattctttacaaaataggggttctaacaccccctaaaattagtatgctcccaaacatcacatacccaggctccctttgaagtgactatagtgaacaaagaggggaaagaggtactcaaacgggtgtccccacaccaaatgtcctcacacctaatatccttccaaaatcttacccttcttccattgcctaaatcatagaaagatttaactaaaaatcagcctcccttagtagccattcacactaccttgtcatccacctccctactcattgatttactatgtaaacgcaaaaggagtgcttcaacacaatctaactcccaatcttggaaattctttacaaaacaagggttccaacatcccccaaaattagtatgctcccaaacatcacatacccaggcttcctttgaagtgactatagtgaacaaagaggggaaagaggtactcaaacgcgtgtccccacaccaaatgtcctcacacctaatgtccttccaaaatcttaccctttttccattgcctaaatcataggaaatcttgcttttgaaagcatcccatcctttcctaatagccttccacaatcctacgccataaccctccctcacctccaaagaccaccaacccccttcttctactccatacttaccaataattacttttttccaaaagggctccccttttgacatgattccccaactcgattttcctaagagagccttgttcaaaatagaaagattctgaatgcctagccctctcttcgctctttgcttacaaactttgtgccaactcattgaggcttattttcaagagaccaccctccttaaagaaagcccctttgaagtttttccaatctacaacacacccttcttggaataacaaaaatggccatgaaataaatggataggctagacaaggtacttttgataagagttgattgcctcccctttgacaagtattgtctctttcaccttgcgagctttctttacaacttctcttctatcaagtcctatagtgttgtcgatttaaaggtagcacccaaaggaaacccaggatacttggaaggtatgaccccactgtgcgccttggaacccttctaattgagatcaactcacttttttcgtggttgatcttaagcccaaaaattgcttcaaaccacatgaagacccaatgaagatgcaatagttgattcttagaagcctcacaaaaaatcaatgtgtcatccgcaaacaaaagatgaggcacctccactcctttgccacctctaccttccaccttaaatcctgaaataaaagccccttccctagctttctcaaggagaaagctaaatgcctccatagccaaaacaaataaggagacaaaagatctccttgcctcaaccctcttgagctatgaaaaaattcaataggggtcccattgatcaaaactgaaaatttggttgtagaaatacaccaattaatccacccaatccacttatgaccaaaacccatcttatccacaaccactaataagaaattccaatttgcatgattgtaggccttttctatatctaacttttacctaaaatgccattagaaccactctttaacctcaaatcaatggccaattggcaacaaaaactgcattaagaatttgtctccctttaacaaaagcattttgagaagaagagattacctttcccgctactttttaaagtttatttgctagaaccttgaccaatagtttgtacaagctcccaaccaagctaataggcataaaaccctatagatcatatgcaccacccttctttgggattaagaccaaaaaggtagcattcaaacttccttcaaactgccttacgtcaaagaattccttaaagaagtccaacacctcacctttgtcaaagtcctaacaaagatgtcggaaagccatagtaaacctatcaagacctgaagctttatccttgttcaaagctgatagagctgaaaaagacttactcctcagagaaaggatgctccaaactcctcttgagtcaaagactcaagagacaacccattaatgctgagtcttgtttttgataaagggataactaaaagcattggtcacccctgccttaatctcatcctctccagataaccagctcctagccacccttactctacccataaaattcctcctacagtgagcacttgccattctgtgaaagaattttgtatttttatcttcctctttcaaccataactctctagatttttgtctccaataaatctcttcaaacaatgcccacttcttaaaatcctttgtagccaatcttttagccataatctcatccccacaaacggagcttccctctccctggcctcccaaaaacctagccgattgagagcatttgcctttctattagccacacacccaaagaccttcctattccaaatcttcaagtccttcagggctttcaatttggaagctaagacaaaattgttgttgcccttgaaactgtgagaaattattggttaaaagggatgaaatacttcccatatttgtgaatttatctctttccatgtttttgtttgaagaataacccatttttatcataaatgcccttaactatatcaagtacttacgatatatttttttaaaaagggttatttttacaagaaaacaagaagaacatttttgtcaaaataaggctaaaaaaggatgaaaggttagatttccaaaattgggtttccaatgacccttttaatcaaataacccaaactgtaactcatccaccagccataaattaattctttgaagggaatgatcaaagaccagactcaacaagacacactacagaagcccacaaaatgattccctcactcttttgacaccaggaattgatccaacctagacatggattgaccatttaaacctccacacgaagtaaaggctcctcaattcaaagggatatcgatcaacttcaactcctcaatattctctgggaatctctgcatagcttcgaacaacttgaaacaattcctcctttcctttggaagtttgatcatgttgaagcctctctgatgcaccatggatctccccacaagcctctaatgtcccccaattttgcccaaaaatcatctcgttcaccccttagcattggccaaacaaacccatcctaaccgtttttaaaacaacaagaaatagagagagcacctacctccatctttaataactccaacaccctattatcccagaaagccacaatccgtcattgttgcagaagttcctttctttagggcatcagtttcttattggaccatgggcattgtggtacttagggttatcaaaggctatcacttgggtcacttaaactatcaagtgtagcaatggcagctgggtgggttcaagacaggtcccttccaacccaactctctatttgacaataactgttctaaggtacttgcaccccccctctcaacacatacacaaaaaatgggatggagtatgagattttttcatacttgccctacccagccccgaatatataatttaaaaatttttaatattagttacaataaaaataaatatattttataaataagaaataatataattatttataatttattcttatgagatatatattaaaagttgtgttaaaataggggaaaataaaaaaaattaaatatttaaatttaattatatatatataagccagggcgggataaggcaatattagaacttgccccaaacttgatttgggtttaaaaaataaaataaaaattctcaaaccagtcctataaagggcagggtgggtacttgagaaaacctgccccattcaagcgtgtggatagacaaggcttgttaccttttgaaaatgcaggcatgatatatctagggatatgatgccgaggccataatctcaactaaggccttaagcaattggaggctaatgttttttttaagagaagccaatgtgttcctttaaaaaaacatggattcaaagatgataaattgaatttagtgatgactatgataatgatatgtaaagcttctttaggatgtgcactctttcaatgtcttattttgaatctagaaaatgaattctggacaaagtgagcttttagtttgaataactttgatgctttatctaatgtggagtatgacatctgatgttgaggaaaccagtcctataaagggcggggtgggtacttgagaaaacctgccccattcaagtgtgtggataaaacaaggcttgttaccttttgaaaatgcaggcgtgatatatctagggatatgatgcctaggccataacctcaactaaggccttgaagcaattggaggctagcattttttttaagagaaggcaacacgttcctttaaaaaaacatggattcaaagacgataaattgaatttagtgatgactatgataatgatatgtaaagcttctttaggatgtgcactctttcaatgtcttattttgaatctagaaaatgaattctggacaaagtgaacttttagtttgaataactttgatgttttatctgatatgcggagtatgacatttgatgttgttaattattattatcattttgctaatcccaagatacttagggtgtgaaaatttaattgggttgattgttgaattagattataaatagttgtgaccatgatatttgtattgtttaagcattacagcagttagatcaatatatgtatttttatcaccttgtctccctcaggctctatccttctttccttttagaatcttgctttgtttcctttcaagctcttgcctggttgccctcaacgccttgttctcactttttgccacctaaggcaacgtagggtcttataacctggacatcaccttttgcctttaacaatgctgggtactgatcctgagccttgatacagaaactgcaaaaaataggagtgacagtattctgttagtattaagtacctctctcaacaataatccgtttaattaaggctctccatgctcacactttgatcatctgcagcaattatatggagaatgattagaagagtgaaaattgctgctttgttcgctccaccataattacatggttggagtggtttctgaaaccccctccaatatcaacctatccaaagaatctcatagagtactagtcatcaagtatgagtgatgttttgaagaactatatgggtggactgagccactactctgtctgcaactttcaacctttgattcctgcattcgttgaatggtgcagaaatggaacagtgtgtgttatgtttgaaggacagtgccatatgaattgatgtctggataatcctaacttatttggatgtttattgtctctcttttgaccatagtttataggggcatgctaagcatgcctagacccactccctagttatagtaccttgcatgccaaggtgtgcaccttgttgaagaggttcgctccatctacttcacctttcctttttaaacaaatcttattcttgagatttctaactaaacattgaaatttatataatttcattactttttcttgaatttttcttttaaatgtttggaatcttaaactttttattgattgaattagattttggatcatattttataaaattgatatgcatctgagattatgtttaacttcactcaagtgtgtaccttgtgttgcgccttgtgctttacctgtaagagacttttgtatcatgtgtattctaaaacatgcttttgatcagctcttattttcatttttattttctgtgagcagggtggatttccctcatcttgcaagccagggcagtt

SEQ ID NO: 10824 - DNA, 2386 bp, Vitis vinifera
  Intron number 5 from transcript GSVIVT01037664001 (locus G SVIVG01037664001) derived from phytozome v7.0 (chr-ID chr1 9; pos 6673298 to 6675683)
aagggcatcatagttcgctttgtaataggtcacaggtgggtagttaatttgaataaaatattctccctttttgtcattttgtaggatagttaatttgaattcaaatattttctctttttgtcattttatatttgtttcttttacgatttgatggaatttgtagcctttgccttaaaaggattacagaaattctcatttatcttatcactgtcatcttggttatgccattgatgcagtccagacattaatggtagaatacttcttcagtgatatgtttgtaaaataaggagtttgttggcaaaaagaagttgagaaagttactaatgaatattctgatcagaaaaagaaaaagctactaatgagtattaattattaatttaggggcctactaccccaagtggtgcttcatcttttatggctactgaatatagtaacttgtttgccttcaagtgtacgtgatagaagggatgatactcatcatgttagaaacccatttaggaacttttctcctttacctttgatggcattatcaaaatctcctttgaacatgccttttaggtggacatctaaatgtcttttccccgttatggatgctgaaagaaaataaattttttttcctccttagatctttgtttcacatctttatctattgtattatatataaaaacttctgaatgcgtttcagttaattcagaactgatatgtgatggaaacatctatgacctcatttttgtgcttatgaagtcaatgcgctaataattgggcatatctgtgtgttcagctgaaacccattggttgtatgtgtcgtcttgcctcagagcttgccatttcaaattttcaataatcctaaggagtcatattggctattgaaaagcacagtctgtcttatcttataaccttagaatccctagtcagttgacacaaaaagtcggcttggctacctaagagagctaagaatttttatttgtttttttaaaattgttgtatgcatcattgaaaacttttccaaactggacgatcactttcatacaacatgcagagttaatgtggatgtgtttaaattttataatctatagaataaactaaacatggctggctgtgtatgttgaggtatgatcttaggggtctgatggcttttttagtatttctggcagtatgaaatgaaagtgtaatcacaaggtgacctttaggcatggtatggcagatgttttacttgagattttgaattacaattaccttaaaaaagagttgataagtgatcctctaacaaattcagagatgcttagtattgttttgaatactaccactgtatcactataggctggttcattgtgtgagagttctcaatttcaaaaacaagcttacttgttctgtaagccgcaaagaatctagtataagaaagaagcgaaagtttataagggatatatggaaggtgagctgaaaagtctcaactctagttgttacatctaataatataaatggctgcatcctctattaaaatccagttatatgctatgctgtcaattcccatttccatatgatagtgctttcccatttccatatgcagttaaaacaataagctgcatgcacttttgaaaacctagaaaattccttaatagaacaaacctgaaaagaaaaaacactgacatttcaatactaaattaattttgtggatgcttcccaaccctggcaaatatgatagtgctttccttgaaaaaattccaaaatttggttcggaggaacattttcacattttgcatctcatgtcattccaagctttcaaacacgaacagcatgaaaaataaggagtaagttggcatgataccacgacacctgaatttaaagattttctttcttgtattagtgattaactgaaagttgtctgaaaccaaatggagtaagagtgatggagaacagagataatctgttttcttggaggtgctcttacatgtcatatgttgcatgggaatcacccatgtggcaatctaacagcttactcagctttggatggagcaagaaacaagaaacttctaaccacaaattgctggttatacacacacctgaataaacattttcctgtacttctagcaaaatattatcattcctcctggttttgaaactcttcctctctctctctctctctctctctctctctctattctatttttatttttatttttgtagtttgattgggtatcaaagacaatttattaagttgcacagacactaaaattatccatcttctgttgtctacatctgtactgtcttattatattgtttgcaagttatgatgattacagcggaatataatcttcacatttattgtttctgattctctattctgtataaagtgctacatcagggggcattcttgatagagctattg

SEQ ID NO: 10825 - DNA, 2660 bp, Vitis vinifera
  Intron number 2 from transcript GSVIVT01023218001 (locus G SVIVG01023218001) derived from phytozome v7.0 (chr-ID chr1 2; pos 20994386 to 20997045)
attacttgcttaacccaaagaaggtacaagcttttgtttcaccttggaaattattaattctgcaattttatctgcacgataagttacagaaaaccagagtttgtgctactatcaggatggatacctctgcatttaacagttctaaatgtaaaaactaaaggatcaagtagaagtctcactccctcttcactcttctagaagtagttgttccctcttcatgatccctttaatttctttacaaatcattgtacctgcctccctcaaactccctttgtgtgtctctgttccagcgtagtgccttttgagatgtcccctgggattgctggcatcatatgcagtgtgaagtggattgttctctctttctcattagtctggaagttttttttcatttttgtttcattttatatatttacaccatatggtgtttaaacagctttccctagttcagttttggattagtgatacagtatcctgggtattttttatgtttttctttaagattgggaactgtccttccagcttgagaactagtggtttactggcttcatgtttctttccaagatgtgatccctggttattacaggtggagaggtttcacattcgtggagaaactgaaaatggttaagggtatatctgtcaccattttcaaaaacagttcttaaaaaactgttttttaattgttttcaagaataaaattctgttttaaaataacagttttctcaatttattctccttgaagatattttgcccttacgtacaatgctaaaattctcaaaattttagaataccttacgaagaatacctcatattggttgtaaaaaccaatattctttcaaaacaagatcttaaaaactatttttattgaaaaaattctcaaacatgttttttgagttagaaaactgatttctattttaaagaagcacaaattccaatgacctcctctctcttaagtcttcccataaatctactacccaagcatcctttgacaaagccaacacacacaaggagggaaaggaattacacaggagctccttggcacaccatctatccatccaaaacataacctttttaggcttctaccattacacacttcaaaggaagtcctactaaacaaaagatctcatcccttatagcttcctaaataccaaccctataaccatctctaactttgtaagggtgccaacctgcaccttccttcccatactttcccctctataatctgcttccaaaaaacttctccatcaaaaacatatctttagctccacttaccaaggagggcccaatttagaagggagacttttaatgcccaaactcccctttcccttatctaaacaaacaaccgaccaactaaccaaatgagactttttctccaaagtcccacctctgaaagaaagtcctttgaatcttctctaatctcaatttgacctttctagggattacaaacagagacatgtaatagattgacaaacttgacaaattacttctaatcaacgtaacccccctttagaaatatcttgtcttttttactttgacagtcttctacgaaacctctcttacattacatcccaaactgttgctaatctgaaaggggctcctagaggctgacctaggtaagtagctggaatttccctcaccttgcaacctagctctattgccaaatcttctacatgtacgacccttcccattggaatcaattcacttttatccttgtttattttaaaccttgataatgcttcaaatcacacgagtagccaacttagatgaaccaattgatcttgggaatcctcataaaagaccaaagtattgtctgcaaacaaaagatgagacacctccaccccctttctttaggattaaagtcagaaaagtagcatgtagacttcttttaaacttgccatggataaaaaaaatccctaaaaaaccccataacctcatctttaacaaaatctcaaatatattgccaaaaagctatagaaaaaccattaggaccaggagctttgtcctatttaaattagacaaggcactaaatacttcctcttctgaaaaagaccaagcccactgccttctgaaatcctgtgagagttactccccttcaccttaatcttggccgaaaatttcctcctactctgggcattattattttgttatgcataataggtgatcatacggcattagagtcaaatgtcttcagaaaggctatcgaattgccaaaaatttctataggaccttgatgggtagtgaagcctcggatttagtttgataacctttggacgggaagatgttgtttgggtggatttcaatgcacttgaatttgtcttgaaagtgattgccagagaatgggggtctcaatgaggttatcattttttggtaaagcactaatagtttgttacatagaatagctgcttttctcgtatgtttctgtttcttatttgtccaattaggaattcattcttctccctataaatgggtataggatccatggtgcaattaccgaaatgaatttaaaagattcacatctcaacttttttcctgcattaaccaaacatatattttttcttttgttcctcaaattttccaagaaccaaacataggataaatgttttgaaccgagattgaatgatgtttgtaaatttggtttattgcagtacattcccggaacaaag

SEQ ID NO: 10826 - DNA, 6227 bp, Vitis vinifera
  Intron number 4 from transcript GSVIVT01014022001 (locus G SVIVG01014022001) derived from phytozome v7.0 (chr-ID chr1 6; pos 9084888 to 9091114)
gcaggattccagaactgggacaagctaatattgaggtgagtacaatgcacacataactatggacatatagtttgaaccttcccttcttctttatttttgttttgaatgttctttttattttcatgaagtttttcacttcgaattggaaacctatctctaatcgatacagtctcctccttagtatcaggaatggcctttgcactaacaaatatcaaagatctagaatgtgtaatgcaaattctgttgttaaccattctcttctgtacctagtactctcactggacattttggatttgacatgatcttattaatttattgaaagaatcataaaaagaaaaaacaatttattcaactataaagtaaagtacagaaattcttaatgatttttattttttgtatttgtaattttaaaaatattaagtacagaaattatgatttttatttattatatttgtaattttgagaatattaaattcagtcaagtatagaaaaacccttgaagttcagatgacaccagattatacatcaaataaacacaagatatgatatcaaacaaagttagctgagcgaagctgagcaaaaacaatcaaataaggaaagataacaaggtttttgtatttgtgtataaaaattaccaaaaaattggcatagatacgttgaatcattttcaagatgaacatcctttataattgtgatggcctatagtgaaagccggaagaaatatgaaaaaaaaaaattgaattctaattcccagtgagttttgatttgccagggatagtcattaatgtacatctgtgaatctgtgatagaagaattgatgaggatttaaggatatagttactttaaggctatgtttggaactaagaagccatggaatgctaaaaaattggaagggatatcaatctttgtgatagaaagaaggaagtaagaaaaaatatatatattgcaaagtgtggggagttataaatcttgaaaatctttaatcttgtttaaagaagtgagttatgttggcgaaagagcggagcaaaatgttattgggtttaaacttataatattatttttctctttcattccccttttcctggcagtttatgcgaaacaaaatcactaaatgactacagtaaaagatttccattttccttgagggactgtctttctggttttctatttatcttggaactaatgttttgcttaaaagtttcctcttttcttcttaagcaggtttttttggtcttttgtgccctattttccttctgactttctatttatcttggaaatcatgttttatttcaagtttcttctattcttctttatcaggagttttgcttatgggtgccttatcaatgcatgtgttatatatagtctctctctctctctcccagccagctaatgaaatcctttcatgttaaaaaaaatcacataaatttctctgattatcttgcatgttgcatttgaagcacaaattttgttttgcaccatgtactctttctctctaatgaaatacttgcttgttaaaaaaattcacataaatttctttcattatcatgatgggttcatttgaagaacaaattttgttttttaccacgtagagtgaatcacacctaatagatgattatctaatcttcagaaaggcagaaaatttgacaaggcatttggcgcccctttttttttttttttggataggtaaatttctgccccattggaacttgaacctagaacctcccacaaattctccccaaccctttactacttgtctaggcctcaagggcaggacatttggtgctttttcatagccctttctgtctttaaggttatatttacctcaaacacagaatttgaaaaactcacaagttgtattttagtttatcagttctatcaatttggagtacaagtatagttttggttctcaaagtttagtatatcaaacctaaatgtaataatttttgcttagaatggtgtgaaaactggagggagaaactttaaagggattttgaacaataaagtgcaacttgggacttgttattgtctcctagcatttttatccattctaatgtatttgttaggctatgggctgaggcatgacaggacatctgatatgataatacagtgctattattgatatattcattgcatgcaacaattagatttgagtctgcatcatcgtacacaattaagaacatagtagcctttattcaagacactagttttgtcttttgtcttttttctttttaatttttatgtatgcaattgctttgataattttcttttgcccattccttggtgaatgtgtgtatggtttctaatacattcacattaaattattagttatgttatggtcaagaaaactaactaataagctagcataaaaccatctcaaatgtattaattaaaatttaccaccatttaaggttttgataactaaatttgatcaaattctaggtgtagaacataaaactcaataaggaataaacaaaatgcaaccacatgctatatctctgaagaatataaattctgtggttgtcaatatgtgtagccttctgttgagacgtaggtgtgatagtctatttagggtctatgcttcaaactttgccatggaaaaaattgaagcttagttgaagttgggcttgtaattagtttgacaaactcaactcaatttttaggttatgtttggttggtggggtaggatatgataggatatgtatatcctacgatatcatatcccattagataagaaatgcatatcgtaagatatgatttctaattagatgtgataacaatggacataatatcctgagataacatatacctataaaaaaaaatatatatcttaagataacatatccaatgagatgtgttatgtttcttttatatctaatttgtaaaatgaataaaaaataaaatagaatatatattattttttattgtttaaaataaggattatattgcaatctaatattttccatttaaaaaaaaaatatataaaatttttgttacatgtgacaatattcatgattaatatatttaaactttataaataatttcttttaatgttatgttattcaatatataaaaataaaatactatatatatatatatattaaagaatacatatattaatattattttacaatatattttataaatattttttagttcttttctaaccacaaatataattttctaataaaagaaatatatttttcaagataagtaatatgataaaaattaaaatttggataaaaataaataaatttatgatacatagatatgtatatcctacatcttatcttaggattaatatattctatgtaagatggatataaaaaaaatatggatattatatctcatcacttatgttatcttatatttgattgaacataggatagaataagcggtaaaataacttatcttatttcatcaccaaccatgggattgaatatgttattacctctatgtttggttgacaagataggatatgataggatatatatatcctaggatattataacaataacctaaggtaacatatccaatgcaatatgttattttatacttatatttaatttataaaatgaataaaaaatgaaatggaatatatattattttttaatatttaaactaaataatatatttcattccaatattgtctatttaaaaaaaaacgaaaattatcttatgtttaacaatattcatgattaaaatacttaaaatttataaataaaaaatttgtatattatgttatttaatatataaaaatattttatatataatacatatattgatattattttaaaatattttttatttcttattttttaatcacaaatttaattttattataaaaaaatttattttgaaaaataagtaatataaaaaagcaaaaaattttaaaaataaataaatttataatacatgggatatatataccatatgtcttagtttaagattaacatatcctacgtataagggatataaaaatgagaatagataatatatctcaccatttatcctatttcatgtttggttgaatattagataggataagtgatgagataagatatgttatctcctctcttatcttatctcatactatatctaactaaccaaacatagtcttattctatgtttaattgatatgatatccttggatattaaatccaaagaatatgatatcttaaggtaatatatctaatgagatatgttatgtattgctaatatttagtttatagcatgaataaagaaataaaatagaatataaactatttttcaatgtttaaaataaaaaattatagtgcattataatttttttattttaaaaaaatatgaaatttctcttatgtttaacaatattcataattaaaatgtttaaactttataaatagttttttttatattatagtatttaatatatatatatatatatattaatattattttaccatatattttataaatatttttttaagtttttctttttaaacacaaataaatttaataatacaaatttttattttgcaaaagtaatataaaaaaataaaaaaaattgataaaaagaataaatttatgattcatgggatatgtatatcccatatcttaggttgggattaacatatcctatatagaaggaatatgaaaaaggtagaggatatatcccaccattaatcctatcctatgtttggttaaacatagaatggtataacttatcttatcctatcatcaatcaaacatatacaatattccctttcttattttatcttatactatatccaatcaaccaaatatagccttatgctttaagttgttctctcctcttgatttcagtcatttgaggcatatcctggcttattgttctatgttaatcagggcttatattagtacacatatgcatccaggtatcatcacagtatctctgagacatagcaatttagatgtaaaatgcataaaattggctgggtaaggtcaacatggatagaaagcattaggaaaaacatgtgaaaccttgccatttatcaaattctgacaacaatttttttcttcaaagaagtttcagaaaacattgctggtaagaaattatcctattcttgtcaagttgccattcttttatgccttgaatgtaggcccttccagtagggactgatacagatctgaaatattttagctgccaacaaatcaaattagagataaaaaatatttcagtctcaatattttcagattattagtgtgcatattcaccaaaagatgataaatacagacaaataagtgagcatatatgccccatgttcccatgcacataaatatgttcttcctttttacagttattcagattatgctgtgactcctggccacgtcaaccattggctggagacagcagcggagccagaaaattgatttggttggggtgaggggtcaagatctaggaattcattttagggggcaaaagtagataggactgtgtagcccagtggtaactgcaaaatcttgtgcgatcctttggaatgggatcaaatccccctttatatgtgtgtgtccatatatgcagataagatgcgtttgaatcaatggcattggaatctgatttatttactgtttgttggacccagtttgctagcattaatatatcatggaagccaagctaccatgctggtagcttggttcatagctccagtgtcatttgtctcagatggtatgtcaatatacaccataagtggttctattctagatgctacttttgattggacagcctgcaatggcaaccttctgatgcatgtgcatacgcgtaacatcatttataatttagatgagtatgcttttgtattgtatggattgtcaaatgataattgtagtttgattttctgaaagatgtatggtttctcatgaataggataatctcattattgcatgtgatcttgattaatgcttcttgtcttgaggcccacatcaatgagattgtctgcaacatgatcatcaaaggttgttaggagtgaatatcagaaaagtaggaaaagaaaagaaaaaagaagggaaggaaaaataactcaatcattcatcataaaagttaatttttgtgacgtctcttcatgttggtttccacttctcctattccttttcacatgttacctaaattatgacaaagggcattgagatttctgaatgaaatttcactatgatatcctgttagatcagtgtgttgagattaaatgttgttttcatactatgcagggggtcca

SEQ ID NO: 10827 - DNA, 3009 bp, Vitis vinifera
  Intron number 2 from transcript GSVIVT01017207001 (locus G SVIVG01017207001) derived from phytozome v7.0 (chr-ID chr9 ; pos 5413247 to 5416255)
agggttgtggagaggtccaggtggttgaccagtgtgagagctaggacgatgggtatgtaggtgcccaggtcgcccacagagcccccgagctcggcggagagagtggttttgaggcggagggagctgaaccaccgccggctggggcggaggagaggggtggtggtggtggaaggtgtgtcgttggccatgaaggcagtgcagtgtagcaaaggactgagtttgtgaattcagtttcgcggtaagagagagagatatagagagagagagagagagagaggcccagccaaaatgacctttcggcgagggatgagttaaatggctcataccatccttttcactaaaattatcgtccaaaaattggactatgactggaatacttttcctttttttttttttttttccttctttttgaagaaaatttatatatatatataaattaattgttacgcaaaaacgaaacaaacaaagtaaaaataatttaatttggataaaaatttactccaaaataaattaataaaattccaaaattaaaatcaaaactcaaatttaattttaaaaaaatcaaaattcatttacttcttaaagaaattaaatttttataaattccttttttagcataattatccgttccttttccatgtttctttcatatatattactcaaaaattaaaaatgtaaaataaatatatttcatttatcataactttattttttatatataacttattatttaaaataaaaaattattatagaattaaattttttagtttaaaaataattaaaaaatcatttataaaatatattacaaaataataatattatatgtattgtttaatatattaaaattatttttacatgatgaataacataatataattttttattttataaaatttaaatattttaatcataaatactattaaacataagaaaatttttatatatcatttttaaatagaaaatattgaaattcaatataatttttattttaaaaaaattaatatatattataattattttaaaaattaaatataaacttaacataatatttcttattagatatgttaatttagttagatttaatattcaataatatcatattttattcgaaataacattctaacatatatatatatttcatattataagaaaaattagaaaaatgacaaaaataaaaataaaaataagattaaattctaatatttttctcccatcttggcccatttttttttttttccatcatgtaaaagataaaaataaaaataaaaaagaaattaaaatcttaaataatttttagatatacttcaaacgaggatgtttgtaaaataaagaggggaaaggactaatgcgcctccttatatacggtaaagtgctctcacaatctacattatctccatgttttatttttttatttttttatttttttaaaaagggacacaagttttattttttttatttttttaaaaaggaaatataaaagtctggatagagtttcaatattcattctattattttatttctcctataaaacttgaataatctctgcgggctgaggttgggctttaacacaaagcccaaaaacttgttattccacaaattgcaatgatccaatgggccttgatcagggccactagggccaatttgttgagtgggcccatggggataaaatggttgaaaagagtgtactaaataagtgtaatagaaccacagtagctgtggttttaccacgaaaacatatttcaaataattttttattttcattttaaaagattaattttgatagtttttattttttttaaataaatgataaaactaaaaaaataataatatatactccacaaataaataaaactataaaaaatcagaaaatcctagtatgcaaatattcaattattctttatattaaaaattgaataatttgtcatgcctaagaagctataaaattttattttactaaaaataaaagataagaaatatgtttattgtcatatttaaattctcaaagctaacaaattcttttcctatttccaaaaagggaaataaaaaattcagactcccttttaattttcaataactataacatctaattatttaagagtaaaatagtaattttatattattttatattatctcattaaatgaatcagaaaatcatctacttatgataaattgaaatctcacttgtaagtacgattaatttctattaaaattattttttatttcatttttacctttataaaaaatgtccaacgagaatgagggagaaaaaaaaaaaagagaaattcattctactccccattgccacctccaaacacaccataaaggaatccctcaaactactatgaaaggaactattttattggccaaatttagaaaggataaaatatgccacgtagacataaaggacatgggtaagtccagctaataaaatttattaattttaattgaaaaaaaaaaagataaatgagtgacaaccaaatttgagcaatgtctatattaataaccaaattttgttttccggtaataaatttatgaaatttattattataatttcataaaatataatttcttatttgacttctctttcaattttattttcctcttctaattccaaatattaatttttattcattattattttattgtctatttttttatataaaaaaaatgatattttgaatatttaattacatctgtcaataatttttttgttccatcaatttcccttttcatattgaaaaatactttttcaattattttaaatttttaattaggtattaaaaacagagggtcctgttctagtgtagtgccagtctttggtggggcataaatgatctagccgttacggtatcgaccgtttgtccgtgcggcaaccaaaatttgaaatgtcagactcttcatactttttaaataacttgactgttacattcttcttcaacaaatcaccttctccatttctcgtactcttcttttccacaccagagtgaggtctcaccaacaacaacggcc

SEQ ID NO: 10828 - DNA, 8546 bp, Vitis vinifera
  Intron number 3 from transcript GSVIVT01021383001 (locus G SVIVG01021383001) derived from phytozome v7.0 (chr-ID chr1 0; pos 4733539 to 4742084 reverse strand)
ttcgcaggtaacatcttaaagaatttggtatagctttactgtggtttgtagctgcaaatatattgatttatttgcattgttgatgtttttgatgttttcagttgtcatgtacacttggttcatgatagttaacagtagttgctatgccataggtctccttatactttagattatctgctcaaactgatacaagattttacatgttttcatacttttgaagtgacattatgtgaatttaaatagacaggtacaatttggggcctattttttgatacaatctaacttatgtgacagcttgcattaattctgaaggtggttttgggttctgaacaagattcataaagttcatcagttttgccaacctcctcaataattttttttttgataggtaaaacaaagagtatatataaaaaggaaatgccaaaacaacgttctaaagtatacgagaagtatacatcggctgtgaaaaggctcaaccaagtggggaagggagagaacaaaaaacatcacctatcctcacttagaacctacccaatcgataaagctaaaaagaggcataggacccacatctacagacaccctagaccaaaccaagaccacaaattacaaacaaaagagtttttcatcatttggaccaaaagctccgcattatcaaaagctagcatgttttttccttccaaacagttcaaaagatatataatgggacagttccattattacaaaagaatttacaaagaattcatcccatggaaaaaacggctaggctcctctcattgttggcccaaccctagtggtgtacatactgaatgtcaattgagttgaaggacattcaaaggaatgcctttaaaattgttaatacaagaggcttgaaaagaagtgaagaaatgaactaaatcccatgacatctcgaacgtccttcatttgtcctcaaagatctcaacattcctctctcaccacacaatccaaatcaaagtgagacaaacaatactccaaagggtcttgcctcttgtggaattcccaaaacccatataagagatagtcatcatttcacaataactcctaggctgaaccccacccattccaacttaataacattagtcttgttgaagagcggatcacccaagctatcccaaacatggaaaagactagctgccacaacattcttgctatggcacaacataggagaatgtgatcagtagattcttttttttcttacacatatagcatctgtcccaaagacaaacatctcattttgagttgatctaaagtcaacatctttgcttaccatacaaaaaaacttaactgtcattggagtccatggattccaaacaacattagctagaaatgactgtgatccccttggtgctagaaaggagtggaaagctttaattgagaactttccactctttgaatccaactaggccatcttatcatctgcaccccaactcaccacttgctcttgtagtctccttagaaaggcctccaacatctctaacttctaatcatggaattgtttgaaaaacatggactctaagggcccttctcgccaattcccacacatctgctactcaaatctttttagctgactatggcatatgaggtgggaaaagagtctctcaatgatgagacaacacaccacctatttgtctaaaactttatttttctcctattccccacaataaaatgaattctactttgaagtacctttgatttattcctaattgccttttacaattctacttcgtaaccttccctaaccacaccaaagcactaactcccctttctttcccaaacttccctataataacttgcttccacaaaggctcttcttttctgccaaaattgagaattgtgatgccatgtccttttttttcagatccttgcaaactattgaccacagatccttgcaaactattgacgacggatccttgaaaactattgaccaatttaccaagtgaggttttctaaagagttccaatctcaccacaaccaccaaacaagaagtctctttggatcttctcaggcctttttttttatatgtaaagaaaacgtgtattaaaaagagaaatgccaaaaaagcgtcccaaaatacacaagaaatatacaacaggtgcctaaagcacagccaaagaaacaaagagggacaacaaaaaacaaagcccctcaataagccttatccaatccacaaaatctaaaatacaagaagggcccagagctataaacaaattggatcttacccaaagattataaagaaaattaagtttaattccttggtaagaatgctcttcgtttttgaatgtctaccgttcatttccttccaaattgtccaaaaaaggcacaaagagccacactatttttctttccttctcaagccttaagactaaggaagtagcatttaagcttatgtctcaacaatgtttccaaaaatccatggtgaagccatttgttccaggagctttgtcctctctcaagcttgatagggcaaaaaaaattaaaaattcctcttttgagaaaggaacctcctagctccctgagtctacactctctaaagaagcaaaagacataccattaatgctaggcctttaatcctttgccttcaacgataactgaagaagggcatttgcaaccccctcatttatgtctccatccttgaaaagcaatgaccattttatggacataactagtgtttttatctccttcccttaaccataatagctctcttgatttctaccttaaagagatttcttttggaatggctaatttgtgatactcttccatagccaaccttccagcttcattctcttctatagaaaggattgccttcctccccctagagttccaaaaactaatttgatttgatgcctttgctttcgtttcactaaggcaactagtcaactgtttgtacaactgtgtccagttgtcgtgtacaacaacgcgtacagctatgtacaatcgtttgtatagttgtgatttattctgtatagttgtcaatgattttgtatagttgactatcctaaaatagccttgtgtaccttgtacaatacccttgagatatatgagaatattcattcagtaatttatcaagttggtatcagagcaaaagtagagaatatccattgctacctagtcgacatttcttccttcttttcacctttttcgttaccatataatgtctacaaaaacaaaagtgggttagttctgatagcaaaaaatcatccatggtgaccattcatgagactacctcttgaacaatttctattaagttggatggtgctaattatcgtgtttggtctcaaattttggagatgcatattgctagtagaaagaagaagggatatatctcaggaaggaaggttgcatctgcaagtgatgatccaaacattgatgaatgggggactgaagacactttagtcaagtcttggcttatcaattccaggattgaccggctgatgtcactctttgtgcaatgtggaacgactaaggaggtttaggatgcagttaagaggagctatcttgatgtctttgactcttctgaagtgaattgatcaagaaatcctttcagtcacaccaaggtggtcgccctcttgcagaatactacaacgagttaagctcaatattcatggagcttgattatctaaggcccaatgatatgacgtatatagctgatattgagaaacaaaggaagcatactgctgaggattgggtttatatatttcttgcaggtcttgatcacagtttggatcaagttagtggttgtgttttgtccacctctcctttaccaagtctagaggaagcctattcattagttcgtcgtgaagcgcataggcaggtcaccatgggaacagaagattactttgagtcttctgcaatggctatccataagaataacacacaaccaacaacttttactcctattgactcctcttctcgcttttgcactcattgcaatagcaccagacatataatagatgtttgctggaggaagcatggttatccagagtggtacaagcttaagcaagcagaaatgaaaaacaagaaataagcttaggttgctatttccgatgctactcctacttttgcttctcatgtttctcgattatcttctcaagaaggtaattctgatttaacccttatttctgttgcctctaacaattgggttattgatttaggggtcactgatcatatgactagtcattcttccttattggactctctaatgccctcacttgttaagtttgttcacgtttctaatgggactcctatgccgatttcaggagctaggaatgtctcgttttcccccacactctccatgccctctgtcttatttgcgcctagtttctctaatagttttctttctattagcaagattaccaaaaatcttaattgttctgtaaccttcaattctactcattgtgtgttccaggacaatcttacgaagacgacgattgacattggtgaggagaggggtggtttttactacttgaagggggcaagggagttacaatctgaatctgaccatgtttttcaagtagcaagagagacatgtgatagagaaaagattcttttatagtagtgtcaattaggtcacccatcttttttttatttggaatgtttgtttcgtcagttgtttcgacatttttcaatttctagtttaagctctgaacaatgcatatatactaaaaatcatcgtgtacctttcaaaataagtctcaataaaattccgattccttttacccgtgtttttatagatgtttggggtcctttttttactccttctgcttcgagtcataaatattgtgttttttatttatgactatactagggtgagttgggtatatctgcttaaatctaagaatgatgttctacacgtcattccttaattttccaaaatgattgccacacaatttaatactcaggtcaaggtctttcactttgatgatggtcgtaagtttgtgaatcagtaacttgttgattttttcaaagaaaatggaatcctccaccagagaatgtgtacatacatgccacaagagaacaacataacagagcttaaaaaccgccacattcttgaggtagcccgagctttatgctttaccatgcatgttccaaaacatttttgggttgagactatcatgactattgtctttttcatcaatcgaatgcctgctcatgtcattgattatcaaattccattgcaaatgttatcttggtttcaccctattctttctgctttgaatcattgttctaaagtttttggttgtatatgtgatgctcatatacactctcatcaaagggataagcttgatccctgtgctcttaagtgtatttttcttggttattctaattcctaaaatggctataaatgctttcatcctcctacaggcaaatactatgtctccatgaatgttcaattttgcgaaggggagtcttatttgggaatgtgtctctagttcctctttaaggggagattagtagtaaggaagaggaaaagttatggtcagaagagaagaggatatggatttcaagtcaaggggaggcacctaagtttgaatttgaggaaagaagggatgaaagaccaaccagattatttcaacaagtttatacaaggaagaataaagatgctactatcataccctcgctaggcttcaatactcctattaatgacagtaccatgccattgaatgacacttccgagactaatcttgaggtgcatgtttcttcacttttaactttagacattggtatgttgaatccacaagttggtggtcaaggtaggagatatcctattcgtgatcgtaaagaacctaataggttgggtttctcaaaatcgtcctctaatgttgtctatccgatttatgattttgtctcttatcattgtctatataagactcattgcttttgctctttagttgtcctttatgtctattcctagtcatttttaggaagcccttgaagatcttaagtggaagtttgctatggtagaagaaatgaaggctctctaaaagaactctactcgggagatggtcgagctctctcagggaaagaagacagtgggatataagtgggtgttttcagcaaagtataagtcagataggacacaaagctaaattggttgccaagggataacccagacttacggaattgactacaagagacctttgcctctgtggccaagatgaacaccgttagtcatagtctctcttgcggtcaatttggattggccattaaaacagtttgatgtaaagaatgcctttctacatgatgatctgttagaggaggtgcacatagacccccttccaatgtttacaccaaaagaaggcaaggtatacaaacaaaaaaaagctttgtatggattaaagcaattgctaagggcacggttttaaacaagcgatgacagatcacactctgttctataagagaggtggtgatgatattactttgcttattgtttaagttgatgacctaattgttacaagtagtaactctagaaaaatagagaagcttcggagctatctagccaaggaatttgaaatgaaggacttgagtgcttttaaatacttcttgggtattgaggtgtcttggtccaagcaaggacttttcctctcacaacggaagtatgcattagatctcttggctgaaattggttgctctgcttaagaaacctgtagagactcccattggtaactctgcgtaagaaacctgtagagactcccattggtaactctgtttacgaacctgtaaattggtacagttgtgatgtacaacagtgcgtacagctgtgcacaactgtttgtatagttgtgatttattctgtatagttgtcgattatattgtatagttagttatcctaaaatagtcttgtgtaccctgtataaatacccttgagatatatgataatattcattcagcaatttatcaagtcaactctcccaatcctctgaaacagggaaccaggtcaatctcaaagcaaattgattattcaagccaccgcactaggtatatggtcctttaattagaagcaaatcacgcaaattcagttctctataatcctgaggacctcctcatagctggcgaacacttgggacaattcctcatttctttgggaatctggccatattgaaatcctccccaatgcatcaagaatgccactaccctctaatcttagccaattcttcccaaaagtcctccctctcccctctcagaacaggcctatacaccttggttaaaatccaaacaaaatcatacttgcagttcctgaattggcaggagatggagttggcatccgcctccatctcaattaaatcaaaaccctattatctcagaaaacaactaccccaccttccaccattcctcactctatgaatctctgccaagtgccaacaacttggcttgtgatcaattgcattgacatatgctgcacttttgtttcatgcagggaaaccaaatcagccatttgtgaactagagaatgaacgtaatatacaaagggcaccaaaaggaagagaaaaaaataaaaatgagaagagtccagaccaaaggaaaagaaaacaaataaagaagtctttgaacaattaattcgtgtgctctacaccttgaaacaatctacaattgtgctcttgccaaatggcctgaaacaagcaaattggggtggtcttccaaacctctgtatgtttctttccaacaaaattcccatgtcatctgaataagatctatcttatcagattaggaagcttccatgaaatcagaccagatagaacaacagatgctactagaccctagctttgccataggggataggagtatgattagctgattcttcctcattcttgcgcaagtagcaacagttcactaaaggccatcttgttcttttaagctgattaagagaatcttttcccaaatcgcctcctaagctaagatactcactcattggaatcaataactatgatttgtaccagttattaatcaatttacagtttccagacaatcaatgtcaagagattcactggaatcttgcaaatgctgcctcttgaagcagaaaaatctcaacagcctgcatttttaggattgagttgatattttctgctattctttgttcttttggtaaattttggtttattttgccacctactcaaacgaaaagcaatttattttgaattttactgaaatagaattgaactcataattgtgtgttagtgtgtgaagtcaaatgcccatttgactggatgctgggaatatgaaatgttacagatttgggtttaattttaattatctgtcctatttatttcactagtaggtattacaaaatatgccaaaaagttttattgggactagaattctgtgcatagacttgtctccagctgtattgctgttggatgctacctattgcaagctttggcttataaatgagcttatataaaatcctttttgtaatgttctctcttccttagctgtccttttgcaattcttctttgctattttacatgattaatatttttcttataatttttcctgacagactgtttaaaagagggctgtcctttgtcgggaagg

SEQ ID NO: 10829 - DNA, 6499 bp, Vitis vinifera
  Intron number 9 from transcript GSVIVT01022620001 (locus G SVIVG01022620001) derived from phytozome v7.0 (chr-ID chr2 ; pos 13491301 to 13497799)
gaaaacggtttgagtaagttctttctatttcaagtaatgatttttatgaattaattccaaatggtcattattatggtcttttgaagaatttattctgtatatatcatcctgtaggtctgcttcaaagctcatttaagttatttctttcagaaacttttcatatgttctttctttatagcatacataaaagtggtcatgcccctatacaagtcaaagttacagtgatgggaattactgctcatgaaatttgcctcatcttttactatttttttggaccatttattaattttttgataggattttcttgacaccttatgaaaagcatatattcactgacacaattactcagtttaaagttcataatatgagcattcatacataacatataacatgtcaaaccgaatatatttgctgcgttacatgcattagtcagtttttatgctttatggttaaaatatccaaaacttatgaaaataggttaaataatttatttatggaaatcattaaggtgaaattaattccctcctgtaatgtaatgaaagcaatttgaagattttttttgtcccatagttgcagcaaatgattgtccttcacttttcagcaatataaataagatttattatgtattaatttaaaggtcctcttcaatatattttttgctttaccatgcccttgggcatttaatggttcaaaattatgaattttgattaagaaaagttttgtattttgaatggtgtatgaaaattgagaatagttgggaatcaagaaggatgatttgaaacttatatagaagcttttttgcatatgggattgtttgttgtgttcacactgatgccactatttttagtgctttggtccctaatattagaagatctattcttctcagtgactgtcaaccaataaaccttgtaggaagttcatgcaaagtgatctctagagctttgttaacaataaataaataaatgagcactttgaagtttgttgtgatatgatatgttattcactgagggggcctttgtgaaggtggacaattatgtattcaaatttgtgaggacagtgttggaaattgtgggaagcaggattgtgggaattggttgtgaagttggagcttcttggattatgtgagacagattttgggatccggtgatggaagctaataaggggttcaatgctcttttggggcttcaataggttggttcaatgctatgagctaacagatgtcttaagtagatctacatccatagtggaatagaaaatctctttctgggttcccattaaaaagaaattgccagtctcctatatagcatctatggtttgttaatgatgtgatcattttcgtctgaatgtggaaaatgtaaaagttttgaattttactgccttttgttttgagatagtttctggctttaaaatttaagggcatggccgtgagcactactttgtcatcatctgaagaactatgttatgtggacacttcaaaatacactggtctgatgacacatgattaggatttaagggtgtggatatggttctttctttctcttccacatccatattcccaatgtgaatgtctaactagaggaacagaggaccagaattctagttttctagaagttcctttacccccttgattcattcctttcaattatgggtacttcaaatgaatcaagtacttgggtacaataggccattgtacatggacagttcatttcagctgaaggtaaacatgtagaaaattacattgataatgtgactatgtttccaagtcctaaggtttggatgttagagaagacactatttgacacctaatccacatatttgcatgcaaaagttgcaaggtattggagcaaaattgacagtgtggaataagatcacttttagagatataggagagaggaaggattccatcattaaggatattgccatggtagattctcttgagccatccttaagggctaccaagaaagtagagttggaagaaatgttcttaaggacaacgaggcatcggaggcaaaacactagagtaaagtgggccatagaggtttccagatattttcataggattgctcatggaagaaggaaaaagaagttcattaaatctttagtgagtgagaatggaacaatgttggatgaccaagttagcattttaaaggaaatcttgatattctttgatgaaatatatagcaagccaaatgaagttttgtggagagtagaaggattagagtgggctcttatccacttttttcatttcttttttactattttagcatatcttttgagtagattgatgttcagataggagtttggtatttttttagggcttcttagtgggtataagtaggacaatggtgcttcattaatggtttgctaatgacaccatactcttttcaatagctaatttaaatgattacgaagtcttaactaattttgttggtgttcaatcatgtttcaagtttgaagataaatctagacaatggtatcttgttgggtatcaatgtgagtttagacctagctttgaattggcctctttagaatgtaaggttttgattaacctatatcttttttgggtcttcttttgggggtgaaccttacagccatatctttttgggatttagttttggataggagttgtcaatggttagatggttggaaaaaggcttacttgtctccatgtggaagaataactctggtgcagtcttgcttttcccatgtccccctcttattcttattattattattattattattattaataatattattattattattattttattcttaaacctccaattaaagtgggttatacaattgagagattacagagggactttctatagttaggcattggggaatggaagagagatcattttagggatcaatgtctaagctaaagagagaaggggccttggggattagaagaatgactttgaggaatagtcttttctgggaagtggttgtggaggtttcttaaggaaagcactactttatggtacaagatcattttttgaaatttatgggccacattcttattgatgcaatgctaatgctgttgttatgtgatctcatcaatgtccaatcaaaaaaaaaaaaatgtgatctcatcaatgtccttggaaggtcattgcacaagtgttctctagtttctgtcattttactctatgtttagtggataatggtacaaaatttgcttttgggaggatatttggtggagtgcccttttgcatttggctcccaaacctgtatagagtagtaagggcaagaaattcatgtggttcttcaatttccattctattctcctcttcattatggaattttaattgtctgcacaatcttactaatgatgaaattaatgaactcaataatgttgacttcagtccatgtgtatttattgctcacattgttcgatatgagagtttggtttttgacatcctatggtctattctcggtcagtttattctttagagccctctttgtttccaccaatttaagatcctttcttttggaaaatttcttttagaaatctaaatctctaccaaaagtcaaggcctttgcatggcttgtggcaagtaggaagattaatatccttgatttgctgcagataaggggatctttcaaagcttttaccctagaatggtgtggccatttttttttttttttttttgtattttccattagcattaatattattacataaattgtttggaccataagattgattgggttccacctaagagtggagatgctgacaatttcctaaaggttttggatgtcttcctaaaggaaactcatggtgtattgttagtttcacattaatttggaatatatagctggagaggaatgcgaagatttgaaggatagatgaagaattttggaggcattgtagaattcaatctatttcttctcttccatttggcatcaagtagtacatcatttctgggcactcttttgagtgttatattgatacatgggacctagtatgtagtttgactaggttggctaagaagatgctctctaaatggactcctccagtgggttgtgtcaagttgaattttgatggttgctcattaggaaattcataacaactaggagttggaggaatgcttatggatcatcatgtaacactaaagagaatattttctaaacatattagaataggtctagaaattgtggtggagattctaaccaacctaatgctggagtgagattttgtagtagtccttggttgagtaagaaagaaagaggctaatggaaatttgacgggtggcttcattaaactttttattttgcttgaaggatgggatgcttctattattggattcctcattcatctatatattaacaaagcagggagccaaacttctgatctcttttatacgggatattttggaatatgttagcaaaacattgagtcaaacatttgatctcttttgtaggggatttctacctctctgaatattgattttgtaattgtatccacttttcaatgtgcaaatgacctatggtttctagagtagatagtttttttttttttttttcctgcttttgattagagtagtggatgtttttatagaggaagggtgtaccatacttctttgtacttatttcatagtaatgcagtgttttcttctgattaaaaaaaataaagacacatacttgaaccatgcaagataacctactgtacatgaaacaatttaatgatctattaggactctaattcttttcctagaactcctaagtctttcaaaaagtggtataaaaatataaaatgggaactttacaaaatagaaagtttgaatatataggaactccatataataagaaacttccatgaaagtataacttttcaattctaagtaagactcaaataggaacttgtaaaaaggagtaagttcagaaagtaggaagtttaaagtgtacaagtttctgaaaacaaaaataacaagaagacttgccaagctctaaataagactaaaaaaaccaactactactaattatgactccaaagaattaaaatgtgtaaaattagacgaaggcccttggacaaatcaatttaggatttatttgcttcttttcttcctttgctagtagaccttgaaagtttagtcccatcaccaaggctatatgtttttgtttcgtttttttttggatcttcctttttgttttcttcttctgaggtgactatattacatccaattatcttatcttgatgttggtagatgattgccatttcctgtatttaccaacttttaattcgttccaatagtgaggaagtagtggaaaggatcttttcaattttctgatataggtttatttttctgattcctttccatgatcctcctatgtgggtgctcaagtgtggtggcaccttctccttctctttttccattccttgtgatttgttgatctcccaaccaacagccctgtagagtttatctgcaaactggaagtccctcataaaggttaagattttgcatgggctatagctttgtacagtttgactatattgtatatctattgttacatctcaagaagttacaaaattgtggggtgagctttaggtcccatactcttctcatgtcatagttgttgctgtctgtcacagtgtaggaggttaataactgatcctcaaccatttaacagtctgtttgtgggaatcagtatttgaatggcacttttttctgatattatctaatgctgaaatagacgtctcattttgtttttgaaaaataagctttcatatgaaagggtcataaagattgaaagtgcatcattttattggcagtgtataacaatatgtggtagttggactcttatccttaaaaatatagctgtccttaagatgaagtggcagttcgagtctggtagtatgtccagaactttgaactcctatccaatgttttagctggaatgcatgtaagatttagttcatgcccatctctagaacacccagtatttgggggtcaataaaattaacatggttagtagtactattattttgttcaatttaagaactgtattacatgtagaagaatattttgttatgtttcaaatttgtttttgcttccctggacaggtgttttcttcatcagcaataaaatgtgaaagcgtttagctccttttcgtaaattttgttctttcttttattagtgtgtgaaaaataaatgatatgtcaatggtgattcatacctgatatgccactttctcctatatattttagacacattgcacttagtgccttgactagagtccatgactccatgtcatatgactttccacctccaaaaaatcaagccatagtaaggaagagcctcttagtcacttaaacattactattggaatctaacacctccaaaatgtttgtgattagctaaaacctatgacttcttttgtatgtgtgttttgtttttttaattattaacacaaataaaaaaaaacacacttacctttttcatgtcattaacttttcatgttgtgagtaggtgggattgcagtttccaag

SEQ ID NO: 10830 - DNA, 21047 bp, Vitis vinifera
  Intron number 4 from transcript GSVIVT01036006001 (locus G SVIVG01036006001) derived from phytozome v7.0 (chr-ID chr4 ; pos 7040610 to 7061656)
ttggttacgtcggtgttgtgaatcgcagtcaagaggtaaactattaaaacttagacagttttcatatgctatcattatttgtaacttctatcttgcatgtaggcttctcaaagtcttcttagttcttctctgtttattctcaaaattttatttaaaatatccaaattccaaacaattttgatgcaagaaaaaaaaaaaaaaaaggagaagaggtttcctgtctcctgcaaatttgtcactctgctcattacaatactattttaaactggttcctttttatattgccctatggttgtttattggaaggatgaggtgtaacctgttggtattttagtcctaggaaatgagctgatttagtgaggcagtccataataagccttacttcgtttttcttgcttctagttcttggtaaccttatcacaaagtccatagggatgtgattccatttgcactctggtataggtaatggttgcaacaactctgcaggtttctgatgctcaactttcatctattaacaaatttgacaattggctacatattaagcaatgtctctcttcattcctctccaccaaaattgcctctttatatcttagtacatttctggagagtcttggagagtagaaggcttagattggccccctatctcagaagagagtgcttctaggttggattccccttttactgaagaagagatttctaaagccatttttcagttagataaggataaggcgccggggcttgatggatttaccattgtagtgtttcaagattgttgggatgtgatcaaagaggacttagtgagggtgttcgcacaatttcacagaagcgggattattaatcaaagcaccaatgccacctttattgttcttttgcccaaaaaaagccagacaaaaaaagttttagactttagacctattagcttgatcacttttttttacaagataatagccaaagttctatcagggcgattaagaggtgtactacatgaaactatccattctactcaaggcgcttttgttcaagggagacaaattttggacacaattcttatagccaatgagatagtggatgagaaaagacgattaggggaggaaggagttgtcttcaaaattgactttgaaaaggcttatgaccatgtgaattgggattttttagatcatgtgttggagaagaaggggtttagttttagatggaggacctggatgagaggttgtttgtcttcggtctcttatgcaattttagtgaatggaaacgcttaagggtgggccaaggcaactagaggattaagacaaggtgatcctatatcccattttctgtttactatcaccgccaatgtgttgagtaggatgttgttgagagcagaggaaagaagtttgttggagggcttcagtgtaggtaggaatagaacaagggtgtcccatctgcaattcgcagatgataccgtcatcttttctagcacttgtgcggaagaactgcaaactcttaagaatttattgttagtgtttgggcaaatttctgggcttaaggtcaatcttgacaagagtaacctttttggcatcaatcttgataaggatcatctctctaggttggtcttgatgcttgattgcagggcttctgattgacctatactctacttgggtcttcttttgggagggaatctaaaggcttttgggatctggtgattgagagaatctcgcggagattagatgggtggcaaaagacttatttatcttttggaggtaggataactcttatccacttatgcctgtcccacattcctagctactttatttccttgttcaagattcccgcttcagtggctgcaaaaattgagagattgcaaagggatttcctttggtcaggggttgggaaaggtaaaagagatcatcttattagttgggatgtagtgtgtaaattgaaggcaaaagggggattggggtttgggaagatttctctaaggaatctcgctcttttagggaaatggttgtggaggtatcctagggagagtttagctatgtggcatcaggtcattctaagcatttatgggacacattctaatggttgggatgccaactctatagttagatggtcacatcgttgtccttggaaggttattgcacaagtcttttaggatttttccaagtatactcgatttgtggtaggagatggggaaaaaattctcttatgggaagacttgtggtggggggaccaacctttgggattccaatatccaagactatttagagtagtcactgataaaaatattcccatattttcaattctcggttctgctcgccccttctcttggaactttaatttctgtcgtaacctttccgattctgagatagaagatttagaaagcctcatgtgttcacttgattgttttcatttatccctattggtttgagatgcaagatcttggtctttatcttcttcagggttatttacaatcaagtctttttttctagccttgacccacctttccaatttatctctagttttccctactaattttgtatggaattctcaagtctcttttaaagtcaagtcctttgtctgattagtggcacacaagaaggtaaatactaatgacttgctacaattaagaagaccctacaaagctcttagtcttgacatttgtaagttgtgtatgaagcatggagaatcaacatatcatattttcttacattgttctttgacaatggggttgtggcataaattatttcagttagccaaaatggattaggttccctcgagaagcatttccgacatgatgtccatcaaactgcgtgcattgctttaatttgggttgtgtggcgggaaagaaatgattggatttttgaggataaagctaggaattcagagaatctatgggattccattcacttccttgcttctctttaggctttttgctccatggattttaagggcatcccccttaatatgttacaactagattgactagcaatgtgtagctccaatgggatggtctagctaagagagtttgtttgttgtttttaccttttagcttcttgtttttgtattcttattgtttagttttctttagtgggaggattcctcatccttcttttgtacttcttaattctatcaatatatttctttgttgtttcctataaaaaaaaatatcttaatacattttggtactcctagggtgaattgtatacttttctctatgagcatttgctatactttcatttctcaattctacatcccttggaacacacaatcttcctttaaatcttacactcccacatgcatgcatgaccaatattgtctacctcaccttccaccaattgagctctaaccttctctaaaatctcatcatgaacttgggcctccgctactttttggataatccttgatctagccgacatactatacaagcatgagccttgtccttcccaaccaagacacatctcaaaatcctcaataactgcatatatctctaactctctcaaccacaagctagacaattgtccatagttctttctactaagggcatctgccacgacatttatctttctaagatggtagtgaagaacaaaatcataatcttctaatgtctccatccatctatgttgtttagagttcaaatccttttgagtaaaaatgtattttaaactcttatgatcagagtacacctcaaatttctctccatataaatagtgtctctaagccctaaggggaaaaaccattactgcaagctctaaatcatgtgttggatagttttgttcatagggcttaaattgccttgaggcataaactatcaccttgccttgttgcattaatatacatcttgagccaactgtagaagcatcacaataaatcgtaaataacactccactaataggggtgattaatattggagcagtggttacttaccaaaaaaataaaataaaatattggagcagtggttaatttttgcttaactcctaaaaaacattttcacactactaattccattcaaagtttaaccatttttttggtcaaccgggtaattggtattgcaattctagagaagttatccacaaacttctcataatatccaaaaaccagtcctaaaaaactcctaacttcaaatacattagttggcctctatcgatcctgcacaactcccaccttggaatgatctattgttatccctgctttagaaattacatggcttagaaaatttactttagtaagccaaaactcacttttgtccagcttcccatacactcaagcttccaatagtggtcactaaatgttgcttatgctcattcaaactcctcaagtaaattaggatgccatccacaaagataatctcaaattgatccaagtaagcacaaaatattctatcattaaatccataaaagtaatggggacattcattagttgaaaaggcatgactaggaattcataattgcccatatcttgttctaaatgttgttttatagacatcttcctctctaaccctcaatggatactacatagttctcaaatcaatcttactaaaacactttgctcctttcaaatgatcaaacaaatcatctattcttggaagaggatgcttattcttcacaacaactctattcaacttcttatggtcaatacgtaaccttaaggcgccatctttctttttcacaaacaacactagggcttcccatggtgatgtacttggccgaataaaacccttattcaacaattcctttaaccaagttttcaattccttcaactcaagaggggccatcctatagggtgccattaaaataggatttgttcctgaatataccttgataaaaaaatcaaactctctatgtggtgctaaacccagtggtttagttggagatacatcatgaaactttctcaccattggaatttccataaggtccttctgggctttttccttactatggagacatgtgtggacccgcatttttcacgtgcgtccccactcgattggcgagactcgctttttatttatgaaaaattaattttagaaaaagttggagtcgccacttattttatttttattttaaagggaaaaaaaataaaacaagaaagaaaaaccctaaaatgtgactccataatttttggaaaaagcatgtttttggaaaacccgagtctaggtccggggatcaggttacttattgggaaggtacccctaggaggtaacacccctctaagccctaaagaggtctctactgactaaattgagggaagtgtggcaattaattgattaattgaggatacctgggttgactaaggtgattacaaaaaaatggcatgtctaacaagaaaaatctgattataagatagagtcgaagtgcgtacctaaacggcttctcaagcgccatcataaaacataaaagttaatgtagaaatatatcacacaacatgtgttttatccaagataataagacaagcatcaaatatacatcaaggcaatcaagcatgtcatcgagcaagggcatggtacacaaagatatggatattcatggaatttcaaaagtggggagatggagagcgtacctggatagcaagctaatactccccatgggaaacaaagttagctcaataactaattcaaaataatctcatatataacacaaagaggaagcacaatcaatcaattatcaaacagacactatcgaagagaatatcatgaatgtcgggcccccctccaatgccctaattaattttgcatgaatttattctaagaattccattatttggaatcatgaagtttgttcatgcttgttgaaaatcgagaaaaccatgaaaatatttgaaaataaaagaaaatagtgaaaatgcatgcctgaaggaaagtggcagcaaaagattattgaaatctaaattttatgcctagaaatccttaaggatttttaaagaaaactagagttatttttttaaggaaaacggttttgaaattcatatttaagatgtgtaagatcacaaaaaagaaaagaaaaagaagaagcattaggaggagtatggtgcgtggcaaggtggccactatgtgagtgaggtttggaggtgcacttgagaccgcattgctgaaacagattcgtgagaagacctctgcaaaccactggtgttattctctctggattttctccttctttcttcttgtgttttttttctttgtcccatattggtctatgagctgtgcttgatattctagggccccctccataccctgggctcttccatttgatgagtccgagtcatcttcagattggataaccacgatcttcgtcatatatcctaagccccttggtttgctagttggttgagtttccttgaatcccaaatacttcaatattcctccctgagtgcaatttcttgatcgtttccttgattagtactgattcttggactgatctaaccagggatccttggagaattcacagattgaaggagcagaaaaaaataaaaaaaaaatgaagagaaaatccatcatgaagtccttgtcgtttgcaattgcaccaacattttctaaagcaaagcccataggcgactaatcttttcccagaacacagtaagcattatcccatgactagactgaactagttcctttcattattttggagtagccaaatccattgagaacaatcaagtccccactttgaaatgatagtcagcacttagcagcatatgaataaacgttgagaggtttttcaatatttcacaaaaattctcttctcgcattttattagtttcctgtgattcaagctggacatcgacaacctactcaaagtgaatatcaggattttctaggtatgacagtccttgttcttctatttggatctcattttgaagatcacctccaacaaagtttgttcttattttgaggcaatagtatcagcagcttcatcgttccctctatcggatttaccaacctgtttgatatcaaatacaccctactctttccaagctgtctgttttcataatggatttatgaacctttgccctctgaaaaattattgccctcaattgtctttccatttaaagctatgacagtgcaatgaacttccactccagaaggtttaatttgaacaatggtttttttgctgcacctagaattgtagctgaaccctcatatcaaacatcatgagttcaatatgataacgagtccaatccattcaatctgactccccgataaatttttgaactatcatcttcatccttgtaaaaattatttccagcatctgagccatctgtgttgccaccttcatgctcagaaccatcatcatcatcttctggacccctgtgatcgttgcgagggtggttgaaagtgacgagcaggttccaggctccctttggaaattaaatactctttactagtttcaatctgattgtagagttgatcagctacagcagtgaaacatacttccctaatttctccaccatcaactcaccagcagctacatcaagtgttaaaacatcactgctgcctgttcccaacactaataacgaacattgaagcttcccttttctttgtcttgctgtccagaaacaaccatttttaaacaagtataatcgactgaaaggtgccctctttcaggtttgttgtataaattagttgcgtctgttgatatgatgtctgcaaattcaatctgaatctgaccattcaaaataccccaaatcttaatttgtgcatctccataactgatgccaaaagaggagccaaaggttgttaacaaatcttgagaagcagagggttgatttcactgaaagtgatctacggtcccataaaaatttctggttctggtatttcaaataatgaattcctctctgaagaactggactgagcatgctgcacttcgatcccttgattgatccatcttacgaagaagttcaagcacattctgacttgattgagcagtcttgttttagatatagatatcaactgatctgggaaaaatcctcttttcatttcactagaatctttaagaatatgactaggaaaatttagatgatccagaaaatccttgttcatgaatttttaatctcagggaaacctgcgaggacatggcctatatgaaatttccgtctttcttggaatactcaatagagagatgctaaaaaaaaatgaacccaaaccagagaaaacaccaccaccattagtattgagaacgaggaagccttggagacttgtagaattgttggccggttttacgtagtactaatgctggatgatgatgagtaaagccttttgcaaaccgggatattgtgtagagcaataggcattacttcagaaaaacaggaaaaattaagtcacgacagtagttcgaatagaacttcaatccctgatttttccacaaatagtcgacaaatttcagaattttccaaagttctattaaccagtgtggtcacatgaaagatggagagttgaacgagctgcttattattgatgtctactacaactgaacccatcaaagcaactacagcaaaggccatccttttctttgtcttcaagatccatttccattgcagtagcctcattaagtcttcttggtgactctaaattatcatcccattgttcccaaggaatgtctccagcctatccctaaactgcaataactgtaatcttaccttgcggaaatcccaaatttggccattcccatgatcatctcattcagaaaaaacctataccgaccagttagatggagcccataggcaaatagagccttcacagcatcttccattggtccaattttattaacacattcagacaatacaggatcctgaatgagtgaagacttagcacctctggaagcttcagcaccatttctcttagtaaatcaacccattcattctgaacagaaatttccttgcccattgcatctgccatatgcttcaaatagaatttgtttccctttttcatcttcatggggttgccattaacaaaggcttgattataagagctagtgccactattggtcaaaccctgattctagatggtgctcatactggtcaaagcctgactgtaagtgctggtaccaccattagtcaaggcctgactgtaggaaattctgctgccatcattttttttttcaaatatattaagctcaatggaattgaaatgcctctctggttcagtcagctgatttgtcagatcctggtttatttttaatatatttcgtcgcttcagttcagaagtcaacttctaccgactctagaggtacaaatattctgctatcagtggcttgcctatcaattccttgcatgtatgctttccttgccaaaaacttgcactgtctcatcaagcagatgatgaatctccccatgctattgatcaattatggtccaccacgttcagcagtttttcagaaagggtgcctgtgtctatgccttgctctaattctataactgaacttctttggaatatggtgcaggcatccctgaaaccacttggcctttttatacattgcaaaagtgtatccagttctttagtcatctctttaccgttgccgaattgtctcggtaaatgcgattcagagttcagttgtccttgtaaggggagtgttctgtaattttccttgagaggataagacttataattaggagacttggctggaaactgcattgacaattgtgtacctagagtcgaagatattggttcgacattctctaccaccattgaacctctctgtcccctgctctgactgacggaacttctcttggacgtgctgattcatgcgacaagttgcctgatacgcaggcctgccttgtgattgagaatgtcattgaccatgctgcattagttctccttcgtaatcctttggaactaagttcaggattctgtatgttgtgcttcttaatggaacttgaagatacctcatcttcatcttgaaatacagcatcaggtaaaatatttatttactaatataggccaaacactgtggagtcaggtctatgcccactttgaccatatccggaaacaattcgattgcaatctctggacgtcctatatgcaaataaccagatattaataaattccaagtgaccacgtccgatggggcatttcatcgaatagccgttgagcacttgaagccacaccatatttaccatacatatccataggaacacggcaaatagacatctgaatcaaaacccgccttgattatggtggaatgaagctgaactcgcacaaagattgatccagattttacatttgaggagatcattctgttgagaatgtgagcggtaggcgcagacccatgttgctgcaaatgacccttatccagagcacaactcaacagtgccgtcttgtctgtgtgcagtcaaattagtgagtcttattgtggctgagatgtcagcactcaaatatacgaaacctgtggcaacatggcctgagaactgcttgaagtatttcaacggaacaggattgattaaattcccattcaatttgtcctttgttcatgaaattggttaacaccttcagcctctggattactctcttttatagcatggacagatgacatggctacagaagcatcatgtgtgtgttcatcagattttccatcagatatcagccattgactgtccgtattttgttgcaactctgtactcgacgaattcaactgtacactgcactcccctgttttttttgtttttacagcatagccatgtcatttgataaccaagttgcattggcatcatcaagctccacactaaaaatttgacttgggtatctcttggctgctatcaattggaggaggcactggaagaagcttgtaagcattatgtgggagattaaccgcaaaccatatgagaggatgctgctccaaagttgtactaatactaagcgtaggaatcatgcaagtatgatgctttcatgagacagcccaactcaagtaaactccctctcatgagaaattatcatcacaggctcaatataaccatgtacaaatgtgaagctgtccagttcttcacaatactaatgactggtggggcaggctgatgttgagtgaagccttctatagaccaagatattatgtagaacaatagacattactgcagaaaactgggtgaggttaagtcatggcaatagcttgagtggaacttcaatccttgatttttccacaaataatcagcaagtttcagaattttccttgttctatgaaccgggatcatcacatgaaaggctcaaaattggacgatcagatggacttggagacatcaagtactgcaaaaggggtgcttgttctggaaattcaacagtccaagaagaagagaattctcccttttatttgtttctcaaagtaattgctatacctgtatcagattttttgatccactgaaactacctctgaatattccaacacagagcatcaaaaatatctggagattctgaagctacattcctcaaacacacgaaccccgtttcctcaaaaatcacatctcccttatttgcattaattccactgccgccattgacacctacatcaggcttcaaccgcctcagccccaaatccgcaatacgatggttcgcagaatggctcgggtgaggctagggtttcgaatttcaatcttcagcttttcatgcgtccgacacaattctagcagcaaattggcatgacgaatctgggtggcctgatagatgggttcaattttctccaaggaattgaagctattcaactactctgttctttatagtgggaaacgacaagatgcagtaagcctctttgcctctgctttacaaatcaaactgttttctctgagaccactattcttgcggacagaaacgtttgagagatacgcttgcagataactccgggaactgagattctcagaatcagttatcaaatattcgagtgggattactacacgattcatcccgcgtatcaacactcacatcattcctcaacgtactcccaaatacaaaagcaagggttcgaacgccgtgtgggaaaagaatatagataaaatgaaattgaagtaaaactcgaaaaaatataaaaaattaaaaataacaaaaccgaaagtgttgatctataaacatagatagcccccacttcatgtgttaatccatgggctaagaacagaggagaaaaatgcagaacgattcagtcgaaaaacagaatgtgatcacattcaggcatagagttatatacttccgaagacatcaatgacaccaaaaattaaaacaaggcaaacaagcaagcaaccaatctcaacaaaacaaattgtggcccttctcgtccacaccaatcaacaatacattgaatttccataaacaaccaaatggagagattgaatatggataaaaacaccgagagtaactagaagcgtacctggacaatcttggctgcaatcacccttttctcgttcttgtgtcccgttccgcaaagaaaccctcccaatcctaaaaaactccctcctttctctttttccttttttaaatccctcaattcaaaagcaatcttcccaatttcaaattcctctccctaaccttccaaggagagtcccaccttctttaaactccaatggtaagtttccttgcaaaaacatgaaattttagaagttaaataattgcattaatagataaataagtaaataaattagaaaatggtaaaaataataaataaataaataagttaaggaaaataatataaagaggaaaataaaataaaataaaataaaaataaacaaattaacaaaaaaaatgggccctacgagccatgcaaacacgcaagtcatataagtcacgctaaaaatgtccaaatgggctaagtgtgcctaaatgagcctaggtgaatctaagagctatcctaaaaaaaaacaagaaaagcctaagtctaagttagggctgccaagggtcacaataaaggatcaaataatccctcaaccaaagtctccgaggtgactcagaaaaagggtaagtcgtacgagtagtaatgggccaccaaggaactaccgtggagcactggaagtgaatttaaagacatgtgctaaagggacaaaattgagggtctacaacatgctaaaaaacttattaatcctttccttagcacatgctgataccacggattggacggtgtaaatggcaaaataacatacttcctcccaacaaaacaaatatcgaatccatttgacgaatataatattatcctagggtgatgacaattaataagtgctttatatattgttaaccaatccatacccaagataacatcatatccgatcatgtgtaaaacccttaaattaacttggagcactctatccaccaaagtagtaatacaccccttacatactctatcaactctagaattcatgcccataagggacttaatgtataacaggttttctaccattttcgttttcaactccaatgcataagcacaagatgcaaagacaaaagaatgtgttacaccaatatcaaacaaaacacgcacccaggtactatataccaaaatcataccttccaccaaagtgatgttgtcctcagattctattggggttagtgcaaaaactctagttaatgtctgtctccccttgcctctatcacttgaccctaagatgatctagctgggctacttgtagtagctatcttggttccaggcactattgagggtaattggggtgcctggtggtgaggcaagtgaacttggggaggctgaaatggtaagactagttattgctggggtttccttaaggttgaaattaggtttgaggtgcaatcctcaatgggtaaaccctccacaaatggtcttttgctccacaaccataacatgctttactagttgctaccatttgaacactttgttcacttccaatgtaaaatgacaaatgcccatcatattgttggcctcattacctctcttgttgattttgaagcctcctttaggagttttttcctacattttgattttccttcctatctcccctcttctcccgaatttggttggtatcatttatatttcaacaaacaagactcttttgcctagctcatagtagttccttatagctaatggaaccaccctatttttgatagcaagccttaatccttgttggaaccaccttgcctttttcccttccttactgatcatgcctaaagcaaatctggacaatttagagaaacgagttcattctcttacactatcacagtctcctagatgagatgctcaaactccattctcttgtcatgcttagcccatagttttaaaaggctcaaggcgcaccaaggcgcaaagtagtcctggagcctgaggcgcaaggcgcacctaaggtgcgggctttagtgaagtgaggcgcaccctaatttacatatatatttttatataatataatcaaatttaacaatcatttatttgtcctaaacacataaatcatcaaatatcatccaaaacttcaatttaatcaacaaaaaacataaaaataaagaactccaagtataaaaacaaatccaaatccatattgctaatcatatttgtgaaaggcgcgcctagcagaaggtacgtgactattttccctctatttttctcctatttttttcctatttttcctcttcattttcttcttcttcttcacttctccactgcacggctgaggctagggcaagattgggagtggtgtcgggttgaaaaatgctagaaaagggggctggaaaggaaaacagggccaaaacggcgttgttttggacccacaaagtaaaaaaaaaaattacggcttagccctaaacctctacaacccgacggactaaaggagaaggagaaggagaaggtacttggccggaggcgagtcaggcgaccgcgtcacacgttgtgcgcctaagcgacgccttcgtgaaggggcgttgcaccaccccgagctagggcgcgcctttcacaactgtggcttagccacttaccaaaaatatttgtccaaaaagatcctctcaaattgatctcaagtcattgcatttgtgtcatatattctcttcattgtctctcaccataagtttgttttatccaccaacatatacgttgccaaacggactcttttctcttcttgaatatcaaaaccctttaatattctttttatgcatctcaacaaattttttgccacctcaacatttggttcccccccttaaatgataggggttgcattaccacaaatctctttgtagcctccatttgactcataactgccttagttggacaaactctcctttgagaatgatcataatctttctaggcttgggtaccccttaatctccttaagccctagccttttagcaattgtgtagtttcccgtagttcccttcttacttctttctctctaactaaatcaatttcctcattctttcagttctccgttgtcttggttttcccgccatttttagataccaaacaagacctgatctaatcacactccaaggtgagcagaatatattcacataaaataatataataattttaatatctattacaatattttttccatatagccataagacatagtctgtcatagtcattatattatcacatcttgctatcataaatagacattacaccaaggttatcaaacacaagtaaaaaatagataaataaatgaacttataaactactaattaaataaataaattcataaataaaagcatatgcataacaatacacacttaatacgatttgaatactaatgttgcgttattttattcaattgaaggtaatacatttaaatggtctagggatgaccaaggactaacaacaaatccctaaacacactcttaggatcatttcaaattgatacataccacaatctgactttatttgaaattaaaagcaatttagaaccaaatcctaacaatcagaaataataaccaaatttaaaataaataactttgactaattcaaatctcctaatcaaatcaaatctgatttgatttgatttgatttgatttgccaacacacacaaacactatccccaaggtattattgcaaccatggctctaataagtcgttgtcacaatccaaatttgaggtaatttagaacttgacccgtgattctaggtcaaaggtttgaccctaagggttactcctaatccaagttggcaatcaacttgaaaaccctaatttttttttcttgccactagttttcactaactcataaatgccattaatgtccaacttgagataatcatcaaaggttgtaccaccatttctatataaaaagttcctgctgttcgttcacaaccaactaaagtataatcaaattccatatactcaatttcaccaaactaatacaagtccaaaagtttagcaaaagtaaataatatatctaagtagctcctgaacggaggacatattgaaatcctccctcattcacttgagggttcttaggaacaatatctggatttaaaaattttcgataaggaaaagataagcattttcacattgttcattatgatgccttacaccaacccaagaaggttagtaggtaaccattaagggctaagtatattaaaataaacatttatacttaaaaataaaacttcaaacattaatccaaatattttatcttaacctgaatatacaacaaacacacatcttgataattaagttaaaatgcaaatgaaactcattaaaaaaaaatgtaaaattgcaaacggagatgtaatactcaatcatacaatgcactattatttttggattttcaccaaaggatacttttctgtattcaaatgcactcttcattcggagtcttctcggagtaaatttttgtatcttttacactaaggatctcacttccttttttattagtcctcttctagggcccttccttttcaccttattattattattattattattttattttatttttatttattttttccatttcacaaaacctttcatcattatttttttctcaaaaattatgatgcaaatgcaatgcattgtactcacatattagaaactattatttccaaaatatatttttatttttcaaacattgtctaatcatctcaacattcactaccagtaatttttttcttcaattctcataagtatatcatcaacaaacaaccatttcattatttcctttaaccgacaattcataaatcatcaagaaataaaatttaaacaatgatcatataccaagtcacatgcaagaatctcaagtataaacagatctatctcacaataagatgatctataatttgtttttttctaaaatatatcaagtagaaattctagggataaactatcctaccaaaaatccaattgttaacttcggaattagattctacaacaatgttcccaaaggaaaatggaattctctcctaaaatttcatgtgaaacagaccatatttgatttgccagttgacctactaaagatccacaaacattttctccttttttttttccttgctctccactcccagctatccccctacttctccccctctctctcattttccttttccttttctcccaatggccttcacaccactttaatgtatatgcttttgtgtgtgtatatatatatatatatatttacttattattatttttatttgtgtagtggttttaatgccactttcagtcatttttttattttttctttctctcttttacaaatcctcaaacatatttccattttccaaaaattaaattcatcataaatatacttgtgttttcaactattttgattttttttttctaaattaaatttcctatttctcaataatttttaatttctaatgatacgaagatcttatactcatatttttgccaacataattaattcttcaaaactgaaattattaattttaataataggcaagacttatctaacttcctaagaaattatctatggtaaagcccacatgacatgaattcaactcacttatttgattactaaacttctttgaatttttcaatccaaattcgacacatgttcttagtttttcctttttggcttttcaaccgccactttgctagaaaattttcaaactccacatagcctaaaatagctgaattttatagttgaccttgtatagattaacttaatattatgttaaaaataaaataatatttatataggttactttagatgtgttatatacataagtaagctggataatgtgcttcaatcaatatgcctaccccctttagaaaaatagttttttctagatagatagttttttgtgaaaccattcttccgttctatcctaaatgagcactgatttaaaagaatcactcaatggaagccctaaggccggttgagctctctttgtgtatgtcttgtgcacttagtgtgttgttttttggtgcttatttatacaatgctttgattgcctaccaaaaatgtgtcatatacaaatttagaattcaatattttcaatttatactagtaactttaaggacaaatttgtaatatgaacacttttcaaactttaattattattatttttattttatgaagttgttaaattaagttcaacatataaatttcaaaagatactttttgtacttttggttgcatctaggttgagcacaattagagatttttgggaggtggaatggctagtttggaggtttaaatggtttttcctcaagccttaccttaagtgcttaagggttaccttagtgtttgacaattgttttttgtttgattttattattaaattgggttgctagtaaggaatggttgacttttcttttcttgtttcctcgttttttttttggccttttaatgctctttgtattcttcctatttgtttgagttgtactccttttattgggttttttcttaataatggtctttatttgcctacaaataagaagaggattgtttgacaaggtactaatctaccatgagtaagagcaaaacgactaagagcttttattggaaaaggttgtgcactatttgcaaatggcttctctttggagattctgtctagcatagtccaatagcccatagtatgccttaattggccataagattttagtttctatttattagatcttttagaagaaattgacttgagtaaattgaatttaatcatttatttgtgaaagtgagttcttcagccctaaaattacctggagaaagggataggtaattaaaatattttaagcctaattttataatacattgtaaaaaatcatagcacaagaatcgggacacacaatatacatcaaaaccatctacaaaaactttcataggtgtaaaagaatgagtctcagttgaccacaaatataatccactaattcgaaaagcaagtatgagttttcacctgatttggacattatcaactaccctttgctttctcattcttgacataacacctcatactccttagtttattgccttaaaaccgtaatgaggggatgtgattgacaaccgcttagcctttgaaccaagagaactttcaagaaaggtcttgaaaggtttttaagagttttgggttcaaggcagagtaatggcaatgtttagttataggtgtatctaagacaatgaataaagcttagggatgttagtaatgtattctagaggttaactaattctatattaggataagttaggattgtagtattagtgcctactttataggctgatttatagtaattatttctatatagttaacttcctaatataggactcttatatatatatatatatatatcagctaggatgtaacctaaaaaaacctacaaaatatacaagtgaattttctggcctgtttcactattgtgaacaagggatatattgacaaaccctaagtttttaagttgaattataatagtaaagagagttaaataaaaaatatgattttataaaattaaaatcatatttttcttggaaaatgtgcaccaacttgagtgcttgatatggctgcttgagcgctttggttgcttgagcatcttgttgcaacacttgagtcttttttggtttgtatgattaggcaacttaagtgctcccttgagtgttcacgtgtcccaactactttcttaaccgcttttttgatttttgatgcaggtcatcttgctattatttagtcttaagttccaaactgcatactaatagtaatcttttttcttttttcttgtttcttttacttaaatctgttactgtgctttaaaatctataagtcccttagaagtatgtagcatcacatcaagtgcatgtttcgagttatgctgcatgggtttgagtgtgtcgagtatgagaatttgtcaatgtgtctatgtgtttctcctacaattttagaatacatggattcaaccaaaaaggatttcaatgatggatatagaaacttggatatagtataatgaaagaaggaaagaaaattcacaaataaagttacttttgataaaaactcttttttttatatttgatcatatcttttctttcttattcataaatatttttataaatgttcattcttgtagactatattttttcaatgtaattatttgccaagtaagctaaaattaaaaaaaaaatcaaaataaaatagttggatccaatgcaaaataggactgtcccataaagatcccatgcccatacccatgtcttgccttgctgacatgggtacactaggtgaagtcggagggtccaagtgatagtttttaagagttatatatttttgaagagcatttgtaagtggaattggaatgtaattttctttatagatttttatgtatgtgtttggtagtagaaatgaaaactattattctatttttaagaatggaaaaaacgaaaataacacaaaagtgttggctacatgttttcaaaaaacatttatgaaaataggtcaattttagaaaacattaaaatgttgttttcatgttttaaaaaatgctggtacactagcaattgaaaatatccaaaatgaatgtgtttattgttcacatttttgttaataaaaacatttctgaaaaccaatttaatttctgctaccaattatgccctatgattaccataagcatgtgccatcttagatatatagcctctatcatgaattttgattggactagaggtgctaaatttacattctttcgtttgttgcaggacctaaatcaaaaccgtagcatttcagaagcact

SEQ ID NO: 10831 - DNA, 11805 bp, Vitis vinifera
  Intron number 4 from transcript GSVIVT01009720001 (locus G SVIVG01009720001) derived from phytozome v7.0 (chr-ID chr1 8; pos 10768287 to 10780091)
gcattctaaacctcgggtattttcccttatttttatatttgtgcaactgatttcaattattgacttgaagctgttctgaagtatattattgatgtttcatgcacttaatttcttaacagttttctgtagctttggttgtttttgttatgctatttgtgcttgtacatgctgttagtggatttaatttaatatgtggcaaattactgaatagttcaatttcaattgcaattgcctatggttgtatttctttttaggtgcgctctatcaaaaaaataatttatttttcattgtaccttaactcctaaacaaaatttaattctaatgcttctcattccttaatttttatcactaaatagatgagcatctatccctgcaactgtttaggtgagaagaagggctagatgtataaagaataaaaaccattacaagggcattggaccaaacgaaccctacaagtttcctaatcggttcatttggagagtaaaatttatttatttattttgatagataaacacacaaaatatatattagaaaaagggcgcttaagaggcaacccaaaacatacagggagtatgcaagagacactaaaaggcaagaacaaaaaaaaaaaaacaaacactcaccagccctcaactagaacccaaccaatcaaaaaaattgattaaaggtaagggtcctacatctaaacaagactaagaccaagaccaaagattacaaacaaacgaatttttcaacctttgaatcgacaaatcctcattaacaaaagctatcatggttctttccttccaaattgtctaaaataaacaaagaggagttgccaaccgagcctttctatgcttcttgcccacaaaggaatcatgccaacctaaaagagtgtctctagccgaaagcgaaaggacccaattaacaccaaacaaagtaaacacaagctcccacaataccctcgccttggagcaatgaataagaatgtgatttatcgtctcctcttcaacacaacacaggaaacatctgttagctaagttccaccccctcctcttgagttgatctagggttaggaccttcccccatgaagggagagtaaaatttattcttttgatgttcctttttcttacacgcttagaaccttttggttaggatattggcatgggaaacacttccgaatggatacctgaaagtttttttttctctcttttgataggtaaataaagtgagtataatatataaaaagcaccaaaaatagttcaccaagtacatatgatgtatacaatagttgtcaaaagggataaccaaaataagaggaaactataaaaaactactcactccctcaatgagaacctaactaattagcaaaatcaattaaaggaattgaacctttgtttatctatgtacaacttaaaccacaataaaagcttagtaagaaaagtgttttccagtttttgcttagaatattcctcattttcaaacaatctttgattcttttccttccatattatccaaaaaaatgcacgaggaagctgcttgccacattttcattcattttttccccacaaaggagccatatcatcctagcgtctctttgactatggaagatatcacccaagacacaccaaacaaagaaaacaactaccatgaaagtgccttgttttggcatcataaaggatgatgtaatgaatggattcttcctcatttttacaaaaaaaatttgtttgccaatgaccattctctcatctaaaattgatctaacgtcaatatttttccccattcgcttcctaagcaaaaaaacttgctttatatgaaccaaagaattccaaattactctcattggaaaagaaatagatctcgttgactccaagattgagtaaagagctttgatggaacaagtttcattcatcggcttcatccaaatcaccatatcctctccttccctatccatcacctttccttgtagtctataaaagcaaagtttgacaatgtctagctcctaatcattcaaatgccagggaaaacatggattctagtaaccctgctcatttgattggtcccatgaatttgtcacctatgttttcataccatttatcatttcaaaacttcactctcctttcattatctatagaaaataagaccttactatttttttttttgataagtaaagcaagatatattaatgaagaggcagaaagttacaagtatacggggggtatacaaagtaacaagcccctcacaaagccaaaaaaacaacaaggctcaccaccccttagttggatgccaaccattccaggaaccctataagggacatacgctcctcaccaatatacaatctagcccagctccacaaactacatacaaaagaattcttaagcttttggatatctaacactccctccctaaaagctagcctatttctttccttccaaaccgtccaaaaaatacacaacggaatggatttccatatctttttccttttctttcccaaaaaagggcccctccagctagttaagacctcctttacagtttctggaaagacccactgcacacctgataacccaagaacaatatcccacaaaactctgaaaataagaccttactattaaaaagatctcaattcttcttaatgacttttcataacccaatcctatactcatctctcgcttctcaagaacgtcatctcgattcttctttgtcatattttccaccaaacacctacttccaaagagcctccatttaagatgcatatcaccaactccacttatgaagaaggttcttgtttaaggaagagagacttttagctcccaaaccccttccttttctttgtgtagactattaaaagattagctaaagaaatcaacaattaattttcacaccatatatctgattttttttttttaatctttgtaaaagttgacctatgatttgtgtaccaaggatctgggtaaattctagataggacccttgcaatcagattatttaatttaagggtttcttttttgatgggtagcttaatttgaggaatcttgtcaacttgtcttctatatatattgtaaatcagaatgcacccataaaaaaaatatattgtaaatcagaatgtagtgaagcatacaagagattatttgttttcattatggtatcaaagcaggaagtctaatactgtcaagattcatagagccttcattgttacatcacatataaccttcattgttgtaacttattcattcttgtaattgttggtaacctagttcccaaaaataattacctagaggttatctcttattttctccgaaaaccaaaaaccttggtctcatttccctaagatgtctaaaactagtgaaaatacaccatcttctcaaacatccctacccttcaatccctcctctacactccaaacctagccacctttatctactattcataatgatagccctacactctaaatcaccagtaaaaaactcaatggattcacccaaacttatggtattaatgccatcaaagccaagggtatcatacactatttatcaaacacaattcctctagtaagttaattgctttgatagtttatgtggatgacattattgttactggaaatgatgagggaaaaatgtaaaagctaaaaacttatttatctaataaatttgaaatcaaggatctaaggagtctaaaatatttcattgggatcgaagtgacacattcaaaaggaggaatacttatttgccaatagaaatatatccttgatttgcaaaagaagacagggatgcttagatgcaaaccaatagactttgattgagcagaatcataaactaagaggaaaaatagaggatgatatagtaggctgccacctctatcaaagtttagtgggcaagttaatttgtttacctcacacttgaccaaacattgcatatgttgtaggtgtgataagtcaattcatgtgcacaagaatctcccatgaaggcaatatgttgaatcctactttatctaagtctacactaaataaaggaattttattttaaaagataggatatatggaatttgaagcttatagtgatgttgattgggttagatcaattgtcaataaaaggtccactgctagatattgtaccttcttaggagggaatctagttacttggaagagtagaaaacaatcagtaggggttagatctagcacaaaagttgagtttagggtaatggctcaagggatttgtgaactacgctagcacaaaagtcattcttacagaccttggtttcactttgataggacctataaagctatattgtgataatcaaactgctataaatataacttttttttgataagttactgctataaatataacttattaccctgttcatcacgatcggaccaagcatgtggagatagatcgacgtttcttcaacgaaaagcttgattctaggctgatttgctctttgtatgtcccatattctaaatagttggcagatatattgacaaaggacgtacaagttaaactttttatgcaatcttagacgagctaggaatgcaaaatatctttgcaccaacaccagcttgagggggagtgttagaagattaacccaagaagtcaataattaattttcctaccatatatttttccttttatttgtaaaagtagacccatgatttctgcactaagaatctggctaaatttcatataggacccttgcaatcaaattacttaatttaagggatccatttttgataggtagcttaatttaagtgatcttgtcaatatatatatagatatatattgtaaatcagaatctaatgaaacatatgagagattgtttttcatcacaaacaatcacccacttcattaaatatttttttttttgataaatgagcgcaaaatatattaaaaaaggccagaaggccgcaccacatacaggtagtatacaaagcaaccataaggccaaaagcgcaaaaacaggaacacctcaccagcccttagggagtcgctaaccactccaagaagcctaaaagcgaagaggactcctctcccctatacaccttagcccaactccacaaactacatacaaaattattcttgagagtctgaatagccaaagacccccctctaaaagctaacctatttctttccttccaaactgtccaaaaaatatacaacggaatggaattccatatctttttccttttttacccacaaaagggcccctccaacagaataacgcctctttgaccgtctttggacacacccacttcattaaatattgtttactctctagagccttgccaccctagtggaaatttctttgaatcttttctaaccttaatatgattgccttgaaatgttgaataatgacataaaatagatgaacaaactgtataaacaaggacacaagatagatgaaaaacctgtgttatttgctccgaattagactgagcctcccctatttggagatatattgccttttttgtatcgttgaccttttatggaacccctctttcaccacatcccaagccgccaatggtttaaaatgggcacctaaaggtaggaccaagtaggtagacaaagggtctcctaccttacatcgtatttcagaggcaaactactctatgttattcaccctttcaattggaatcaactcattcttctctaagtttatatttagtcccaagatggctttgaactatatgaaaaaccagctcaaatgagtaatctgatcttaagaagccatatagaaaattattgtatcatcaacaaatggcaaatggggcattttcacccccttacctcctttatcacttacccctaaaccccaacaagaagcttccctccttagcctcttaagaagtcaagtaagagcctccatgactaacacaaataaatagggaaaaagaggatctccttgtcttaaaccactagaactttgaaaaagttagaatgggtgccattaacaagaacaaagaaacttgttgtagatgtgcaccatttaattcaattgattcatttctaaccaaagcccatcttttccaaaatagaaaacaagaagtcctaattaacacgatcacatgtctttcgaatgttaagtttacacaagaatccaaaggcattgctttttaacatagatcaatgacatatggatccctgacagttatacttaatacataaatttcattgcaattgtagagtgggaatgattcttggattgctgagggaatctatatatagaaatatgtcatgtctaaacacatccctcccgtcttcattgggtgtaaattactgttcagaagcactttagtgatatcaacaattccttgcataaatgtttgattggaagaacattaagaacatctgcagttccttgtatatgtgtttatttttctttattctgtaaggagactaattctttgccatttaaattcatggttcagttcattctttatggcaattttgggggtaacatgatggataccaaatcttcaaaaagggcattttgagcactttaggatgaaagtttttcctgcttattatatattaagtgtgatctcaccttttttctcatattaaccttttggattggctctatgatagattagattgcattctgaaaatttgctaaaaaaattgagtttaggcaagtatagtgtttgttaacttctggttttaatctaaataggtttatttgatattaaagtattttaaaattgttttgcactgggataaagtttttaggaacattatttttttttattaaagttattatatttgaaaatgttgaccaatgtcttaatttgtgtgatctcttttccttcaagtatcattctcattattcttcttgttctttgttggacatgcagtttcatttgaaatgactgcaacctggtttggagtttgatccctttatgtttctttccattatatggaaagagcacttctggagaagtttttagggagtaaaatgtttgattgttggtgtaaaagtttgttttcgtagtggggaggtggaaattagtaatttctctttagtggactaatagctcatgaaagattatctaggagtgtcacattctcctttttccttttggcctttgcacttttttatatattttgtgtgttcataggttgcacttgttggaatccaacaatttattcttgattttatggagtttgtttgatttattcctttttttgttcatatttaaattagttgactatttaaattagggaagttgtaactttgaggctttgtaggaggctttgtaggaagatttcaggagtaggtcaactctcccatttggtttccattattgtactagtctgaaaaatgtttagacatctatactaatttttcaacgagcgaataagaagattccttattttccaacatggtattaaagttgttttaaaggtgcaaaagcataagaaatggaggaaaccttgggttttcccataatcttatacaattgatacaattgttcctttgtgaaagggagagtatttgaggttgatatagaacctggttctcaaccatagttttaaaaggtgtgtttgaagcacaaggcacagtgatgcactcctcttagtggtgcatagcacctttaaggaggcatgttctaagcacacaaggtgcatatctctcgtccaagggtaatgctccttacagacatgccttttttcctcctcctagaatagggtcaaaacaacattgttttgccttaaaaaaaaccaaatcaaaataatgtcattttttagtctttttttttttttttttaaggaactagtgcaaaacgacatccttttcccttcatttttcactttttgaagagtagcaccaaaatggtgtatttaccttttgaaataaaagaaaaagggcccaaattagggcttccaatctccaagctcatgatcgtcgaaggtggagaagaagagtaaaaagagagggaagaatgaagatagaaagaagaaggaagaaggacatacttggggggtgcttagagtctcagaccttgaatataatcaccaagtggtgttttttttttttttttcatgacttagcatttgcatttctcacctataattttatatttattttttttagatctcatttattttatttatctttatcatactggagaataatatttatatttattgtggtaattatataatgatattgtaatatttatctcattttttaaaactaaatacattgtgatttatttttattttatttattattcataatccaatttattgtgataattacataatgatactatgatagtttatatgtttggaacctctttttttctttttaagtattttttgttgattagattggaattttggataatatatgatgatttatgtacttagcacaaatggttacatttataaatttactgtattatataaaattgcacatgtgacttaggtaaagcctgcgctttgagttgcaccttgcagtcagattctagaatgactatgtgccttaagtgcgcctttatgccttctaacactttggtctctcaactgacagtgcattcactgcctcacattgaaattctttgttgtttctaaattgtttcttgcccttatggctgttcttggcccttgattgtgactttccatgcaatctctagcaagacatcctactaatgttagttctccgatacctcgatttagataggagattgtggaaggccttggattccccctcctttatatctacttccccaagcaatcattccccattcactcttaactctaataaaaaaatttcttcttttccgtgcattggccattttatggaataatttagtatttttatcctcatctttaataagatttcttttgatttttgcctccacatagtttctttcactaaaacccacttactatattcatccactgctaacattctagcttcagattcttccatagaaagggcaccttctctctccttaaaatcttagaaactaattgattagaggcctcacgctttgtagttgcaacattcccaaataccttcttattccaagattttaaatcctgtctaacttcaacttggttatcaaaatatgattgtacgagccactcgcattatgacccatccatcaaatcctcaccaaatccttgaaattttctgatctaagccatgtattttcaaatctaaaaagagattcaccccctcatcccatctccatgtagcccaatgggggagtgatctaaaacaggtttaggtaatatactttgagttagactcgaaaagtgatcataccaatcattcaactagaaagcggtcaaaccctcaagcagattgaaattttttttaatcaggtttcctattatctttgaaaagcacctcatgttggaagatatactagtgcaatttttcctctatttggggaatctaaccaagttaaaattccctcccaagcatcaaggaccatcccaaagggctcttatagctcccaacctaacccactaggatagcccagttggtcaaggcgaacactaggaagtgtggtcccagtaagtggcatatggtcttgggtttaaatcctgccactaatgataccctaaatttacccggtgttggttgttacaaggcggtcagtaccccgaggtttgggtctgcatggagagtcccaaaggcttggccatggaaggttcctcggttatcacaaaaaaaaaaaaaaaaagctcccaacccaaaaatcctctctcctactcctttgtactgacccataaatccttgacaataactaaacaaagccatctttacttctatttagttttcatttctttacttagttgaatagaagaaaggtgactttcatttatgtttctaagtaatttattattggatattttggattttttgtccaatttgtagtaactttgtaagttcatccttaccataaaaatgacattaagtttaatgatgtttgacctcctcatagaatccaagtaatacgaggaataatgaaaaatcctacaaaaggagttttattcaacatttaacaaatcacctggggtgtatctcagtggtagtgctctttagcaatgaactagatgtcccaagtttgagcttcctaggtatccaggtgtgtaggtagaagggtggtttatatcccctagggtttgctaggccaacagtgggaataaatgctccctattataactattattattattgttattattttttataggtaatttttttgtccccattgaaacttgaacctggaacctcccacaaaccctcaccaacccttttccacttaagtcaagccacgagggtgctccctattatcaggaaaaaagaaaaaaatatgtataaggtggtgttctcaatttgatttgaaggccctgccatgtcacatttgtgagtaaacatttgagtcataagtccgtatctgcatataatagctggtaagctttcagttttttagtttgggggtctaaatgtatgaggatctctactttggtttaaaataattacaaggttatgtttgagatgtatacggcctctgtatgcaaatggcttgaaggatcttgcactactttaacattggtttgttggcccgatagccactctttttatacttctagtatgtgttgtttggggccccttttattttgtgcttcttctaataaactacttcatgcctataaaaacaagttacaagagtatattctttactcttttaagccatttgtataaaaccttgaaggctataagagtgtcacttggtcatgcaaaaccatttttcttacatccagctatgctaaagcttataacaatgaaaaatagttgaatcttggagagcagtgcatagagtttttagctatctagccaaaaccattcaaaaattgaaaattttgagttttggtggtgtaaggattgactggaggactgattagtgccaacaaatgcatggtaagattttaagtccatggattactttaaaaaaggaaaaggaaaaaaaaaagtaaacctctttgaaataatgcaaaagcataggtccttggtggaaaaaacttcaatgagtagtgagtctgattcaaaatgagattaataagaaaacacggagattggggttgcatgatatggtttatctttgaccatatttcttatttttttcattgcctttccatgcacattttcttgaactttagatacttttaaataaactattttcaaggatttggcttcctttttatgctgttcatgctaaatgttgttacaaaatttgcatgcgatatttattgagttgaacctattctcagaatttggataaccctttcttcactcattcctgttgcttcttgttggagaaaattgtatttcacttgtcactcttccaactgcactttttcttaacagattggtaagaatctgctttttgaattgtggtttagaaacttaaatgtattagcaagaaacttgattctacattgttatcagcatatgaataaggggtattgcaagttatccacagttagtttcttggttcacatgatgaaaacattagttaatgaacaacatatctgcttcaatagttcaggacccttgatttctaaatctggttgtttgttcacccccacttcttgttggtaggtttagagcctccattccaagtctgctctgctaaagcattcctacttaatgataaagaaatatatagcttgttggaccctttttgttccatcctatataagctattgttcaagttttgccagtggttgttaagcgtgttgtaatgatgcttattaatgttggttttttcctatgccatgtgatatgatgcagggcctgtgcttggggaca

SEQ ID NO: 10832 - DNA, 6482 bp, Vitis vinifera
  Intron number 2 from transcript GSVIVT01003537001 (locus G SVIVG01003537001) derived from phytozome v7.0 (chr-ID chr1 6_random; pos 197997 to 204478)
ttgggtaatcccattcatcacaacatgtgcattatcccattttttaagtccaaaatgaaacctaccatggtcgcaatctccaatattttcagcttaagaattccatgacagtgaaggagcctcagtattccaaattggtaagcatcatcaggttcaagtgccttaccatgaaaagtaaaatagtctggcagagtttggtgcgccagacagaattgacagctcagttgcttttaataacaagaaataaagaaccatagtggaattggggaagctagacagggaatagtagcttagattggcagaagatcctctgattttcgcttagcaatgtatggagatgactccatctaagttcctcaccaatagagtcatccccattgacacccccataaccaccgtctccaccttctaggtcgccatcttccaaccaaccacctgcgaaaccaactgaagggcccatatgcgatcttttatggtctgacccaaatgatcgatgtggttggggtacctctcctcaggcgctcaatcaggcatattagaagattttatcgtggtgaactccgcaattgagttctctcagtttgtaatctggttgcatggggatctgaaacttgaaaatatcacatggatgcatattatttaaggaggaatatcccttggacctgctccagaaacaggttctgcagctagagaaaccttagagcaatcaagattggtgaagaccttgaacacaggattgggatgttggaaacttcactaaccaggtttggcatgatcttggattctactcagagtgatgtcatgcaagtgaataaagggatgaaggaactttttaatggagatggaaggccttttcatgcaaccaccaacacctacaactgcaatcaatcaagctcatttccaccttaagccttatgttgctccgcccttgcttgcatggtgaccctcatttgatcttttgtaaggcccaagtgattcatcccttattcttcatccttgcttccaaaaattgattttcaaaattctggttttcaaataaatttaattctctaactttgccttttaaaattcttagaatttctcttaggttaataaaatccagattttaataaatcgcttgctgcaattattttccttttggcatgcaccttccataacttttctcaattttaaatgattttccaattttttttattttaataacatgaataaattctataatttcaaaataatggaattttctctaaattcctgtgatctttcctccatgatcattaggaaaatagagtttatggaattaattcatgcacaaatatgactaattatatacgaatggtctttttggattggtctaattaattaattaaagcataatatgagtcatgactaattaattaattaaagcacaataaggttaattaattaattaattagaatccgataggttagattaagtggtccaagcccaggatggactcaagtcacttaaacccacatagggtttaagacttgtaaccttcggccattttgtcttccagagagaaagagccttagcctgcatccctatggaggggattccaccatcgtcacatgtacaagagggagccattaggtgaaagatgagattttgatatcacttttgcagaaggatttgggtttgggaacaatcaagccctaattatgatttctaactcatcctatatgcccaaagttgtgtttttttttatcatttccattatgcctaggatcttagatacatgtaccttaaagccttaaacacatgtagaattgcctaaactaactcaaacacattagataactgtcaagcaagtgcattggtacctcaaatgcaccatatatcatgtttttttcctcaaatgtggctctccactgcttttgcatgcattctttgatgcaaattagacaagaaatccaaatgataaaaccttaacaaatgcatatgttctctactttggctgcaacccaatttcttagagttccaaaaagcaatggtatgttgctcgatcttccattgaagcaaaatatagagttgttgcttataatactacaaagctgggatgggtccaatcacttgttcttcaacttgatatgtctctcaaacattctccaactatctatcataataatatcgataccatctacattcggtttttcactctcatatgaagcatattgctattgattttcactttattcaagataaagtttttcctagacaacttcatatctctcatatttccactcagtaccaactagttgatgttctcaccaaaccattatcttgtcaacgccttattttactttgatccaagataggtgtttccaattgaaccactatcttgaaagggcatataaagaatggatctgcaacttctccaacctcgttagtgcgaactcatgattcactcattcaactgaaatcaaatcctttaatcccaactactttggataactttctctctctctctctctctctctctatatatatatatatatatatatatatataagtaaactttcttagccttgctagaaacaactaagggacttattattagtctaaaagaaatgttgaagacaaatgaaaaaaagactggataagataatgacaatataaaagatagattgaagttttaaaaagagctaaaaagtgtttaacagtataaaaaggcatgaaaaacaaagaaagaggcttgggcactaaagcaatataaagagattattgggcgcccttggatgaaaatcaagcattggatggacttttaggaaaaaaaaaaattaaatacaagtttctttattttaatttattgaaaacttgcctattgtgcatttatatttaaaactttcccaatactataaaaaacttttcaaaattatgtttgaaacccttttggatggaaagaaaagttggtgatttgctaatctaaatagagttttgatgtaatatactaaagagctcaaggtattacattgacataaaagacaaatatagatgataactaatataagtctttcgaattaaagtagcttttctatcaagtaaatctttgtagtctcttttatgtttagtatattttatttatggttgactaaggtccatggttgtaagcctattaatgttctatagatagttttcacgttaatcacacattgcattcttttatgggttgtccatttattattcatatttttccttattcaacatattcttgtgaatgaactaatataaatatttaaacaaaagaaaatgttgaatttaacttgtaatctttaaacttcctattaatctttactctaattagttttagtcattaagaacatgttcacacatgtatatggtggattgcctatgcatgtaagtttggcctaggcaagatcgaacccatcttgtatatatgttggattagataattaaggatacaactttgacatattcattgaagctaagttgaggtttgccaaaaaaagattagccaaagtccactcaacatgaatttgagcttttctcaaaacaattaattataattcccaacccaaagttgggttgatttaaaagtccaactcaaagagtaagctaagttaggctaaggattaaactcgagctaaaaattaaatttctaactagatatataacttgttaggccttgttatggccaacctgagcccaagccagacaaccttagcttggtatggtgcaacccatttacctacgtattatcagctcattccacatcacaccacatcacaacccataatcaagtacaaggttggttaaaaaaattggggtttgagatggggtgttgcattcccattgtttgttgcaacattttggacataggcagattctccaccaagaaatcattgctcaccatacttgggttatacaagtttatggttttggaaattctacctttattcctccattctttacaatataaattatcataaccaccatatatgtatctaagcctctaaacaaattaaataacaattatatttgagttcgaataagaagttactaatgttagtaaatatacatgtcagtttgataggttggtgggtcattgaatcaagttaggtcaatttggattgagctagccagtaagttatgattaacttttacatcaatttaataaggaatttcctattatattaaaatcacattaaatgaacttattaacttttgcggttgatatacatgtaacaaggaattaattgtcaaatttataaaaaataatataaaaataaagcaatatatgactgaaattcattgaaaagttatatcaaaataaaatttcaaataaaaaactcattattaaaaaaattatattaaattcataataaatctaacattcatttcaatatcaatttatatttaatatataacaaactatcaatatgtaaattcataacgtacactagctcaataaatctagtagttacaatattatacaataatccataaaatgagtaaagaagtttatggaggaagaactagagctagtaactaacataaaatatacatggaagcaaaatgaaggataatgacataatttgttatggaaatgcattaaaatattaaataatataatataaaaataaaaataatatttaaaaattagtcatcatcttgttttaataaatagagtttttcaagcccgatttggggtaactcttttacttttagcattaattagaagtggaagataagttatattttagtggcttagtatttggaattataataatttccttcggtacatgacaatattagagaaaatagggaagtttcattattcttacctaccttcggatactttttctttgttagaatttttattaataacactactctcttactaagattaaaaaggaatttttagtttcaaaaaagaaataaaatccaaaataacattcgaatctccttagtcttatagaaaattttatttgcttggagaacaagaacttactatattttatctacataagtgggacaaaattaaaatttggaagaaaaaaatgaaaaaaagaaagttgaggtacaatttataagttagtagagtattttaaaattttaactttcctagtagattggctaagtagttctcaatacttttattttcaaattatttcttatcactcaaacataaagtccacaaactttatttcctacaatgaaacgaacatgaaaattagggggaaaaaaaggctagcatattggtttttaaaaataatgtgcggatacaatcttaatgtatttttgataaaatcataacttcatttgattttattgtcttgatgtagatccaagaagtgaagcatatgcccttgaaatggaggaattaaaggttaaaggtaatcattatgatatctcacatcagatgaagagaaagttcttaatgctatataagtatgagctcattttaaccatatagatacattttaaagtcataagagttcctttggatccaaagcgcataatatctacacggttaggagtggatcatcaaaggtgaaaaagtagcacttataattatgtttaactttgtgatgttgcacaatacaagtttaacttatgtcatccttccaaaaactcattgaagaacatttcaagttatcctagattttggagttttttaggtctcttttttattttcctgaagagaacaatatttataggtggagtttggatactttatttgacatccttatatttgattttattgatttgaaaattttaattccttgattccattaatttggttttttttttcaaatgaaattttactaatgccaacaagagaattcatcctcttttttttttttcttgtaatttgatttgattttcttttgccaggcatttttatgtatagtcacttatcatttataattctaaaattttatggaattgaatgttatgtaacactccctctttcttgaacttaattataactattaagttgaagtatctaagttgttaaaaaaaaaatattaattcaacggtatgatttaagtccaccaagttgatggatagcaacatcccgaagatataggtccaacaagtggtggagccaaagaagtagataaaaggggcaagatatatatgaaagttagttggggtgggggtacaatgatacaaaagagtctttgtagcctagtggtagttattgattttatggtttaacaaaattatggataaaattataaacttggttaatttaagaacgacaatcttgatattattctccaattcttcttaaaaaaaatgaaatcaccttcaaaatttgttatgtttaactttggataaataggggtctaaacaaacacttgatttttttatttttttctattgaagtcgtaaaaaaatcttcaattcttcaagaaattttcaagtcttgaagaaatctctccaagagtgtttttttaatcttcacatgagtgtgtaaaaacacgttttcccc

SEQ ID NO: 10833 - DNA, 5339 bp, Vitis vinifera
  Intron number 2 from transcript GSVIVT01020020001 (locus G SVIVG01020020001) derived from phytozome v7.0 (chr-ID chr1 ; pos 11489646 to 11494984 reverse strand)
ccagagtgctcatcaggcagaggcatatcaggtataaatactgtgctatcagactcagaaaataaaatgatatgataattcattgctttctggttctggcccatttgaagattgatatattgatctttcaatttattttctcagctgcaactacattttttttaatctcctcaattttgtatagtacagaatggtaatgttatttaattcctagatattttccttgtaatatgctttgtctgattaacaatttactgctgaaatggcagccaggaagaagtttagattatctggattgattttttggtttttgtttctgttttgtttttgtcttcttttttcaagtctttaaatgagctttactcaactctattcttcaatgaactagcgctactgttgtacaagtgtgatattataaaagggtgaaatgttggttgttttggtggggggtttgtttctgtgggagaaagtaagcaagtatatatgggtatagaatcaagaaggaagaggaaattgaggaagttggttatttttatctatttatgtggaagggtttaaagaagtaagagacgtttttagcccaagaaccagatcacaatctgagagctgtttctttttgaaccaatggacattggatgtggacggatatagcgttatgaaatcttattctgaactatttgtatggaatggtaaaatgatcatacaactgattagttgattctgttgtttttcagatgttttgtgacacagaatttgaataaccaagtgtggcttttttagatggctgatccttgaacagcctagtgtgaccaaaatgtttggaactattaataattatcttttaggttagaaaagacaatacaaaaaaaaaaaaaaaaaaaagaaaagggttgcaacttcaagcttgtaatgataagcttgcactagaattaattgccattcttggccactgtttatttgtaattctctattaaaatctttttgcatttatttaactgcctttattgtgtagagtatggctttgagattgatgatatacgtgatgacaaatgggtctccttttgggttttctcatggcacacaaggtcttccttatcttccatttaatgaagaggaactttgaatagattcatttcctaggctgtttctggaggaacaatggaagcttttgttaattgttaccaaaaaaggacaagctcgaggggctctatttcccagtttcaaagtataatgcctgttagaattggtagttacacttaaatagaatgtttatacacacattaagtcaagctttttgtgtgggtccagaaaaattgaattttctgttctgttttcatgagaataacactagctcaaggaattatatttctggtgaatccattcaacctaacaattggaatcctgttttttcctgcaatttgcagtttgcagttttaaccattaagttcagtccttaaggtggagtgggcttccactgaattggattcagaaagtaattggattatattttttgatggatctctatttgaaagtagaattgcactttataaccagcgttcgtttgctaacagtcttaattccacctttttagtcctcattcctaagaaaggaggggctgaagacttgggtgatttccggccaatcagcttgttaggaagtttgtacaagctagtggctaaggtgctggcaaataggctaaagaaagtgcttgataaggtggtgtcaggggaccaaaacgcctttgtgagaggtaaacagatcttggacgcgtctcttgttgccaatgaggtgattgatttctagaacaagagaaaggagaaagggctgatttgtaaattggacattgagaaagcctatgacagcattaattggagatttctcatgaaagttatggtcaaaatgggttttgggtcgcggtggttggagtggatttggtggtgcatctctaccgccaaattttcagtcatgatcaatggggtgccagctggttttttctcgaactctaaggggctaagacaaggagatcctatctccccgtatctctttgtgctggggatggaagttcttagtattctaattagaagggcggttgatgggggtttcttatcaggctgcaacattaaggggagaggggaagaggagatgatagtgtctcacctgctctttgcggatgacacaattatcttttgtgaagctaataaagagcaagtgtccgctctaagctgggtgttggcttggtttgaggcagcttccggccttagaatcaatcttgataaaagtgtcctaattccggtgggtgaggtggaggatattgaggagctggctgtggaacttggctgtaaaataggaatgctgcccactgtgtacttagggctgccccttggagctcatcacaaagcggtttccatttgggatggggtggaagagagaatgaggaagagattagcccaatggaaaagacagtatatttcaaagggagggcgtatcaccttaatcaagtgtacgatggccagccttcccatatacactatgtccctttttcgaatgccgaagagtgttgtaaaaagactcgaaaaaatacaaagagactttctttggggagggggcagcttggagaggaaggtccacttaattaattgggaggtggtgtgtactagcaaggaaaagggtggccttggcatgaggaggattgactccttgaacaaagcactgttgggtaaatgggtttggagatttgctgtggaaaaggataatctttggaggttaatgatcggggtgaagtatggtcaggaagagtttgggtggaaaactaaagaaggtcggggaacctacggagtaggggtatggaaggagatcatgaaggaagctaaatggtgttgggagaatattaagttcaaggtagggaaagggactagaataaaattctggtcggatcagtggtgtgggaatgagaggttgtcccatgcttttccacagctttatgagatggcggtcaacaagaatgcaacggtaaatgagatgtgggaccatagcaatggtccaggtggctggaatcttagatttcatagagacttcaatgactgggagatggacatgattagaggattgcttattaggctcaaggacgtcaagctctcttcagaagaggacggggtgctttggaaagtggggggccatgggaagtatggggtgaaggaggcctataacgggctggttgttatcaatgcttgcgactttccgcatagaggcgtttgggtgaacaaggtccctaccaaagtggctttttttgcttgggaagccgcgtgggggaaaattctcaccttggataggctgcaaaaaaggggctggcagttccctaatcgttgttttttgtgtggttgtgaggagaagagggtaaaccacattcttcttcactgtacagtggtaagggccttatgggatatcgtttttgcccttgtgggggttcattgggtgttcccagagacggtgaaggaggctttattcagttagaggggcccctttgtggggaaaaagaggaaaaaaatctggaattctatcccgatgtgtattttttggacggtatggaaggaaagaaataggttagcattcaagggaggggtgttaaatatacagaaactcaaaaattcttttgtttgtaccttgtggagttgggctagggtgtatattggagaggagtcctcttcactcgtaggtttttttgagtggctagcaaccacttaagggagggtaagggtctttgtttttgtgctctcgttttgaggcagatttgtatacgtcctgtatacttggtggcctttgccctttaatatatttgcgatatttatcaaaaaaaaaaaatatatatggtttgtggtgtagcactggtaatttagcttagaactgcacttcaaatgagtttgtgtgatggcagtagttatgaatgcagtgtcagtgcaatagtcaatagtggtggtcatggggatgcaatgtgatcttttggctatgtgtggttgcaatttgatacatatttgtctttggttttgtttctctttcttatttttgtttatttctttggaggcctggcctgcaatgttggaattgaagacccattattgtcattcttgcttccaataaactaaatcttctaatttagagatgtggttgcttttgcaatagattttcaagattatgttttctctgctttttctttccatttttttcttttttcttttttcttttttctttttttcttttttttttctttttttctttttctcttttttgtctttatttccttctccctttttttatttttggataaattttggggtcataacaggattcaagatccaatttcaggtcaatttcataccctaaccaccagaacctttgaaaattttgcttagatggaagttgcatcccccctatcacaaagcacaaagttacaagttacaaactcttatacaattttgcaattgcatcaaatgtcttacattcagttacaagtgtgactactacaccatactgttctatttttcatggaccatgaaacattttattcccagtaagataacccgggaccttagctaataaattagcttcattctttagcattgttttctttctgttttatgaactcctactgaggccgtttggcatattctctcggtttgtccattaaaatttttgtggtagcatagcgggaatcccagactaactaggttggcctgtattttggccatgctgtctggtgaagattatggatggttttgcttttagtcacaggaaaacctgttccagtaaatgttgcctagaaaggtggctgattggttacatggccctatttttaataaaaatgtatgtggttgtgaagaagatatgaactaagtttatttacactactagttaaaccatgtatccactattattaactagcactctttatggcttagaatgatttggattgttttctaggtttattaatgtaaaatttccttaaccacagctgtgcatattctggtctagatctaaccaacatgaattaatgaatatgttgcaatatggagtgaactgcatatattgaatggaaaaattagcctccatttaattcaggattctttgttttcatcaatgtttattagctagttagagtcttctccttcattgttttctgtggggtattggctgattcctgagagccaaaaaatgtgggctctaatgttcattgtttactctagtgttccacttggtcctttaactcacttgtgttttctgaatgcatatttcatgtatttttgctatcagggtgggcaggcaggtggtcaatattccctcattca

SEQ ID NO: 10834 - DNA, 4201 bp, Vitis vinifera
  Intron number 1 from transcript GSVIVT01008249001 (locus G SVIVG01008249001) derived from phytozome v7.0 (chr-ID chr1 7; pos 4126881 to 4131081)
cgattcgtcgactcgtccctcgcagtcgtcaaggagtcagtgccctttcctcctttttcttctctctccctccgtgtgtagatttatatgcatcttaatggttttgattttgattttgattttgatttttgggagattatgggaaatgggcatctgtcaaaatttcatatggaatgggtattgtcgaaaacgtgattttgctgttgtgtgtggatgattttggtttgttaggatttgtaagtgcagcagcagggttggaggggttggctcattggtgtgttttaatgggttgatcgtttaaaaaaatagagaattgatgtgtggttgatgggttggtggcaatatttcgtcggctattggtattaatgttttttgtctgttgttttaggcgtgaatcattttgatagctggaggtgtgtcattaggaattttgtgatatggagattgttctctttttccccctcctccttggactcatatagaatttaatgaaggcagtgttgagaaaagggaattgtttggaggattgtgtaaaattggttgattttaggtgttggatcattagcaaagggaagtcggctcttgttactagagaatgtattgagaagatggatatttgatcgacatcctgtgtactttggatgggggtccttaaatttgtgaagaatctgtgagctagtgggttatgcatctactaacttggtgccctatatttctttggctattggtaatgttgtttcttgtttgttgtttttggttgggaatcattttgattgctgaaggtgtgcatttggagttttgtgatatggagatcataattttttttagctttggagtcatattgattttgatgaaggcagttttgagaaatgagaattatttagaggattgtgtaaaattggttgattttaggcaatggattgctagcaaggtgaagttagctcttgttgcaagagaatgaattgagaagatggatgtttgatcgaatttgtgaactagtgggttatgcatcaaccaacttggtgtcctatattgaagatgttctccattcaatgttctttctcttctctattactatattttaggctatactgattttctggctaaaaattctgattttgttttgtttacctggaggcttagcctgcaagcctaccctttagaagcaggatgtaccttttcttctattgttctaaaaacctacaacatttgtcttgtaatatttggtactatactttaatatgccaaaagatctaattgatgaggtcaacattttaaaaagtgcagattatattttcccttttttttcttttttctaaatggtgattagggatgataacaagacaagcactagccattatattgggaaggctttttctttaattatgatttctttgaagaacaaagtatttattatggagagaagtgaatttacgtgtaaaatattttcttttttttgcttggaataatcattagatgcatacactctgtacctgggctgcacccccttttcggcgcatacatgaagatgaagagaactggtccttgaaaaagaatagaagaaaaatatgatgatatcctcatagaaagaaaatatggcgatatttgatagaaagaaaataagtggaaaaataaaattgcaaaaaacctcatgattgcatacacgacaaaaccctcacaggctcacaactgagctaagatcatgtgaaatcctcaacaaaatccttaaggctatgtttggttggttgggtagaataggatatgataagataagatatgcatatcttaggatatcattttcaatgagatatgatattctaggatatttcatctgatggaaaggatatcctgacatattttatccatgaaatatgttggatcatcctcatgtttgatttgtagaaggaataaaaaaagaaatggaaaacatattgcatctcaatgtttgatatttgtttaataaaaatcatattgcatcccaatatttgctactattgtttggggtttttctttgtttttagttttctaaagttgggtgttttctcttttattcagtttttgtttttgtggaaaggacctttcatccttctcttgttttcttctctttctcttgtatatcttctttctcttgtatcttttcttcttttaatataattttcttcgtttctgataaaaaaaatatatatatttgctactaaaaatagtattaaatctctcttatatttagtatgatttggaaatcgttctactatttataatttaataagtaattttggtgagtgatattcatgattaaaatatttaaaatttataaataaaaaatgttatagtatgttgataaatatataaaaacattatatatatatatatatatatatatatatatattaaataatatatatatttgtattattttacattatatttattatatatacatatagaattatttctttcttttttgaactacaaatgtaacttttttataatgttttttttgaaaaataagtgataaaattgaaaaaaattatgaggagtaaatttatgatccatgagatatgtatatttcatatctcaatttaggattatcgcatcccatgtagagggaatgtaaaaaagaggttggataatatatcaccacttatcctgttggatatttggttaatgataagatatgataagtgattgtataacttattatatctcatcaccaaccaaacataggatataatatattattccacctattattctatctcatattatatacaagcaactaaacatagcttattaaagagatgtttgacctttcttgtgcaaggatttatgttatcagctgccctaggggtccaaaagttgcataatctgaacctcttaaatcaggatatttttatggggtccttttttatgaaagcatctttgcttattagctgataaaggggtctatgagatggataaaagggaactcttgtatcactatcagccaaataagccttcttctcacacagccctgtttactggaatcattcttaagcttctcaattccattagccacctaaatttgtttcaagaaactaggtttttggcatcatcttttttaatggtgtaaaatagtcagatgccctgtgattttcattaaaagacaggacaaaccatttaggaggccactcaacttgctaggattctgctggtaggcaagcacttgcctgttttcagtgctgctctttttgaatatttttggaggttttcttccaaatccaaagttctttcaaaccaagggaggatgagcttaggaatctttttggaatcagaggttcaaaaaagaattgtctcataagcaaattgcaactcagaggtgctaatgctattcctgtttagtaagataattccaatcactgctgtcatttgcactttgaacagaattcaagaattgtactcattacatttgctatcaatgtgaaatgaaaaaaaggagagtactacttgatgcgatagaccaaccttagcttcatcatgaatcaaaatagtgtaactggtggagaagatggagctacattcattatcaattgtctctaggttaaccaatcaagagtttatttgtgaatgcagcttcaggagagatggtatcttgtcaggctcccttatgcagtggataaatgttggcagtaatcgtgtatatgcttgtagagacaactgtctgtgaaagtgaaaagccaatttatcatttcccttttttatcaatacacttactaaagaatcaccagtgaaagaatgtctgttatccattttatcatccctatctaagatggtccttggtacttttgctgcaactgagtattatgaataaaatgccctctattctgattagtttcagataccattgattgattccttggcaatctgcaaaagctttttttccccccctggattacattaagtctttgattccattcatatatactaataaaattcttttaggtgattttccagatttacctgtgatggaatggaaaatctcctatgtcacttattttttcttaaattttgtattgtttttagtttccttttaggtggtcacttatgaggagttctttttcctcagcttcttgattagttgatttatatgttgtcttaccaattgagctttgaacgtatgtataagttctctactcttgatacaggtccgtgaagactatcactt

SEQ ID NO: 10835 - DNA, 3681 bp, Vitis vinifera
  Intron number 15 from transcript GSVIVT01019707001 (locus GSVIVG01019707001) derived from phytozome v7.0 (chr-ID chr 2; pos 2600202 to 2603882 reverse strand)
ctgcaaggcagtggaagggacactctggaaatactgttgggtcaattggggagaaaacccttacagctgctatcaaggcaagagatcctaatgccttcttcagtctcttgatttttttgttttattttgtttttctttttccttttatttggagtgtgatctctttgttctgaatagatagttagaatttgattgaagtgtgtcttatggttgattgggtgctattatttctcttagtatctactggtgtgcccatagtcagtttcagtttgttaaatttatgcagttcttatgatgtgaactttcttcagagttcatacaaaagagatcctaatgccctccaactaagtaacacctctataactgtctctgggaacacccattgaactccaaaaatggcaagggtaatctcccaaatagttttaaccactgaactatgaagaaaaaagatatggaatttcattccggtgtgcatattttggacggcttggaaggaaaggaataggttagctttcaggggagggtctttagatattcagaaattcaaaaattcttttgtatgtaacttgtggagttgggctagggtgtacaatggtgaggaaacctactctcttttaggttttttggagtggcttgtgaccacttgagggtgggtggggttttttttcccctctttttttgttttttctagccttgtgtagggctgttcagtataccccctgtatacgtgtggctttttagccttttctaatatatttggttgtttatctatcaaaaaaaaaaaaaactttcttcagagttcatagcattaaggatccagatatacacatatgcttatgggggaaatcatggtggatcaatattttttttgatcaataagtatataattgtattgcaaagaggcgctaaaatagcgacccatagaattacagtataagggaacttacccccttacaaaagggcccatacaacaaggaaaaaacaaaaaatcttctcccttaacgcataggctgatcctttcatatttcaagtttacagttaactctgtttttcatcataacctagtatcttctggatgagtgctagcagtaaatggctgtactgccttttgagcttattttgcttcatcatcttagctacaccatttttttcctctttcatcttttaatccttttgcacttgctatttctatttgtttaattgatgtctccttgtgcaaaagtttaatgcctcatacgtgagagcttgttttttatttatgtttcctacctcttgacatctctgcctcttctctttctattttcatattattgtttttctttacctgtcattgttaatgcctttaattgatagtgtttcacattttcaaaatctttggagagataaaaactcctcaaaaacacttactccttcaatggtttctactgcttgtaatatataattgtttcttttgtttacgggcacttatgcttgcaagaaatgttccaacaaattttggggggatgctatcattacagcaacctgattaataaatctcatgccttataaacccccattgaaaccttgaaaaattatttttcctctatacaatgcttggggtctctctctccaaaagttttttggttgcattgcttttgttcatattccaagtaaagacaaatctaaatttgatcctagagctgctaaatgtatcttcttaggctactctcctactcaaaagggttataaatgctaccatcctccttgaaagaaatttgttacaatggatgttagtttctttgaggaccaaccttattgttagtagactaatcttctttgttttttttttggataaaaaattgttggtgtaagaggcccaaaaagaagtgaagaaatgaactacatcccatactatctttgacgtcctccatttgtcctcaaagatcttatcattcctctctcgccatagaatccaaatcaaagtgagataagcaatattctaaagggtcttgcttctagtggaattcccaaaacccatataagatagtcatcatgtcataataactcctaggctgaacccacaccatcttttctagtatgaataacctatgccacaaccccaaagtgaacggaaaatgtagaaatagatggtcacttgtctctttactcccccctacatagtatgcaccagtttgaactaagggctttaaaagatcttctcgcttgaagcatgtcattgatatttaccttattgtgtgccactaacgaagtgaaacccttgaccttagttgagacttttgatttccatataaatttggttggatggaaaggaactgaattcgatcttttggacaaagtgaggaaaaaagattttactgagaataaacctaaagaggacagtgtctatgctcgtgcatctgggacagatgtggacaagtgtacatgggcaagagaggtcattgttctttcaagatccttaatctccaaatcagttgattgtgatgaaaaattagattccaagaaaaagagaagacaatgccatagatagctaaaatggagaagtttctaactatgacaactttataaaatcttgaaaattgagaacacaacggttgatccccctacctcaagtcttcccaaaaaattaaattagtagactaatctttagtggaagaaattggaagtggaagatcagtttcaagactggtccacacctttgcccatgtctacttgggtgggcgagagaaatggaaataaggtttagagctacgaaatcaaggggagtctaagcatttagagttgcttgtttacttaagaagactatgggaaactaggttgaaacgaggtcaaaatcttcttaatcacatatagtgacccttagaagaaggtacgtctcctaatcctcctaattctgccattttaaatcctcctgatgtcgtctaagtgtttgatagtgaaataaaaaatgtgttaggaattgtatcaaacatcttttgtcgaatttctagtcaaaatcttctcaatcaaatatagtcatttctagaagaaggtacgtctcctaatcctcctaattctacaattttagttcctcctgatattgtccaagtgtttgatagtgatatggacattcctatagtcataaaaaaatgtgttaggaatttgtatcaaacatcttttgtcgaatttcatatcctatcattggatgaacaacaactataactcctttactacaaacttgaattcaggttcagttcaaaaaaatgtgcaagaagcatttgtttaccctaagtagaagaaggcaatagataagaaatgaaagccctatataagaatgatacgtgggatataattaatctacctaaaggaaagtgtccagttagatctgagtgggtgtttatcatcatgtacaaagttgatggctttatagaaatatataaagcaagattggttgccaaggggtacacttagaccaacaggatcaactacaaagaaaattgtttagttcaggttgtgtctaaccatgctagttattttcttttcagtacctcctagaacattgattttgattgattaattacatgcacactaatgttgcctttatattatttcatgatgtctgcattttctatttgtattcactgttacagttctgtggcttctgcctgggttcctcaattagattgaaaattttggtgtgggtga

SEQ ID NO: 10836 - DNA, 8412 bp, Vitis vinifera
  Intron number 5 from transcript GSVIVT01029239001 (locus G SVIVG01029239001) derived from phytozome v7.0 (chr-ID chr1 1; pos 18145701 to 18154112 reverse strand)
gcgtatcacacctatttttctgtttcggatatcaggtatttacaaacttagtttgtgctggttctgatttaaatgatgctgagaagtgataaagtgataattttggtgtctccagtgtttaaattgacatctgataaaaaacaaaattgtttaaattgacatcgcttgctactttatcatgttactcatcatggatatgcctattttctcaaatatggaagttgcacactgttttgccatcatcactgtttaggttatggaggttataagttctcttctgattaatgcgttttgatgaaagttgattttggtgtggagaagaaggtgctataacttttgaaccacaagggcgaaatgtggaaattttgggtatagcatgaaactagaagtctgacattctgatattattgataaatctggtatctgagtattgacttctatttcagtctatgtcacatgattaaatatctattggtactatcaaaataattgctgacataacagcacaattgaatatctattgtcattatcaaaatgactgatcatataagcacagtattatcaaggtatgacggtgcatttattgaccaggtttgctgagtgaggaattcctcaaccccaaaacttttgcgatattgatgctttaatgtaagcacacgtcatgattccacaggcctcactcctctgacgcctcagaaatgactgcagcagaatctcaatccaccatgaaattagaaactgccaaagttcagccaataacggttcttccagaagggcttgagtctctgatacctaatcccaatctgatacatttaaagaaagctcaaagtatttcttcaatgatctcttttcatgttcccactccctgattgccctggttccatctaaagaacaaaattttaaaatttaacttgaagacacttgctagagaaggcctccactcagctcatagaagggaggcttcaatctaccaagaccaaactctgcaagatacctgaaaagacatttgtaactgatgtccaaaaggaggataggaaatgtactgtaccccacaaagcaatctggactccttcatccatcctaaaaaacttttggttgttcctccaagctagatggcccaaatcaaggtaaggcaagccacttgccatagtactttgtctccatactgttgctcaaaacttagcaatgatctgcatgtcttgaaagtgacccagtttctcccagcttgcctaaacaccttatgttaaagctctaacacaattgtagaatcaatgtcattgatgcatatggtccacttttttcctttgaaggtaccagcattttcaacaatatcaattttaatatgttgactataacattcatttagttaggtgggctatcgtctgcttagacaaaagaaagggtggtttggggttaggaatctttcatcgctcaatagagccttaccttgcaaatggagttggtgtttttctaggagaaggaggccttttggcagcaagttattggtggtaaatacagggaaggagggtggtgttttcacaaagtgagagaagggtatggggtaaggttctggaaaaccattaggaaggattgagatattttgagtagtagagttgcttttttggtgggtaatgggagggggggtgaaattttgaaaggacaagcgatgtagtgatgaattgctgtgcatttctttcgcctctttatttgctttagctacttccaaggaggcttgggtaagggatgtctggaatctatcagctgatggtggttgttgggaaccttgcttctctctgcggctcaataattgggaggtggatattgtggagtgtttcctttttagattgtaagggaggaagttgcgtagggatgaggatgataaattgatttggatagagtcaaaggatgagaaattttctgttgaagccctttataaggtgttggagttgggaagtcaagctgctttcctagcagatgttatttggaatttttgggtgctgccaacagtgggcttctttgctttggaggctacttggaataaggttttcactttggatcatatttagaggagagagtggtctttggtgactagatgtttcctttgtgatgtagaagattctgttgatcacatcctcatatactgtgacaagacaagggttttatggtatcttctgttttctttgtttggtgtgtcatgggtgcttccctcatcagtgagagacacttttaagttggcacaactcttttgtgggtaaaaaaaggaaaaaggtgtggtgggctgctcctctatgccttgtttggacaatttagaaggagagaaacagtaaaacatttgataatgagtagcattctatataaggaattaaagtttatttctttatagtctttgggtatggtccacattgtttatagctcttgtcccttcttctattatagattctttggattgttgggctcttgttgagggggtgccattttttgttttccctctttattttttggtggtgcttttaggcgtcttttgtatacttcctatgtactttgggatgctattttggcattactctttatcatattctctcattttatccattaaaaaaatgttatttatttatgttttttgaaagttggaagttttttgaagatatcatgaattcgagggatattgatgaaatagtgacaatatactgccaacatgtcaacatgaacttgatggatattgatgaaacagtgatgatatactaacaacatgtcagcataactcaataatgttacttttttcaaataaagttgatagaatattgacaatatactgacaacatgttttatacgttacagttatgttgaagggtaacatagtacagcaccgagacaccacaaaaccatattaatactttctccaatgatgaaatattagaatcttagggaatagtcatccaccaacagatggatggtcaaggactttagatatccactggatatggatacacatccaatacggatgttaactgagttctttgtgttcacctttaggtggtggtggcaccatataattctactctattccatctctaaggcaagggacaatgttactctgacaagttgctctactgatctcttatgtcccctttgagtgtgtcatccataatgttttaatactattatgcttgtttgagtgaagattagttcttaaggtattcaatatgggattggtgccccttgtgggatgaacacactttaccaccaaacgtattgtgacttgtttgagcttctcatataggatcattgtctaaagctaaaattctctagggtgtgagatttcatataggatcactatcatccttttttttttctttttgataagcaaacaaagcaaatctattagcagagccctaagaaaagggggcacaccctatgcatataggaagtatatacaaaaagccaataggcaacaacaaaaaatagccaccaacagccacccgcaactaagacaatctaagaagtctagaattgaaaaaattcccaaatctagcgaagcgtttgtccattcaaagggtctttaatgaggttcttctttaacctctaatccgagagctcttcaccattaaagattcaatggttacactctttcgaaatggaccaaaacaaacacaggggagccatatgctaaacttggcatatcttcttatccaatcccttaaacttccactcaagaagcaaacacatttcagaccaaagaagagatgccatctattaaccatccataacccctttgtccactcacagtgaatcaatacatggttagcaaaaacttttctctctttgcaaagactacatctattaaccattgatcatcacctcttcattaacatgtcaatagttataatctttcccaagactgcctcctgggtgaaagaatgagatctcagagcatgagaacaccatatttccttagttgggaattccattctagtttttgcatacaaagaattgtagtacaactttacatggaaaaaacctttcctaccctctttacaaaccaagatatgttctcctatgtcttgcactttggttgtataaataagcttcataaattgggatccatctcccaatcttggaagagttctctaaactgcaccaactactgatctccattgcctcgcccttcccataggtttgcaattgtggcattcttatgaaaagctaaactaaacaacagaggaaaagcttctttcagattgatctcccccaccaaactgtccctccaaatttttgtgcttctatcatttttaacctagatgattgtcttgcggctgtggtactatgtataacttttgatatataatttgtttgaaagcatctgtaacttctaattattaattcaaagtttctagttttagtagaagtatttagtttttaattagctgtctcacttggtttcatgaaatgctcatgagtttaactttttcatcttttcttttaatgcatcttctgcttctcaatctgtcattcaagtttgtgtactacagtcctaaacttagtttcttagttgcatagattttcattttacttttgtttcgtcaagagtagtttattaatttgcatgtttagaattgggtcggtacatatgtgttagcatggtgaggcaggcgtcaatgacacatgggctagattaagatgcttggtaaggtgcttgcacatagctatgcatatgtcagcatggaattggatatgtgaaccctatgactcatgggctcactttcttgggagttgaaggggggaggtttagtgcaggtttgaggttggggcagaaagacgtggtgcgcgcttgccttttcctcttaacatgaggccttccctatggatcttctctttcccctccatgcttccccaatttatctttaatggtgttagaggacctgcctttctcccaccctcatgtcgaacatgacctatatgcatgatcccaaagtgctcaacacctccttgagtcaagagtaggggctcaggcagcacaagatgagtttgctgccaattagtggctttcctccaccatgtatattatttgaggcccttgttttaatggctagacttaagagactctgtgaggctggtggagaccagatgcttgttcaggttgttgaatatggatccatagggaagtttgattctacgacgtctgtgagatactcattgctaacggtgtattacatgatgtagggatgatttaccttgacaccctagctgattcccctttgtgggcctgctagtctcagaaagcctacttcttgcaatggcccaagtggagctcatcatcgtctttgggtctctattccctttcaaggttatcaaatttcaagcccactcttagggattttttaaggactcgtgagatacctccactctgaacacctcttgggtaaactttctgctttccttagcttcccaacccttttttgcctgtgagttcattccactcactcttcaggcttggaaatctctttgtcaaaactggtaacatcctcaacaaagtatcctccattaacagttttgaataaaggttttaatttgcttagaccataacttccaaactcaagtatattaaaaacaaatatatatccatatatgctggtaagatgtgggtcaaacatgaaaatattgtcctaggcatagcatctgtgaataatctttgtaggcatccttgatatattatggatctagatagaagtgggataaagatagtcatatacagaataaagagttaaaagacatttgacttacacagggagataacctaataactttcgcttgtataaggaacttagtagaggagagggcaagtaagaggccaacatgggatccgctagtgccttggcattatgttataaaagaaaatcttctcctgaaatgtatttataaaacaaataaataaatattaaattaaatattttgaagtagtagttatggttggtggatcttcactcctttgtcttgccttccggcgctaattgtgtactccatgtgtactttggtgcaccttttccaagcgtatttaaaaaaagggctggtggatcttcaactgtactacatttttttatgcttattaaagaggatcacatgaatatgtaaactatgacgggaaggcttgaagaaggggaaataaggccttgagattttttgcattcttcatctattgggtttcattgagatttcaaatgctttttattgttaaattttctcttgttactgccttggcaaaatctgacatggtaaaactcagtatcttaatgaaactgcacaagtaagaaacttaaatagaatggctccttggatgattcttattacaagtcttcaacagtgaaaagggattagaaaaacttaccaatatgataattctttgacagtttggtccttcagatttctgcaggttgaggattaggaattttcttgtttgagccaatcatatttctatcctaaattctactgctcccgttttctataattttcaaagaatcttctgaagacatctagacgcttaagttctagcaataggtgcaatattgtgttgtgcactgtcgatcatgttatccatgtgggggctggcactgtatgttgtaaacattatcattttcaatgttgtaaactatattggctgtcacgttgtgaacttgtggttattttactttcatttggtaggattggtcaattgaaagacaaagttgtggaaaaaaattccgccaatagcatccagtgaaaattttttcaagacttgacataaataaacatgttgacttcatctcattttttcgtccccctttttttccctgttgcttcttttctttgtttattttatttttattttactcttttgattttgatttttattttcaaagaattttctgaaggagatgtctggacacattaagttctggaaataggtgcgatattgtgttgtgcactgtccatcatgttatccatgggagggttggctttgtatgttgtaaatgtaatcattttcaatgtcataaaaattgtattggctgtcactttgtgaagttgtggtttgattttatttggttggattggtcaattgaaagataagagcatggaaagaaatctaacaatagcatccaatgaaattttaatcaatacttgatataaataaacacattgacttcatcttgtttgtagttttcgttaacttttttctctgttgcttcttttctttgttcatttttgtttttttttttttactctcttaatttttatttttagtgtgcttcatgtgtggtgggatgggtggaataactgattcaattgccttactcaacaaagcccgttctttggttggttaaatgaatctttatttgggattttgctttctatgtagctacatatacctctaaagttataggtggcctttgcaccataatatgcattttgtaacagtgttctccaattcttctcacattggttgaagtcttaatatgttagtgtacttagtaatatatttgttcctcatttctttttctgaaaccattatatcataattttaggagtcagtccaggaatttttttagtcgacaaagacccattatgtggaactgtgctagattagtttctgtttccagtcaaacctgtttggatcactagcagggtctagttacagttattttatgcttgaatgtttcaaattctgtaatgtttggtcaaacaaattgggaaaatctgagtaaaaggttctgttaacttataaaaattcagcagctggttaagaaaattttatttggctaatttttttgttttactaatactaaaataaactgtataggaaatttagtgtgctaagaatatgaaaattagattaaactaatgctaatttgaaaattaattctgactgaagttctagaaaatgatgcaagaattcagaaacaacaggtttttttttttttttttttttaatatatatatttaaatttcttaatcaacattggattttaaatttgccactttctagcaatggtgctaatacttctcatccagatgggaaggcaaaatgtggatattttctgctacactgactatcaaagggcaaaagaagaaaaatggcttagaattgctggttttcagtgtcttatggtcaagtttgagattctacgtgtagtattatcagcatagaatattatcttcattggacaatttttgtatgtcttcttcatggccatctagctttctattgaagcatctcctacattagttattactaatttatacaaccttttctttaagctcatcattatgttaggtaacatatgatagagttctacaatctgtagttttgtgttgtctttgaattagtttacttgcttgtgttcagtgaagttcgagtggaaggattggagacattggatt

SEQ ID NO: 10837 - DNA, 15604 bp, Vitis vinifera
  Intron number 9 from transcript GSVIVT01026766001 (locus G SVIVG01026766001) derived from phytozome v7.0 (chr-ID chr1 5; pos 6694675 to 6710278)
cagcctcatttgaaagagaacagtgcttatcacaagtaagtttccctctaccctcctcctttggatataaccaattgatcagtgatttttaagttatttgtaccttttcctatgcttcttgtacgatgttgttggtaaatggattctacatgcactaagaagatactggatgtctctgggatcaagaagttaagatggtatcaaccattttttgatatctttttgctatgacgattggtatatatcctataatttcttgtgtatatagaacaagaggcaagactagatgtggtagagtagtagaccaaaaagaaactaggcaatcacactccagatctgcaatgcctggattgaatttcaccaactcagaatgaacaaatagactaagatcatcattataaatcctatccgtttcatactactaatcctaaccttaaattaaagcccaaggattagaaaccaaaaacaacaccaaaggtccaggttgtttaatgctaaaaatgctgtgaaggttaccaaattacagtaaatgaacagtagatcactaagctaacttaaacttttctgtgctttaaatacagaaactaaataattaaaatgtaaaacatatagactttaagtaaagcaattaaaagagtaaagaactatcacaaacatttttttcaccaaaagatttacttggggtgggacccatagatatcatgtaggttttttggttggttaatgtgtgagagtataaatgttttctcacaactttttgaatgtgtcaccaaagttttttggagttcctctaaacattacaggattggatgtatgtctatgacgtatgaaagtgtcagagatttggacctcaccttggagaccaacttcaatagttgctcatgggttgatgggattggctggctccaaaaagatcatgaggttgtgattattcgaactttcttagagtgctgctagttttgggatagttatcgaagcaaagatactgacattactagagggcctaaaaaatggcaagtagttggctgtctccagccttctggaagagaatggctacagttccttcttggtggctaatggaacgagagagacttggctatgaactttggataatggggttcatggatcatgctacagttttgatatgttcattctccaaacagtcaagattagataataaaaatgctgatttgctggccatgagaggattcatctctcttgtggttaggaagccaaggtggtctttgtggggagatttcttccagtcttttgcatccatttattctctgtcagaaggtcccttcatccttcttttcacaagcttgattcttacaggaccctacaagaaagaataatatagcaaatgtagacatcatgccgcaatgttatatcaaataaccagagacataccaagtgaatgttacattttttgagaggaaggacatctgtacagtgtcaatcaatccattgatagaattggtaagcaaacaccttttacaaggtttgtagatagatatccttcttctaagccaccttatatatgttgttggcttttgagttcaattctaccttcttccccgcatattcagatacgtttgaaaaatactggtatgcttccatcttcttttctgtcagttgggtagaaatcaaagaccaaaagactagacaagtgagctaatggtagttgtctgcttccacacccaatttttctgctctgcctcgcaaatagttagctcttttggctatttcactttccttttttctttcttcttttttttactttttttattcggaagagaaaatcacaatctttttttgaagaatttctgaattcctttattgattttttaggtacacaccatacacatatatatacacaaatgactgaataagaagatatcaatctggcttgattctctcctaaaattaggaaactgaatcatcctatatgatctctccttttttattcctaaaacaactttcctaaattaagaaccctaactttgaatgccaaatttcaacactccccctcaagctggagaatatatatcatataatcccagcttgcaagttaagtcttcgaagttaggcctatgtaaagctttggtgaggatgtctgcggtttggtgcttggtaggaacatagttcaatttaaccgtctcactagtcaccttctctgtgatgaagtgtctgtcaatctcaacatgcttgatcctgtcatgatgcacggggttctttgctatgcttatagctgcctgattatcacacatcatcagaattagagatgaactcgtttgtcccagttcactaagaaccctttttatccaaatcccttcacagattccctgtgcaagagctctgtactcagcttctgcactacttctggctacaattgattgcttcttactcctccaggtaacaagatttccccagacaaaagaacaatatccagaagtggaccgcctgtcaatgatgtttcctgcccaatccgcatctgagtatacttcaatgtcacggttctctgtctttctgaagaatagacctttccctggtgtcatttttaaatatctaagaatcctgtagactgcttccatgtgttcctcagtggggctgtgcatgaattgacttacagcactcactgcaaagccaatatctggccgagtgtgtgagagataaatcaagcgcccgacaagccgttgatacctccccctgtctactggtgtactttctttctcgataccaagtttcttttgactatccataggagtatcaattggtttgcatccaagcataccggtctccttaagaagatcgagtatgtattttctttgagagactacaattcccttccttgatctagccacttccataccaaggaaatatttcaaatttccaaggtctttaacttcaaactcttctgacaaatacttcttcaacttctgtaattcctccatatcattcccagatagaataatatcatcgacatagactatcaatatggccattttcccggcatgagacttcttgacaaatagagtatgatcagcctgaccttgtttgtaacccagctttaggactgcttttgtgaatctatcaaaccaggctcggggagattgtttaaggccgtacaaggatttttggagtttgcaaacctgattctttgccatactttcttcgaaaccaggtggtatttccatgtagacttccttttctaggtcaccatttagaaatgcattttttatgtccagttgttgcaagcaccaatcttgattgacagccaatgagagaagaatcctgatagtgttcagttttgcaacaggagcaaaagtttcctgatagtctatcccataggattgtgtaaaccctctagctaccaaacgagccttgaatctctcgactgatccatctgctttgtattttatggtgaaaatccacttgcaccccacgggcctcttcccaaccggcaaatctgtgatagtccacgtcccattcttctcaagtgcatcaatctcatcttgtactgccttcttccattctaaaattttgagtgcctcttgtattgtgttgggaacctgagtatcatcaagagaagtagcaaatgctctgtatgatggtgatagcccttcatacgtaacataattcctaattggatgatctgtacatcttctaacacccttcctcaatgcaattagcagagtagaatcatcaatgctgggaattaacacctctccagccctatcctcacctatgttctcttcaggaagacttgaattggagtcaatatattggccacatgttgactgtgatcagtgctctaattcctatcttttcctcctcctgatgtaaacttgtaagttctcattagcaagttgtggggctataggttgaataggcatgggagactggatggtcacgggagaaggaacatttgtgtgctgggctggctggactgatgacggcatgggtgtggacaactcagtgggcgcaaattgggaaggatttggtgactctgagtgaaaagaaggtacacccttaagaagagactcccaaacttgatgttcattcatgctctccccctgaacatgagatttgggatagaagaagacatgttcaaagaaagagacgtccatggtggtgtaaaatcttttgttggttggagaatagcatttgtaccctttttgggttggagaataccctaggaaaatgcacttattggctcgaggagcaaatttgctacgattttgaggatacacatgaacgaatgccgtgcaaccaaatactttgagtggtaaatcagaagaggctgcacgggtgtgaggaaattgttttaagaaaagttgacgtggggattgaaaggtaagcaccctggatggcatacggttaatcaaataggtagctgtgagaatagctttcccccagaaatagtttggaacattagaggaaaacataaggcaccgggcaacttccaagagatgtctattcttgcgttcagccaccccattttgttgtggggtgtcaacgcaagaacttatgtggataatgccgtgattttgaagataagtactgagactactagtaaagtattcctttgcattatctgacttgaggacttgaattttggaattgaattgattttgaaccataagattgaaggtttgaaaaatgtgcccgacctctgacttttctttcataaggaaaacccatgttacccgtgtatgatcatcaacgaatgtcacaaaccatcgagtgccagaaatattttttatccgagagggaccccacacatcactatgtactagagagaaaacagtcgaaggtttgtatgggatttgaggatatactgttcgagtatgctttgcaaactgacaaatttcacagtgataagatgctggatttttattgataaataatttgggaaacaattttgcaaggtaaacaaagctaggatgaccaaggcgatagtgtaacattataatctcactatctttattgaccttagaatttgacacagaattgaaagactctaacatactatgagactgtacgcaacttgcttgagagacttggtttgagaattggccacatgagaggaggtagagcccggaacacagttcagcactgccaatcatcttccccgatttcaagtcctgaaaaacacacgagtttggatagaatttagtaacacattggagatcacgggccaatttgctaatggacaaaatattacaatccaagtttggaacatggaggacagagtcaagatataagtctttagtaagttttatagaacctgtcccgacaattttttactttgaaccatcagcaatatggacggatgaatgaccattacttggcttgtaattttgaagaatggcaacatctcctgtcatgtgatcagaagcacctgtgtccactatccacggcttcattcctcctcgattagcagtgagggctatcccggtagtactgccactgccaacttggcttaatagtttctgtagcatctccatctgctctttgttgaatggactcggctcgggaacagatgtgctctcagagttggcagccacatgtgctctgccatctctgtcagaccgtggctttggtttccaatcagccggtttgccatgaagcttccagcaagcctccttataatggtctggtttcttacaataatcacaccaaggtctatcccgtttctgacgatctccactactactattaaatgaccgagcagcaagggcaaaggcatccaatgttggggcaggttgctctttggatcccatcatcactttctttctactttcttcacgcctaacctctgaaaaagcctccctgagacttggaaggggtttaatgcccatgattcggcctctaacatcatccaattccctgtttagtcctaggaaaaacttgaacagtctcttttgttccacaattttcctgtatgttgctgcatcatccgaacatttccatgagtgagtctcgaataagtcaagttgctgccaataccttgtgagtgtgttgtaatactgagtaattgactgctctccttggcggaagtcatgtagggctaattcaacctgaaaaagttctgaagtattttcagaacttgagtaagtttctttggttgcatcccaaatgtcctttgcagtcctaaacagcaaaaaattttcacctatgtcattgttcatggaattgataagccatgacatgatcatgctgttttcaatcttccacttcctgaaacccgattttgtagtttctggcatagctgcttctccagtgaggtactcatcctttcctttaccgcaaatgaacagcaacacagattgtgaccactgtaaatagttatgaccatttaatttgtgtcctgtgatgagaataggagaggaatcactgccaccaaggtttggaatttcagatctgccccctgattctggtgacgtgacgttggatacttgtgatgatgccattccgtattttgtcatggactggaaaggtagaagaacacttcccaaggcacgtgcagggattggagttgagaaaaaatagtcggaggacgtcggaaaaattgatcggagggcccgtggaggcaaaagaaccccaaaagaggcacgtgcagggctcggatggcagaaacaggtaagaagggtggctggaggaggaagcgcgtcgccggaaagtggctcacgcgccctcacgcgccggcgcgtgagatgcagtggccggccggaaaaacgcgcgtggatgcttttctggctccggtgctttgggaaaaattggagatctcctccaggcggtccttgcggtgtagaaaaaaaccatcgtcggaaagttcgccggaaaagttgccgacggtgaatgttttctgacgacgattcgaccgaccggaaagcgttttctcccttagctctgagaacagggactgatgaccggaatgagagatggccagagagagatggtcggattgagagatggccagagagatttgaccgaaataaatgatggcctgaataagaggtggccagaagggattagggtttcagaaaactggctttgataccatgaagaatttctgaattcctttattgattttttaggtacacaccatacatatatatatacacaaatgactgaataagaagatatcaatctggcttgattctctcctaaaattaggaaactgaatcatcctatatgatctctccttttttattcctaaaacaactttcctaaattaagaaccctaactttgaatgccaaatttcaacatttttatttccccacaattgcaccgaaaagaaagaaaagaaaagaaaggaaagagtataaccaattagttagggccttgagctgaaaaaattgcaaaactttcacaaggaaagttctgactctctttcttcccctgggaatctgaacttgtttccctgcacaatcgaggagcaatatgaaaagactaggcttattagcaatcaaagaaataaaaaagtacaaggaattgttcttgaactttccagctgacttttccactttaagtttccacttatcatcagacctctttccttttttttttggtacatgacttgaaaacagttttaggaaagattttctttgcaagttttgttcacatgcaatttagattgcatcctctatggcattgaagagaaaagcggctaacaagaggcaatttgccacctcaaaccttgtcaatgtgtagcaatattagatcactgccaagttatatgatgggcttggtgttctgcttgtacttaggaactgatcatggtttgtttcatctcatcccgtgctctaacatttccaaatccttcttttttgtcaagtcattgttgcttaatcctgctcatacacaatggatgttaaataaaattctgatcttttcaatccatttcgtctctaattattttagaaaataaaataaaatttcattgaaaatgttttaaatttttgattaaaaattaagaccttttggtatggaaattattgaaatattgaaaacttttgtttcttaaaatgtgctttaggtggattcgtaattataggttaaaatccttaattatacttgcaacttgattcttttaaaatcctcccttagtctacttgactatcagaagtcaagattatttgaaggtggttagaggcgaagataagtggttcgaggttgtggatggatatagttgaatcaattgagtttttcaaattctagttgtcttgattaaattttatagtagaagatcctaaggtgtttgaagggtgttatttttttaactaaggggtcttttttgctttatttataatcgatctaatcttaagtatgaccagtccttaagaactgacaatgggcagttttatatatgtatttatttgtccaaatcaaaattttcttgatcaatataaaataaatctctgaatttattatgattgaatcgcaactattggattgatctacaagtcccactatttagacccaaatttccaaattatagttcaagggaaacacaagagtcttaagacaccccctttgagctcctcattctttctaaactgggaatacttgtttccaaagaaaagctaccttattttgagctatgaaaattggttttattggggtttcttttcaaaaaacaggttgattcaatttgtttgtccatttcttatctcattattgtatttagatgggggtaaaattcattttcttctttattgggcactaagaagtggttgagatcaagcttggtggtgactccgagtgtgttcctgatgtcaaaatattgtgtgaatggccgaataccttggccttgagttttgtatattatatatagactttacaaggatgctatacatggaaaacaaaaaaaaccaattaaattcccgcatgattctagccctatacatgtaaactataatctatcaaataatatatgctaactgtacagaataataaatggaaaaataaggaaacaattgtgggctaaaataaggaaagaagtgtggacagcaaagctgtcctttgacagcccccctcaaattgatgcaggttgatcaacaagcatcaatttgctacttagcaagcaatgttgatgacgagggagagccttggtgaagatatcaacaatttgtaagtcagtggaaatatgtagaagagtgataacacgagcttcataggcttcacagatagagtgacaatccacttcaatatgctttgtgcggtcatgatagacaggattggccgtgatctgaataacacttgtattattggcatgtagaggtgtaggatcagtctcagaaaaatctaactccgcaagcaaacctcgaagccaaatgatttcagaacaagcaagagacatcgcccagtactcaaatttcgtagatgacttagagactctgtcttgcttcttacttttccaagagatcaatgcatcacctaagaacacacaccaaccaatgatggagcgacgggtatccgcacaaccagcccaatcagcatcactataagcaacaaggcgagtagaattgcctgcagggaagaacaagccacaagtagaagtgccttgaacatagcgtatgatcctacagacaacagccaaatgaagatgacgaggagtctgaaggaactggctgacttgctgtacagaaaaagaaatgtcaggtctagtaatggtgagataaacaaggctacccaccaacttcttgtataaactgggatcagcaagtaagtcgctctcctctttgcgaagcttgacatttaattccatgggaatatcaacagaagtagccccttgtagaccagctgtagccaccaagtcactcgcatacttatgttgattgagggaaataccagagggactatgatgcacctcaagaccaagaaaatatgtgagagacccaagatctttcatatgaaaggactcgaagagatgagttttgagctaaccaagtaaagcaggatcggaaccagtgatcacaatatcatcaacataaaccaaaagaacaacaatacccatgtctgatttctgaagaaacaaggaagtgtcatacttgctctacttgaatgaaaattgtaataaagtggtgtggaatttatcaaaccaggccctcggagcttgtttgagaccataaagagagcgacgaagcttacacacatgtgaagtcggagagggaaacaatcccgggggtggcttcatataaatacactctttaagatccctatgaagaaaaacattttttacatccatatgatgtagtggccaatcactggaagcaacaagagctagaatcgtacgaatagtagtcattttagccacaggagcaaaggtctcttcataattgacaccatattcctgattattcccaagtgcaacaagccgagctttgtaacgatccaaacttccatcatatcggaccttgactgagtaaacccatttgcaacccagaggaacaatagtgggaggacagggctcaatgtcccaagtgtgattggcctctggagcggcaatttcttcctgcatagcttgtcgctaacaatcatgcttggcagcatgtgagtagcatgtgggaatatcaaaattggacaatgtagcagtaagggctgaaatagaattgccagaactggaagagggaaatccatacctattcggaggtacagacactcgaggagagcgacgtactaaaggtgttggaggtgctgcaattgactgaatctagagcgtggtaggatcagatatcgggtgagccaatgaaagagactgtgggcaggagcgtctcgtatacacaatacctggttgaaagtgagaactgattggatgaagatctgagaactgttgctcaaaggaggggaggaccatagtagaagaggatacaggaaagaaatgttgattttcaaagaaaataacattccaagaattacgtgtacgatgtaatgtaggatcatagcaaacaaatcccttttgacacattatatcccaagaaagcacatcgaacagattgagcagataatttatatcgctcatgaggaggtaaatgaacaaagcatacacaacaaaaaatacgaaggtaatcataactaggttgcttagcaaataagcggaaatagggagactccatatgtaggacttgagaaggtaaacgattaatcaagtgagtagcagtttttagagcctctacccaaaacatggatggaacagaagattctaacaaaagagtacgtaccacatctaggagatgacgatttttgcgttcggcaactccattttgttgaggagtagaggaacatgaacgatgatgaataatacccttagaagccaagaatgcttgaaactcagtagacaaatactcaccaccggaatctgtgcgtaatgtcttaataaaggtagaaaattgattgtcaacatacgctaaaaactcagtgaaagtacgaaagacctcagatttagagcgaagaaagtagacccaagtaaatttgctatgatcatcaatgaaagtcacataatatttaaatttctcatgtgaactaaccggggaaggtccccaaacatcactatgaataagatcaaagcagtgagatgctctacttgcatgcaaagggaagggaagagttttacttttaccaagtctgcaagaatcacactcaagagataaagaagaacgatccttattaccaggtaaatcaaagttcaatacatgagataagatctaagtattgggatggcctaaacaacaatgtcacaccatactaagatttgaaacattattaaaagcaaaagacttaatagaagaaagtggagaaaaatctagaataggtaaaaatagtggaaacaagcgcctcactttaggtcccttcgcgatcggctcccccattacctggtcctgcacaacacaaccattactagaaaaattaacagcacaattgttatcaactaattggccaacagaaagcatcgccgatagcagctatgggcaaagagttgccattggtagtctgaatggaagattgaccagcgtagggccgaacatgacacaaagtggtgggattattagtcatgtgattagaggcccccgagtccacgtaccagagtttagtagaatttttaccttggaaccccattgctgataatgctgaaattaacatccgttgcaccatttctggggtgcagtaatctggtgcaggaggtgcaggaacagagcacacagctaaaggagagtcgtgtgttgcagaagttgctacaggagggataataaccgaagtctgaaatgcttgggcctgacgattctgagggtgaatatgacattctttgataatatgacccttcttcttgcaataagaacaaaacttcttaggacaagtggcagcaatatgcccatattccttgcagtagaaacactgcaagtttttagaatgcataggtggtccgcgtccttgggcagcataagctacagttgccgtcccggaactaccatgagattgctccagaatagcttgagtactaaggcgttgctcttcacgaagtaactcaccaaaacaaatatcaagagagggaacaggagatctgttcagtaaagaggagaggacaaattcatattccggacgtagtttcataagaaaccaatcatgccgggtagtcacgtgaatagtctgaatagttgagagagcggtaataggaacatccgctgtaaccaaatcagcatattcatgccaaagagtcagaaatgccgagtagcagtcttggatggaaagactatcatgttgaaacatggcaatcgcatgttctaactaaaaacgacgagcatcgttatcctgatgataaactttcttcaagtaagcccacagattgaacagagcgatggggccgcaagtgggtgacaatatgaggctccactgaaccaagaagccaagacatgatgcatgcatcaagcacagcccatgaaggaaaggacccaacatcctgagatttgtcaaaagtggatggtttttcaacatccgtgccatcaatatgaccccaaaggtcttttcccttgagaaaaagttcaaactgaaaagcctaggtagaataatttgtgcctgtaaacttaacacatacaggtgcggaatccatagaaaataaatagaacccgagacaaaaggatagaccaaaaaaaatcccagaagaaaattgacccacgacaaccacagaaataccgagaaaaatggttgtggttgggtgcagcacggatcaacacagacttgaccgaaagacacgagaggcacctccgaaaccgagaagacagaaaagaatttgagggaagaaaaattagcaaccttactctgataccatgtcaaaatattgtgtgaatggccaaataccttggccttgagttttgtatattatatatagactttacaaggatgctatatatggaaagcaaataaaagcaaataaattcccgcatgattctagccctatacatgtaaactataatctgtcaaataatgtatgctaactatacagaataataaatagagaaataaggaaagaagtgtggacaacaaagctatcctttgacacctgaagctgtatggctgaagttggaaggtgctcatcaagtagttcggaagaggattggtggacttgaaccaagcaataccttgtattcaactgttctttttgtagtggaatttttcagttgcttgtagacccgtgattttttaatctcttcggagatttttcacgttaaatccttgtgtcattgcctccttctttctgtttcttcacttcattaattctatcgacttatctatgcttgtgaagttaaaactgttaaaacagtttgggttgttgattatattggttgaatcttatcaactgtgcttaggaaagtgttgaaaggattggttgggtattctaatatttgatggttcttgttgcaaggttaaattggtcttgatttgggagtgttgatttatttgcatgtgatttgcattgttgaaactgttggaaaagtgatggtgcatccatccttgcaagtgttttaattgtttgctgaaaatattagaagacaaaaatagagaaaaatcaggtgaatgacagcctttcattgggaaccatctctaagttggaattcattctcccctctctaggtgtaatcgatagctaagattcatctacataggcttttaaaattattaaaattgcttgaacttgggtttatgacttttactactaaaaatatttttcactaaatttgaaacttgctttactaaaatgaagctggacagcctggaaaagaactaaaagatctcaaattgactagcagctatagctattggcattacattttctcaaaaatagcaaaggaatggtctgtagttcattttcaagtcattcttgatggccttctggtactgtgaaaaggcttcaggcattaataaaatctctttgttgggacggtgagactctagtgcagtttccatacctggttagagaagatatattctatatggaaaccagagccaacaaaggtgtgaaaggaattttgggccatgggacctgccagctccattgggccatctatgggttcctgtatccagccagctacatgaagagaaaaggaatgaggactgactaccaacaaacctgttttctaaggttgatcaataattcaagtttagcatatcagagtttcaaaaattgtttgggtggtgttttttttttcttttctttttgttctttcttacattgtagtgttgaccccttattttattttaaattggagggaattctaattagtatatggtcattttgatgtaggaaaaccctagggtggttttctataatcaaataggcaagctaggacatcacaattcaaaatttcaggagaggaactgtggttgaaggttggtagcagggaaaaagaaaatagaaaacagaaaaaagttaaaaaccttagagttgtactaaggcctttaaggagtcttaccttcagagaaataatggaagcttgccattggaaattgtgaagtgtacagaaaaattcatattattcatcattagtgttgctttataaaaattagtcttatttataggttttagaaaaaccttaaaaactcaataaaaccaagaaaaaggaaatataacttgtatagtaacttattaggactcttatttctttcctaaaagttctaaatcttccaaataaagattttttttttttttaagtcggaactttccttttagagtctaatatagaagactttctaaattctaaaaaccactctaatagaaacatgtagaaaaagaaaaacttttataaaagaatgtttacaaacataggaactgctttaaaggagaaatttccagtaaaagattttccaaattctaagaaagactcaaattccaactacatgttaatcatgagtcttaagaaactaaagatctgaaaatgttcccttttctcctttttcttggacagaccttggagattcattctcatcatggttattatgtttttcttttcaaggcaacaccttgctttggttcttcatattgtcattttcagtaattacttctctgcaggttggctgttattaataagtgcttttctcggagaa

SEQ ID NO: 10838 - DNA, 5312 bp, Vitis vinifera
  Intron number 5 from transcript GSVIVT01033137001 (locus G SVIVG01033137001) derived from phytozome v7.0 (chr-ID chr4 ; pos 8259244 to 8264555)
ttgctaatataaatcacgagcaaacaagacagcctgtaattgaataactgatagatcatttcctttttcctgtgttctttatgctggtggcatcattacccacaacctagagtttaaaaaaataaaaataaaaaaatgtagtcgtgccatagccatagacatttcagttgaatgattgtcaaatgccatctatttgctatgaacaataattcatcactgagaaattgttttgctatgaaataaatgttattgcaagaagtcatttcttaccataaaaatatcgtcttagctaaaagagttacggaaaatggagaaatttgttgtaatggattttccaaaagcttgccggccggatcagtttaatccaagatgggattgaaaaggatgatcttcgtggaactgaatgtaccttgcagttcatggcaggactaggacagggaggtttggtccgcttctggtacatgctataatagaactgaatgtatcacttctattatagcagtttgcaactctccccttttatacaattcttttaacacagtggatttctttcttcattactcatagtttttcctgtttagcattttctatgtaaatccatgttttcttgttttatttatttattattattattattagcattgtctattctttttattatgtatcataattcattaattctgaattatataatttttggtgagaataaatattttttatttacaaaatatttgaaaaatgaccattttcattcgaagggtagtcacgtatcatcataaacctattaaattccatgcgcccgagtgcagaagatgataagtccatcaccatgtgaatacagtactgccaactgccacctaacattagtgactattggaattcaacaacatgctacaggcgatgaatagctccatggagttcatcaagaaaacctctcttttatgactttactgggtcaaatgctaactcaaaatgtaagctaaaatgtgtgtttccatggaagaatatttataaggatacattctgatcatgatttcatccttataactatgcatctgtgccttgttacagtgccttcgcttctaggcttctaattcttacttttccaaattctagaccctataaatgaactatattctgcattattgtgaaccatcaagcatcccaaatgtagttcaaagatgagaatgaaccttactcagctagggttcttccttttctttctctccctatggagactctttatagaaatggccatggctcagaacgtgcacaacaatcccagttaatgtgggagtggtccttgactttgatacattgctaggaaggatgggtctgagctgcatccccatggccctctcagatttctattcctctcatggtaactacaagactaggcacgttctaaagatcagactagagactccagaagagatgttattggtgcagctgcagcaggtactcttatctctgttcttctcactctctcacagtagtgattaagttttattaagtgttatctgacctaatctattagagtttcttcaataaatatgccttattatgttaaaacaaacacacaccttaaattgttattatcattattcttctgtgtattaataatactcttaagagttaactcttatttgaagttgaatcattgtgttgaccgcatccctcaaaatgttgaagacttcactaagggctatgaggtaccatgtcatggatgtgaagacaatgtaggtgttgatctttgcaagacctctaggagaagcatctagtctaggtaaatctgtgtacttgttcttttagaattaatagatttgctctatgatcaattaaattcatgaattttgcatttataaagtttctagtatattctatatgtggttttccataatcacatgtcccttgtatgattgaattttattttgatatttgattatcacatattcattacaaaaaatttataaatgagaaaagaaaaatcaaattttttagtttaaagcctaaggcttctaatttacctctctctaagtagtttcaagaatcaagatatataagaaatttcaaattatattaattcaattcactaatactattgtgaagaagatagtcaagcataagaagtgacattgcatgtatgctctaattgcttgtgttttattggcttgattgaccacaaaatagggactttttttttcttttttcttttttaatcaagttgtattttttttaatttggtttcatctctaaagtcatctattaattaaataaatagaactcaacttgacaaagtataaaatagtttttaattcagactttgcttaatccgttgattaaaagtaaacttccatacaactttcaaatagtagaattcacttgatttggactaaggagttcattttctacaaacgcaagtagtacttttcatagtccatatgctctttctttttcaatactttttttcttttgaaagagaaataatttcgattattgctattgttttaacttcattttggtatttgaatgacacaagcaactagcttcttaggtactagaggtaactatgccatctcaacaattacaaaatattaatgaaatacatgtaaaaaaaagaaaaaagaaaaaagaaatataacgagaataaaaaacgaatgcaagtaattttttttccacttcattagtgtcctttcattatcatttatttagggttcatccctacaaatttccaagttaatttaaacatataaatctcttttagttttctcaaatattttatatcatctacacgcacaggccacgaaattctgtcagttatcatttagcaaattaattaattttagacattagttatgattagtgatcaaattaacaaccaaagaattggtcaaaaaaatgtttaaacttttattaaaaattgtatataaagcatttaaagaaatttatcaagagaattttaaaaaaaaatagcaacaaattttactagaaaatgttcaacacaaaaaggccctttcccccctcattttttaaattttgctatgtttcttaattggagtagttgcatgcatggctgacattttcttagtggaataaactgatagattcatctcagatttcccatatttctactgatctatctatgcatacgcagtactcaaaataaaaaaattaatatgagactttgaagaaacatacaaaattcctctttggggtggttaattgcttacttgttttggacataggttcatctctatctatcataaaaaacttctgtttgaaaaaagaatcctctccacttggtttgaaagaagataaagggaaaagggcaaatgctgaattttcctctgctcaagttgtattttcttgtgggcattcaacatgagaataacaaggaaatcaaaagctttaatttcttgtgaccccttttaatttatagcctcgagatggatgaaatgatataaatattctccgtctcatcccttttttttctcctttttgtttaactataagtataatgagtgaagcaaagcactgatttgtattttttttccttatcagtcaatgctttcacacctaatgacatacgagacctgttagattccaagaccaagacattacttgcattttattattgctattttttgggaattcaaattcaacactctcctaccgtgactttgccccaaaggtcataagttttgggaagccatgcatatgcctcatgacctagattttttctatattgttattgtacctaacactaaacttgagagagagagagaactactcttattcaatgcttattaattaggatttagactccgagagagagagagagagagagagagagagagagagagagagatagagaactactcttattcaatgcttattaattaggatttagacccattgaagccgtaacatgtgtaggtagaaaaagacaaaattccaagatgacgttctttcacttataagttgttcagtcttattttcttacaatggtaagaaaatatctgccttacatttggtacaagcataacctaaatgaatgccaagcactaccatcaaacgctggtaactttgaaatatcttgtagctgactaccaaagatgttaacttctacatgttccatactatttccaaccaacacatgatatcatggtgaagctgagtattggaactccactgaatataatacaagaaaaacaatattgaatagtaaagcttgaattaatcttatgccccaatatagaacatgtctgggattgagctctccactaagcttgcaatgattggggttgtagctattttttaattaggtttcattggccaatgaaaaggaaaagcatgtgattgtaattgagaggagattaaagattacattagtagccaagctacattgaccataatccaaagcagaatgagagcttttattattacaacctttttatctttgtttaattaatgaattttaaagtgttggtgtattaaatgaatataaagattacattagtagccaagctacataaaatttgttttgttttgtttttttcttatttcagctcatgtgtggaggtgtaacgactaaaggtagggttaatttttattagtaggaagaagctatcataggggttgccacgaagcttcatacaaaggtactatcataattgtctctctcaattaataaatgtcaactaatgttgatgtaatttgtccccccctccccccaattacttgtaatatatatgctgggagttgaaaagaaatcaaaactctgaggatgctgtcaaatcgtgactttcggtgacaacacccaatatttaattgcttattttacaaaaacgtctttgtagagcatcatcattaaaattattgacttactctatacttattgtagcattattattttaatttagatgcaatatatttataattattttattacgattccatttattttttaaaaaatataaatgataaaataaaattggggtgggaaaataggagtgactttctgccatcccaaggagcataaaagttccatgcatccacggtgtactccagaagtattcctttctattcaccacagtctacttggggtcctttttgcttacgttgtagtgtggcctttctgggatgctgctgattcctacttttcaaattctaaattccataaataatatctgtattctaccaaacattatgagtcccaaagcctcccataaaacttcagaatgagaaacaaccttacccaattccctttatatctcttctgctgtctgtctttatggattttcttcacggag

SEQ ID NO: 10839 - DNA, 4620 bp, Vitis vinifera
  Intron number 7 from transcript GSVIVT01000588001 (locus G SVIVG01000588001) derived from phytozome v7.0 (chr-ID chr1 ; pos 6773382 to 6778001 reverse strand)
gcaaaagtaagttacactagttggggtaggagggaacaatattccctattgctttccttctactttcttctgaacataattagatgcaagacttaatagtcatgtgctaaagacagattagtagcttttattagcatattaaatgtggattttctttgtggggttggactcgtaataccctgttgccaggtgtctggtggtttaatatttgtccctgccaattctcgttttgaaaaaattggcttgtgtggtgtgtggcaacgatacacttgaaaccttcttgtgttatattattatttgagttaattgcccatgtatctgttttcccagttttcaacatgactaaagtgatacctttagtgattgctatgtgcatgaacagtatgaaggatttacaattcttgtagtggttttttcttttccacttctaacgttatctcgttggttgaattttctattaaaatgtccaatcaggaatttcccctcattgcttacttatctgtgttagttcatgtatacatactctacatcagttgtgggctaattatatttttttgcagatcattctctatgtagctaaagtttatgtggagttctttatggagatgagatattttacttgatttttttctgctcttagaatgcttgagtatgtttctgattgggttgtagtttagcgaaatttgcatttacttattagtacaacagagtttctgtaatactaattccttgcggtaagattgccactgatgggtaccaagacttgctcttcaaaataatcaattggggggaagatatcgttcttctggtttaaaaggtgctgttggttttcattttgagatttatctaacagtggagcattagtgagtctgccttttacggcctatcatggctttataatatgtagcacatgcgtttctcagcctccctttagatgctgcactgtaattctgttgatttgagaatgcatgatgcttgatgatgttgatgttttaagcattaaaacagtttcttgctgatttgtgtctgcttcaagtgttattgtgttgggtgatttaagacttgcaagttgcaactatgctattctgaaacttttctttctgtgcagcagctccaaaatttatgtgagaagaatttttgttctaaagcctatttatgtagttttagcataccttatctgaccattttgtaagttaaagcctactttagttggcatcttttgttttggtagactgaaaggtgaatgagagtgctggctttgtaagccttgccactggtagatctaatgaagaggagataatattttctctggtatttggctatctaacagaaagaaaaggaaagaaaaagggaaaatcctttggcatgtatcccaactaaggctaatggatttatttcttgggtttgtctaaaagaacatgagcaagttcacctcttagggcctgccttgtgattttagtaggtagcatggacacttctttttgtgccaagttggtattgaacagtcatgttttgatttgcctggaatagtgcttggcatacctctgcatgctttgaattttaaataaatgttttctttagataatgcatttgacacatgattagaaatcctatggatatagattagggacctagaggggcttgaataggtgcgacaatcaattcaattgtcgaatctacataacctaatctaccaactttagttaatacatggtctagtcaagatcttaagaatagccatttgaccaactattaagtgcaacaaaaacaacactgaactagatcaaccattttggggtagatatatcaaagatatgtttagatttgatttacttaatataatcctaaagttttcactaacaattaataggtgcattttctttacatgaaaaactccctgaaattgcatgagaccatctccaagttaaaacttacatggtaaaagttaatgcttaattttaaacagtgaatcctaatccggagtgtgcaaatcttcatctgttgactcacacatggtgaaagttaaggcttacaagtttagtcaatgctcagtgttacatagcaaatccttatctagtgtccattaaattttcagttgttgattcatgtgtctttcaaatgtttgaattgatttcatgattttccttttcttgattgaatacacaatctgcactattgactaacaagtttgttacccaccataggatgaactgaatttcttcagaatactcatacttgagtcttgaatgtgggtgtcatttggtgaagctgaaaagcctttaaattgtccagatgcaagaagagctcatcttcaaaattttgacaaaaacaaaaaattgaagttactcgatggtattatcacttttgttagcagaacttgctaaaacaagaaattcctaacatgattgacagtctgtttacatgattgaagaaatttttaagtaggcatgaatgcaaaccttcatcttcacagctttattataacaatggagtaagtggctcaactttctactaattttttgccggtggaatttaccaacccactgaattcctaaaataatcatcacagataaaaaaaaaaatgctgaggatacgactctgtgatatgagaagagctagtttactgcatgacttgggtccgagtgtttagccatgtctgctaaagcataaaccaatctgtgtccagtaaattctttagagtttgggctctacatggttcattatatacccatgttcaaatgggtatataatgaaagagcgttcaatgatattgaacggtcaaaccaagctttaaaacattcctttttgtatacccttgtaaattgggctagggtgtttatagaggatcatactttgtctacgattgactttatggaatggctatatgtctagctaggggaaaggttttttttgtcttctttgcctagcttttttggcgttttgattgtattctttgtgtgtactgtttttgccgcttctaggcccttctatttcaagctctatttacctatcaaaaaaaaattatatacccatgttcaaattgtttttgggatgcaccacatgatgcctactctatgatatcctgaccctgagaattggatgaaacatatgcatacgaatgtttgtatatttggtaagttaagttttgttggttgcaaatggatgtttccacctttttgtacagattttattgaagccatatcataattgcattgacaataattccgcctttaagagcatagaaatcatatagcaggtacggaaaaatatgagtaaaattataaccttattataaaaatagtaatatgtcacctggagatgtctgtggcagtatgaggttccaaaaaatagaaaaatataatttcacctgttgtccgtagactcaaatcttgacttcttgttgatattcaatctcatgtacttgtcttctatcattttgactcttaggatatcagtcttatgtaccctcttctatgattttgaagtttaggatgtcagtcgtccttaagagcaaagcaataaaaaattgaaagagaagatggtgaaacaattgacttctgggaaggaaatgcctttctcttgtggagatattactggtgttttggtagccttataatatgaaagaaatctgttggagttctaacatacgataattatttagattgcaattttatcaattgtattgtatagaaatgactgcaatttgactaaattaggcctctatttcctaattggttttcagttggccatcccatttcatcatttgttctgtttaggtccatgcctatactcaccatatcagtttttggtcttttttggctttcatcttttccttttgcattatagttattgtgcagttcacttactctgttctggttcctttgttggcctctgttgcacctcatcctgtcctcaatgatggcaactcaagcttctcaagggtgatgcatatcttattccatctttccttgtattgccacttctattttaacatcctcattttggctcatctcatatttttaaaatgtttctttcccaacattctcttccataaagcttaactagcctcattaatatcctgtaaaatttcacctttaacttgattggtattgtgtgatctcatatcaacccagaggtacatcttctttcatgaatccttctctaattctatgggcaatttcctcattgacctctaattcttttcagtcctgtgattttaacctttctatgttgtctggcactcttaactgtgaaatgcaatctacatggttaaccaggaagcatggagttggctaatcacgtctttgttctttgtgtcttaaagaatttttatgcataagaatttggaaaggatgaattaggagatacatgagttattgagttattatgggtttaaaccaggttaagctgcaattttattgatattactaagagggtcaaagtagctcaaaaattgatgtcaatttatgatgcaacttatttctttaatgctttgccgatgataatgagtaggagagttagaatatggagggtgttttattattgtattttgacatggggattttctttgtgtcatcatattcagggagcagagtgggctactctttgttgtcttgattg

SEQ ID NO: 10840 - DNA, 3488 bp, Vitis vinifera
  Intron number 15 from transcript GSVIVT01000665001 (locus GSVIVG01000665001) derived from phytozome v7.0 (chr-ID chr 13; pos 20556773 to 20560260)
tttgccttcctctcatctccagtccctccaaaaaggtatgtaaataatcagttttgtttggtggctgagaaaaaggaggaaattaaaagaaaaaaatgaaataaaagttgcattattggtgattttgattttttttttttttggaaaacgatgtttgactccatcttagacttgtcgttgttatcctttggtatcggagttgcttcaggttcagagtgcacatacaatgtaacagttagcgtagtagtagccccaaggcttaccatttttttctacatagaaggcatacatcagttctagggcttccgatgtactgctcgaatttccccaacgtttttgttttcttttattactataataataattattattattattattattattattttgtttttctttcttcctttcaggtgttcttatatttgttgaagatctctttaggcagctgtactgaaatgttggaaaattttgatttccagaactttggtttcttttgtttcggtttcttcttatacatattttttcactgacccaacaagggtttgagaggttttggtcgacggcagagttttgcgtgttgatttttttttttttttggtttacctttttaggttttgtttggttactgagaaagctgagaaaaagaggagggtgttttggttcaggtttttgttttcttgggtttcatatgacaaattatatctttaaaaatttcttctaaaattttttaaaatttgagataggaaaatatttttaatgtctcaatttttcaaaacattttttgaaagtgattaactttttaaggtaaggctcaaagaattcttgcatttgacatagaagttactatcattttctgatttaaaaaatcctttttttacagttgaatcatcgtagttcagaaattgtctattttgatttgtattctgacaaaggccaaagtattagtttcgtaattttgttttgtggaaaattctgactatcgttgagtcatagtaaatttcttcatggaatgtaagtctcaccttttcatgtaagtaggaacaagcagaatttgtgtttttgaggctatggcaatttgaagctctgttgttacaatttttgaaatttcctttaagcaaaagctcccttaatttgtaatgtcaattctgtaaaatagaagattggttatgtgaagcaaaaaaaaaaaaaggctaaatcataatgcagaaaagcaaattgtaagggttttttttttatctgatgataggggttcttggtggaataggagataagccatgggactagtaagatgtcaagcttgatgaggggttgggttgtggggtgtggaggagcaagtggcaataatcccaaggtgggacggagcgcctaggaggggattcttggagataggctcaagagctctaaggaaacatatacccaaagaatgattttggtttgctgttcccgtatgttgttccctttctttataaatgaatatctttgggccctttatatagcagtccaaggttgaaccacattggttggtaagacttgatgaataggaggtttgtatagacttgtctcaaccaacccatgtaactgtaccctcatgcttatggtgatacatgacaatgcataatgatggagcccttagtggtaggttgaattcggtttgatgtagggtataacctatcttgtcttgacaagcctctaactccatcctctaaaccatgacccccaatccatcataagagcttgatgataggtagactaagtccatcaaggtgcacctagtctatgtaagaatccccaagcttggcactgattcaggcaaggctaatgcatcaggatgccacgtcctaagtgtgacttctttaaagaagtttgaaaaccaagtggagaggccatggagtgatacaaatgtggaggaagtgacccttatagaatgaggttgtttgtatcagaaccatcaatgtgaaaggttaagtggacaccatcctatgagggggaagggtcatctctacatagcccatttaagaggttgagtcgacactgccccctcgatggcagacactttgtgaattgaaaggggatgaccttcctccctcgtttttgtgttggaagagagttgtggtacctcattcaacaagtatccccacttaaaggtgagaggcacactcccttgtcatccaccactggtatgcatcaacaatgtagacatccactaaaggggctagacatttgtgccaaatgtaaattctagcctaacatggggcgcattagtgcagagcatgcatgtggcagtgcaagtagttggagtcatgagattacaaaattacacatggtatatgcatatgtccacgtgattgcacaaatttcgacatcaacagtgacacattgttttccaaatattgcactttctacttccatagtcaataatgcgttcttctaaagaaccaatttatgttctactcatagctattaacaacttgaaaaaaaaatgatttttgttcttctcattttcaaggatattaatcattattattcaatattatcatcgtttttcaatgtgattgggtgagtaccatggccttcatctacatttgatccctccccaatctatctttctttctttctttggattttcttcacaagcagaacttcatatgcctagctgattgaattattttcagatttacacattgctgaagttattgttataattcatttcaagccaggcatcttcagagtgcagaggtctagtgtagggaaaagattatgaagtcctgcacctcatttgattagggaaatatgcattgagcagtaaggacaattaaacaaatgggaaaattttagaagaacagggtcatgacactagtggctattttattggagcttcatatactcattttttgtttacaaagtcttcttttgctctaacaatttccacatcttaaatttccatgatgttgaaatttgttttctttgagcactgctataaatgtaggttgacaataaaagatactgattgcaaatgttaagagtatgaatagacctagaaggtgaaaataaacagtcctttgtagtgactagcaattgaaaacgaaccattctttttagtgatctcataatagaagtggaggatgctgtatgtcctttaattctctatcggttcagatttctttctttagtatattaactggacataaacataactgaccaacagtttgtgctggtacgtgctacttgttgagaaatttaagttatttaatgatgaaaacatcccttttgtcctcatataatgcttttatttatcttttacagagtatgtttctcataagtcgctcatatagattcttcataatttttaatttttttttatttatttataaatatcctgcctagacaaagcaccattttggaaatcttttgtgcctcttgtaataatgtaacttcattttcttttacttctattttgcagattctagttgttttttgtggaacag

SEQ ID NO: 10841 - DNA, 8491 bp, Vitis vinifera
  Intron number 1 from transcript GSVIVT01027579001 (locus G SVIVG01027579001) derived from phytozome v7.0 (chr-ID chr1 5; pos 15367164 to 15375654)
atatttaaaaaaaaaaaaaaaaaaaaaaaaaaaaagtgagtaggcatttctttataaaatttgattctcccttttttgaaaggggaaggtcatcgatcatcattcatcccatgtatctcttcctttacacagtcttgtgaaatattattcctctcccatctacacatccctctttggttttttttttgttttttacatatatatatatatataaataaataaataaataaaatcatacataattaaaattaatttatattttttttcattttttttcttggatttttttgaactaaatattgtcttgaattaaaatttggtcttatgatgagaatttgtgatggggatgaagtaacctaccaacatggataatttgatgataagaaatttagggttatattttgtggatgcacgtgggagggggcatgtcaaattgaaaagagaattgaaaatattataaaataattttcaaaaatagttgtttaatattttgtaaaacaaaaatttatttggatacctcaaaatgttttaccatatttttaaatatgttttaaaaataatatttatatatagttttttatttttaattatttttatatttatataattattttttaaaacaaatattaaaacaagtgaaaacactatattttattttttaagaatataagaatattttctactctttaattgttaaacttatttttaaaactgtttttacattgaaaaatagaaaatcattttccccaataattactaatcactaactcttaatttgttcacaaggggagaagttatttatttttatttttaaaaataaaaaaacatcaataacttttatatttttacataaaacatattattttatatctttgaaaattatttttaaaatttttaaaaataaaggtgaaataggctaaactaaattcacaaaaaaataacttgaaattttcaatgatttaaattaatttttaaaaatgactttaaagagagagagagagagagagagagagagagagagagagctccacttgcccataccagccccaccccacgcttacctttgtccgtacgattcgagccctacatgctaggtggtccaaatagtgctttttattttttaaatacaaaattaataaaagaaaagaagataatttcattaaaataactactttaatttttattttattttttccacgtaattgacagtacattatatacttcttaattaatgttatccttattatagatgactttttttttattgctttttacatcaactaaaataattcagaagataaattaagttgtctgacattcctcacccactacatgataagttaaaaaaaaaaaacaaaattgattaaaatactattattttatattcaatttttttatacaatttaaaattgatttttagaactattaaatttcaagtcaccattaacaaattttcaatgacatataacccgatatgataacctcttaaatatgtaggtttttaattaggaatagctgaattgatcgatcatcgtatgatgaatgataacattctaaaatatgttaggtggtgtttgtttttttacttaattctaaatagaatcttaatacttaatagtattaaatattaggttgtttgtttttgtagtattttatttctattaagtattaaaaagtaaaaaaaatcattgtgttattttttctatttagaaaaagccacatattttggttttttctatttaataaaaagtttataataagtcatgaaaaagtaaaaaaacaaacaacctaaattttaaagctaaatgattttcagcaaaaagcaaaaaaaacaaacaccaccttaatcttcaactaaaacatgttgaatttatcaattcttgagctattggtcaacaaatcaatgaagccaaactgataggacctttgatattgtcaaatcaataataccatgtatattatatatatagttgacaattcaacgcaattgaatttggattctaatgaatgatgtaatatcttgaaaacgatattacatcacgtcaagacaaataaaatctctcgtgatctatcacattaaaaaagaaaaaaaaatgctatttatgatggatttttacgtcccaaatgttgacttgattgtcaaaaagtttcttccaaactggattagggttgatactacgacaaaactatatgtaaacgtttttattttcgttctttaagttaggaatttatgaaataaaagaaagcaatggtaccccatattggtgtgaccaaaaacaatttgttaatatctaaagtagattttgtctctttccatatgccaatccccctttacaaaattcatattcaaatgtaattaaacacaaaaggttttgtaataactagatgaactttggcttgaatatttatttcattgtcagggatgtcctagcgttttaatggttgcctggaccacactagacacatggtgctgtttctcccatcaccccatagtctttttgtttaaaagctgccacctacttatttaatggaaccacaaatttctcatgatacattttttaaatattatatgacttatgacttttgacttttcaaaaacatttaaatcaatagaaaaaaaaaacgattttgattctttcaagcattacttttattaaaaaaatttatataacgatttgatatttattatatcaatcaacataattaaaatgaatttattattaatatatttattttaattatgttagttaatatggacatgttatttctaattgaataaaaaaaatcaaatattttcgttttttctattcaatcaaaaaataaatattacttaagatgttaaaaaaataattatcagacttttaatcttcattgttgaaagcacgtgaaagcatatagacggttgaacgaaaacacagataatgtgaccaaaatacaaatatatggttaaaatataaagacgataataaaattcataaaaaaaatttatagatattttcttgaatggtatttattttcattcatatctttttgagtcaacacaagtcaattaaataaatatatattcattatatttaaaaagaaaaagaggaaagggagaggggaggtgggaaagaattgaagaaggaaaggaaggtgacgagagcaaaaggagtgggaatgacgtgggaggagaatgggaaagggacagatgctaaaaaaaaagaaaaggaaaacactaaatctagaatggaaacaaaagtagggcaatgatttgggcctttcacccaagtgtgaaacccacaagctttggagaaacaaacctttggcaatgcacataaatggcatatccaagttattttgctgacacctgcacccaccttccttcctctaattttcacatcttgccactcttcttccttctcaaatctcaaactctttaacacttttctattttcattagggtttttgtgccaaagcatttttttctcaccacatcaaaattcacatttaatcaaaataaatgttttttttataatgcaggcattttcttataaaaataaggtattttacaattttttaaaattaattttttatataatatattaccaaaaacttattaattgttatgatattttgaattttcatatcattatgataattttcttgtccaaaaaaaaaattgtatctatttgggaagagccccaaaatgaccaagttgtgtggattgatgtgtttttatttcataaactcattttttattatattcatctaattagaattagggttgatatgggagatggatataagggttttctatacttgtcccatctaatttatttatttatttatatttttaaatttttgaaaatgttaattacattataaataaatgtattttacaaataaatcatttttatatttttaataaatatatttgttttatttaaatttgttaaaaattaaaaaaaaattaaatcattgtttatttaattatatatataatccaggtgggataaaacaaacaatttccaacccgtctctaattgaattcgattgaagttttaaaaagaagaaaaaaattctcaaatttatttacaacttttttatccttattttaaatgagtatcatgagaggcaaggtatcaataaaaacttgttcattattttcccgacttaaaaatataacaacaaatataaattcaagtgcattgcttccgatggtgaaagaaattagattggttgaagaggccaaaggttcaggcattgtaggattattcttgaaaataaatttttaattcaaaaaaaatgtttaataaatatttaaataataatttttttttttttgagaatttgttttaaagatgggttttgtaagaataaatttaactaaaaaataattgaaactattagatcgagaaaattattttcgtatttaaatttctaaaataaaatttaattttaaaaataattaagaattacttttggaaaattattttaaaaactgttgccaaatttcaatgggagtacttgggacccagtattgagaaaaaagctcttgcaccaaatgggcaatgacagtggcataaatggtggtaaaaagcatattttcagatgacccatactccattctttccttcaatgcagacaagagacaaaaagtacaataacttcaattataattgtccttgtatagatgcagatcacatgaatggataatcccctatattaatattgacagatgttttatcagccatggtagctggttagctaccaccacatattcagaatgaaatgatcaaaagctagtacagtcacggaggggagcaaaaaggaatggctactagttttccactttccttaggaaattctatgttaataatttaatatcatatctaaagggttcaagccctccggaatcgaccaagacactagagctatttagacagaccgaatatccattggattggagatgccatcccttgacccttgggactgagaagcaacttggtcatggaagagcccttggcatcataccctaaactagtgcccgaccgcaacctgcctcgcattcttgaaagaattggtatgtttaggcttgtccaagggtattcgagataggttgttgtcttgttgatgaagtctgcaagcccaaatttctagatatgagaagttaggaatgactagatcaaagaacaccttaattctatcgtttagatcccggcactgatatccaatcatgagttgtcatacatgctatagtcaagatctagacaccaatgtccaaccataagccaccacatgtaacatagtcaagatttagacattctagtgccccggcgatgagttgctacttgctacacatgtcgtcctcaagatccgatcactaatacccaacattgagttgtcacacatattgccactaacatccaccgaccatgaataccacacacagtagagtacaacgtaccacaccaacacaatattaaaaacctactcatgcccatacatcattcaagcttcattctttaagtctcgagtcattcagtattcgctagtttcctctattttatgacacttctaataattccaccgttatgtttctaagtagagatatcgaaccatctttatttgtaggagtttaccctagcagtcatgtaaacaggcgacttatgtggtcataattcaattgggcaaggcaaggagtagttggatttgcccatcaatcagcataatctaaaagcttttgtaccaacaggcatcatatcatatacgttcttatttaattttaaaatgttaatatctttatttgtttatggtacattgatacatcaattatcaactaactcatgtcttatttctttggaagtgggtgatttttgaaaaagactataacacaataaaagttgatcaacttgattcctttgtatcactacttgtataaaataaaaaggtacaagacagtcaaatatggccttaatcaagctaaaagaagaggaatagagatatgaattgatgtgctacttttggtttttttggaattgtttgaagcaactaatcaaataatttgagcctttgaattggagcttacatgttcatctttatccatagggatggaattttttttcataattatatatgttttaaaaaaattaaaaataataattatgaatttattttaaaatatacaatactttgtatttgcgttaaatcattttttgaaaaaccgagtgttggtgcattgtgatcgtttaccttattctatgtaatgtgttcaatgatttgatgtatctgaaaaatattcttctggatctgggatgaggtcgtactcgcattaatatgatcattttaaagttcttttctacacagatggttcatatagctgtcgaacacgaatatttggttatcatcttcatcatggttactcaactgtccatttcaatgagttcaacataaatttataaattatgtttatactataatcatcttttaaaaaaaaaaaatggcttcatcttacttgtgcatgtcaaaatcattttttaaaatgatgttagtacaaatttacaaatcaagtttatactatttttttttcaaaacatgatttaaaagtattgtatttttataaatattttataaaatatatattttttttaaaaaattatttaaattaaaaacccaatctttttagcaacacaacatgacatttctcaaggttggaccatactgacatattcctaacctattgccacttccgtttttcacttgacatttcaattgatacttcacccctcatatagcaaaagtcataaagaccccaacaaacaaattgagacaagtctcaccatgtgtgatatggacaatcaattttctcccgaacttgttagttacaattatttaagggagatacacaaagtctaaggcaggatcaaccctcataatgataaaatcaaattgatataatcaatcattttttattgaccaatggatcaagactgcaaccatgtcgcctctcaagtcaatgtacatccattgtatatggttttaaatggctaatgggttatctatgccattgaagaaaggaagggacaaccttatcaccattaattaataagaacatatttcttgtttcacctaatgacttgtccttattaataatgagctaccacgtgaatcaatttaagtctgaagaacttattattaaactttataataataaaatcgtatgaatataactgaacttgttttttatttaatagtgaaaattgtcgtactattaaattatatatgcttcttattctaattatatcatccaaaattatgagattaattaaataaatattttcagtacatcagaatcagagattaactcactccaacatattatctattttaaatctaataagttctcatgatttaaaaacacgtcaagaaaaactcactaatatattgggaattttattttattttctaagtgggtaaaggacatggtgtcataaatcaatagagaggtaatgaatgagattcacacattcaacaaccaaaaaatcagctaatcaattggccaatgaaaagctcccacgcatgaattcaggagctcttgttagatatgaagataaaatggagattccacaaatgataaaagatatatatatatatatatttcttttctgatttagaaagtgcaatcatatcaataattcaaaatcattcaaaaacccaacataccctttaccgccagtttcacaaaatgggaatatctctcaacaatccatgtctattttgagtattttcactactaacacatgccaaattgcagagggacgtactgttgaagttgaggctggcatgtgtggagggcgagtggaggaagagcaggaaagtcataggacggattaggaaagaggaaaagaagaaaaaaagaaaaaacgaggaaaaaaaaagaaagaaagaaagaaaaggggtaaatgtaggtgtggggagaggccatgtgaagtggggtcagtgaccatttgacaaaagtaacgatctgtgatgatcagagtgatgcgttttcggcttctcattggtccccatttgtacgcacatgtacggacgatggggacttgtttctaatatgtacggacggccccatatttttaaccatgtcttaccccacactgccataaaaaagcagaggaaaacctccactaatatctaccacataatctatcttttttctttatctttttttgggtattttttattttatttttttctctctctttcattactttccactttatttgttttcctttcgtatcccaattttctctttttggtgggtgttgtgggttttaccaaaacaagcaaaggatgaggttatcgtatgaattttaataatattttgtttctttttctaggtggggtttgaggaacttgagggaaagagaggtaagatgaataaggaaaggggtgtctgtttggccattggagagtagaaaataaagggaaagaaggaaagaaagaagagagg

SEQ ID NO: 10842 - DNA, 6716 bp, Vitis vinifera
  Intron number 3 from transcript GSVIVT01011704001 (locus G SVIVG01011704001) derived from phytozome v7.0 (chr-ID chr1 ; pos 4935071 to 4941786)
tctcgaggcgattggcgaagacgcataattggacggtactgattctatgccttaaggattcaactagggtgttctattgtatatttttgttctcctagttaagatttgttctgggtctcaatttgatttgtgggtaatgccttgatttggaaagaaactagggtttgttcatacacctagttaatttctagatctgagtttgatgtgattgggattgtgtaagtagaatataattaagttattgttgatagtcagacctctactcattattctagattattctttaaaataagtacttttggttattaacacgcagtagtgaaaatttatgcttctgttctgattttcatttaagtttgcaagcttgcaagcttgcaattgtgaattatgttgtgcaagtacagttccaagccctttggcattaaaacttccaataaaaaacctttaggccccaaaatgtggtggctattcttggttctcggaaaatttaagggaaggaaaatagaaaggaaaagtaggaataaaaaatagattagagttgacttatttttgtatgttacctcaaactcatttaacttattttaactcttttatataaagattaaataatttaaaaattcgtaagtttttttttttattatggattctgcttattcgaattaagtttttgtatctatactgttggtgtgcatctaaattcagtttttagtttttccaccaatttgtattcaagcacattgacattgtagatgctagaattaatggatctcccttaagagttactgttggaagttatcaatcaagcgcatgacaatagtttatttgatgctggctatgagaaaaattttgagcatgttttgagcttcgttttcttaaataaacattaatcatggatccatcaattgcttttcttttatttttcactgaatatttggatgttggataatttttttatttgatactttttttctccctttctatgaagttattcaactacatatgatctctgggatatgtcacaatctttaacattcatgaccttggccagactccatatatttggtttgccaaattgtcagaacattgtgtttcttatagtcagtgcgggctcctaaatcttctcactgggctgctgttttagaatcctttgatacctgaagcccttttgaggaaaggatcttctttttggaaggctcaatttaaagttagtcttataacagatgctaattgtttgaatgagttgttgacagagggtctatcttagactataacctatatgcagtcacttagaggatcaagaaacaattggttaccaaattgagcatgaggtttatgggttggtgtggttgggttattataagagagctggaatttggttttagagaccctatgatgttgtattaacaatacagttattgatgttgctaatgacccaatccaacatgttagaatgaagcataacaattacacttcaccaaggaaaagttgaatgacagtattatttgcaaactttttccataaactagaaaaaaacttgcagatgccttgatgaaagaaagcctagtagaaacctatataattttttatgagcaagttaggcgcatgtgataccaatccacagctcgaggggaatgtggggtagtgttgtattttgtagaaagacatttttgtagttttaggttttctttgtgtagagatgttttctgtgtcatattgaggaagaatccctaaaccatctccttgtccattatgtaaagacaagggtcttgttggagttgctttttgccctttttggggtgtcttgggtgctaccctcgtcaattagagagacacttttaggttggcatggtttgtttgtggccaaggagtgtgagaaggtgtggagagtggaccacttatgcttattttggatagtttggaaggcaagaaatagaatcacctttgatagggatgagctttcaatccaaagtctaaaaagttttttttgtttgccttctttggtcagaaggaaagtggtgtataaatgatgttgttttaactctttttagttttctcgattggttgggatcttggtgagggtgggatgacttaaatcattcttattttgtagttttggcttttggtggtgtttggtggtgttaggtgtaaacattttgtataccatgggttactcttttagcccttattaatatatttttcttcttatctatcaaaaaaaaaaagcgtgtagtaactttctagatgtaatgggatagagtgcattgttcaattactatttggtaatttggaagggaatcttgtttgtctcgagtgtctgccatttcctctaggaataggattttgaaccattttgtaaaccttttgctagatggaggaagagttggccaatctaattcttattcattgtcggctgacaagtggtttgttgactttgatcttctctttgtttggcatctattgcggccttcctcattcagtcatggagcttctgttaagttggaacaggaaattagttgaagttggaaggagttgtggaggaatggacccctttgcatgatgggatccatctggcctgagaataatgctttgatggtgtggaacatttggaaaggatggtgaaaacttgttatataaatactctatactcatcgtctacccacattgtgaattttaactttggttccagtttttatttcatcaactgtttaaggagggtgtggatacagttttggctcctagctctctttatatttttcctatgcatagtacttgcccacctttttgttaagcatcttttaatgcattatatacacacacacaattgcagtagttgttaacttataaaacatattgtgtgttgtttttctattttttcatattaaatagaaaaaattttatacatatacatacacatatatatattggaagcatgaaagcatgaattatagaataatatacttataaaaaagcatgaattatagaataatatataaccaattttatgaaagataacataattgaaagagtatatgccataccatttcatatgaaaaattgaatattagagttttgaaaagttaaattaaaaaaaaaaaaaaaaaaagagtttaacgtatagattcgttactaaatccataaaaataaactttttgaatttttagatatgattgttagtttcatattctaactaggtatatgtacttatgtgtgttgttgtcaagttcccacttttcatgtatgtcattgtttcttcctcatctagaaaaaaaatccatatataataatttgtggatgggatggttagttttgttacatttcttattttttgtttttaaaaatagaaagttttgtataaaacataggaattcttatacaaaaagtaggtagataccttgtgcatttgaaaacattttttaaaattcaagtaaataaaaaattttcatttcctcaaattttaaaatttttgaaaagagttttaagaacacaaggtaaatgtttgctttttgtgtaagagttcctacattttctagagaagtttttatttgtaaaacaaaaaacaaagaagtgcatccaaacaccgcttaagttttgattctcaaattatcacaacattgaacaaaaggtgcacaatgtacacatgacatatacaagtgtgctacaagttaaagaataagaggagagaaaataaaagaacaatccctccccttgcttactacctaaccaattgacaaaatctaccattaaccgatgcatgctatacctgtgcatatccaaataaggagaagactgtcataatacttaactttcaacttgtgcagaggagtttcttgggctattctctataattgctgctaaagatgtctgggtagaccaattatgggagcaaaatttttttttttttttggggggggggggggttgtgtgtagttggaatcccttgttcactaggcaaaatatttttttatttttggatcaataaatgaaaatagtattgaaaagcaccaaaaagtggcactccaaagtacacacaatgtatacaacgactaccaaaaagtgtcctaaaaaaaaaacggaagagaaaataaaaaactattctctgccttgaaccgaactcaaccaatcaataaaaccaattatggacatcaagcttttgcctataaatagtttggtgaaataatgaccggagttgggagagttagggggctttttgtagaagggcaaacaattagaagggatgtagaggacaatatggtttgacaagaatcaaagagtgacaagtttgtggttaaatctttatattcctccttatcaaattgtaagcaatttccggggagcatacggagtaggggcatggaaggagatcatgaaggaagctaattggtgttgggagaatatcaagttcaaggtagggaaagggactagaataaaattctggttggatcagtggtgtggggatgagaggctgtcccatgcttttcccctgctttatgagatggcggtcaacaagaatgcaatggttaatgagatgtgggaccatagcagtggtccaggtggctggaatctcagatttcatagagacttcaatgattgggagctggacttgattagaggattgcttatgaggctcagggacgtcaagctctcttcagaggaggacggggtgctttggaaaggggggggccatgggaagtatggggtgaagcaggcctataatgggctggttgttatcaatgcttacgactttccgcatagaggagtttgggtgaacatggtccctaccaaagtggctttttttgcttgggaagctgggtgggggaaaattctcaccttggataggcttcaaaaacggggctggcagttcccgaaccgctgttttttgtgtgtttgtgaagaggagagtgtaaatcacattcttcttcattgtatggtggtaagggccttatgggatatcgtttttgcccttgtgggggttcattgggtgttcccaaagctggtgaaggaggctttattcagttggaggggcccctttgtggggaaaaaaaggaaaaaaatttggaattctatcccgttgtgtattttttggacggtatggaaggaaagaaataggttagcgttcaagggaggggtgttaaatatacagaaactcaaaaattcttttgtttgtaccttgtagagttgggctagggtgtatattggagaggagtcctcttcactcttaggtttttttgagtggctagcgaccacttaagggcgggtaagggtctttgtttttgtgctctcattttgagtcagatttgtatacgtcctgtatgcttgatggcctttgccctttaatatatttgcgatatttatcaaaaaaataaaataaaattgtaagcaatttccattaggcattgtgtggaacccttggttccctaatgaaagctttttggcttgggaagttttgtggggaagaattttgactctagatcccctcacgatgaggggttggagattgcatagtagatattatttgtgtaaagaagagagaaataaatggtggatcatgtcctccttcattgtttcaaagcaatcatcctatggtagtttttgctttgtttggcattcagtgggtgattctcctcaaagatatccttcttagctagcatggatcttttgttgagaagaaaaggacaaaagcatggtgagtagcttctttgtgtttattttggaccttatagaaggaaataaataggaaaacttttgaaaacaacaagaaggtgaattaagcaattaaacaatcttttatgtacatgttcctggaatgggctaaggtgcacataggagataactccttatcattgcttgtttttattgtttggttgagttgaaagggggagttggtttgtttatgtttatcttcgtgtatatactgttgtgtgttgttttagtaggcacttttaattcaattgagattacctataaaaagaaaacacttaactttcaacttgacccttgacaacaagaatagaacttttcatataggattattttacctttctctcccttttatgatcaatttctaatcttactgtacattttaaacaattaatataataatttattttaagaaaattttttgaatttatttatttattcttaaattgtgaagaatccttaaaggtgtgtatcgttgaaatgttgtatcatttctcatattcggttgttgtatttgtattgtaagatgcgctaaagatgagatagagattgcaatgagtaccaatttccatagaaaatgtaacttatcattctatcatattatgtatcttaagtttatcaactataatggtttctaggaaattaatttattgtgtagaaaaatttttccccctctactcacgttttacaatttcatagagcttggacaccgtccatttatggtttggtttgctacagcatttgtgaaatgctatgacttcttctataaatttattattgttctaaaaaatattagatttccatcaattagtaccacattatatatgaattatgtgtccttttcatcatagctatataaaaattgattaagttagttactagttcttgtttatttcttgtcactatctagttcaccaatgtcctgaagatagccatgcttattatatttttgaaatgatcatttttcatgttgttgatcaacaggtggcgttaaagacgctcatagttatccatagagc

SEQ ID NO: 10843 - DNA, 9635 bp, Vitis vinifera
  Intron number 2 from transcript GSVIVT01028985001 (locus G SVIVG01028985001) derived from phytozome v7.0 (chr-ID chr1 6; pos 16883588 to 16893222)
caattttactggtatgtccatttgttttcatgtcaaagctatttactttgtccaggtggagtttttgactacttatttatacggtgttgtcaatttcctccccccaaatctctctttccagggtagggataatgtaaatatatgttgtgtgttcaataaatattttttcctcattccttgccttgccttttctgccaaaatgatgtataaaaaaatggaatgtgttgttgtatcatggttggatttaagttttgacatcaaggatgatactgcacttggtttttggtgtagaattgagtaaattagtgatagagtttagatgagctactgggctgtatagtagaactatttaattacagcgcattgattcgaacaaaatctaaactgaaaaacaaatgatttaaaaaaaaaaaccttgccaatctggatgtagacattgacacattttgaatgtttcttcctccaatatgggttttgcttttgaggatcaaaatttctaaattgattttggcattagttccctcttgcatacaaatgagatctttagtatgatgaaagagcaatatggagatcctatagatatttattcttcttctttagctgggataaactgctctttctctttggtgaatgaaaaagggaaaaataagaagaaagtagagctatgttacttgctggttttttattccagcaacgttgctttggctttgaaataatggcatattaggaaaccaaggtactttccctttattttttgtattttggttgcaaaaatgattgggattcttccatgaggaatttattgagtttgattcttgggaaaaggagttttggaaattgaccattttagaaaaagtggtagaaatattcatcttcaagatgattatcaatagtaattgatgacaatctggattataaactgtgaagtttttctgtctgttttaaggtatctatctttttcagttaggtatatgagagagaggggaaagtcagctggcaggggaagaggagtcatcagctgggaattttggtttcgaagaagggatttggttttattatctttataataaaatgtaaagcccttcaaggaatttatttcatatttctttttgagtttgggtcttccctagtcctaactgcatattccgggccctttcaagttaatcattttgctaactgctaaacattgttttactaagtactaacccactaactgggtcaaactacttgaatattttcttttcagcacttatgttggttatcgaacatgtccttagcaaatgtatttgttctatgaatggcctagggatgattagatctgcctccattagtgttcggcatcatcataagctaaaccaacttaacattgttttctatcaactctctcctattattatcatattgtggaggaaagtcaatacaactcttagcttccaccaagttaaaaatgatagtaaaaaaccatgttcaatttttcagaatttattggagctatctagcttgtataggaatcttgtccttaacatccttttcttttgccttgatttccaaagaggatgttctcatcttctttttttttttttttgatagataaaggaaattcattaaaagccaaaaaggctaaagagagtatacacgaagtataccaagatacaaaggatcaagaaacaaaaggttctaacccttacttggtggctaaccagtttacaaaatcaaacaacgataaagtatgatcctcaatatacaccttagcccaattcacaaaagtgtacaaaaaaatggatttgatatcttggtcgtttctttccacatcattgaaggctcttctattcctttctttccaaatagtccacattaggcaaaggggggcagttttccatgctttctcccttttcttgcccacaaaagattcataccatcccaggagattcctttttacagaggagtgcatcacccattgcaccccaaaaagggagaaggttagataccataacattctggccttctcacaaaacaggagaaggtgatcagtagattcctcctcatttatacacaagaagcacctgttggggatgttccaaccaaatctctttaggcgatcaatggtgagtagtctgttccaagccacctcccaaccaaagaaactagccctggttggagcccaagacgtccagatagtactagctgggaaggggtggttgatgcccattgagagtgagttataaaaactcttaacagagaaggtcccattcttatttgctttccacctgagcgagtcatccacacctcttctaatagtcaaaggatgaagcttgcttaataagttttccacttcccccacctcccaatcattgaggtgtctgttaaaacgaggtccccaactacccccagctccatcttcctcccaggcctcagcaaccaagccttctttgttgactgagagattaaataagatgggaaacgcttcttccagagattgattttcacaccacaagtccttccaaaacttcactctggtgtcatcccctacaaggaagcgggagtgagatcgaaagttttcccaaccgtttctgatggccttccaaacacccaccccataacgatctctaacacctttggagcaccatcccccatcctgaaggtcgtatttactagagataatttgcttccaaagggactcgttctcattggcaaatctccacaaccacttaccaagaagggccttattaaaaatagctaggttgcggatgcccaagcctccatcctttttagcggcacaaataaccttccaacacaccaagtgaggtttgttttctaaagcgcccccaccccataagaaatccctttggattttttcaagtcttgcacaaactctcttggggatcacaaagagagaaagaaagtaggttgggaggctagagagggtgctttttaataaggttagacggccaccaatggagaggtattgccttttccagatagacaatcttttcctgaatctttcttccactgcatcccacgcactagtggatttgtagggggttccaaggagaagacccaggtaggaagtaggtaaacatccaatcttacattccaaaattgagacgagggattccatggggggacattcccccattgggatggcctcagacttgctcagattgacttttagtcctgaaatcgcctcaaaccacatgaaggtctagctaaggtattgcaactagactgcatcggcgtcgcagaagattaaggcatcatcggcgaacaggagatgggaaatgattagcccctctctacctcttcctcccactttgaagccagaaataaagccctcatttcttacacgtgacagcagttggctaagagcttccatggcaaaaagaaagaggtagggggagagagggtcgccttgcctcaatcctatagaactacggaagaagcccgtggggcacccattgatgaggatcgagaatgtggccgtggaccagcaccatttcatccaattaatccatttgtgcccaaatcccattctagacatcacatccatgagaaagttccaattgacatggtcaaaagccttctcaatgtccaatttaaggaggaggcccggcgcgttgtcttttaatctagaatcaagggcttcgttggcaataagaacagcgtctagaatctgtctcccatggacgaaagcttgctgagaatcagaaatcacctctcccatcactgatttcagcttattagcaaggactttggctagtaatttgtatacactccctaccaggctgattggtttgaaatctcttaggtcttcagccccttcctttttgggaatgagcaaaagaaacgtggagttcaaacttctctggaaggtcccatggaggtgaaactctgtgaagagctccaaaatttctgatttaacaacatcccagcaaaacaaccaaaaggccattgtaaagccgtccgggcctggagctttgtcgccacagtagctgcttagggctgcaaagatttcctcctcagaaaactcaacttctaggctgctggccgagccttctcccagctccttgaagttaaggccgttgattttaggcctccaatcccctggttctgagaggagggatttataggccctacaaacgccttcttttaagtcatcactagaagagagagtgacctcatttattctaattttagacaggaagttcttccttgccctagcattggccattttgtggaagtatttggtgtttttgtcgccttcttttagccaaatttctcttgacttctgtctccaagaagtttcttccaaaagagcccatttcttatagtcctcaagagccagatttttagtctctacttcaccagcagtgagggggctgtcattctccctggtctcccatcgctgcaggcgagagaaggcttctactctattgagagagacattgcctatcacctccttgttccagttcttcaagtccttcttgagcgctttaagcttctcggcaatgcagtggctactataaccttcaacagaatacccattccaccagcttcgaactaggtcttggaaaccatcaatttttagccacatattttcaaaacggaaagggcttttgcctgaggagaatcctcctgcttgaaggactataggactatggtcagaaatcaaacaagggagagcagcttgggtgatggcggagaaatggtcttcccactggtccgaaaacagaaaacggtccagtctagaggcagcttgagagttcaaaccccctatccaagtgaaagggcctccagccagagggaggtcctttagccccaattcccctataacctctgagaatcttctcatttcagttgtgagcctaggggagttccttctttcctctgggaatctaacagcattgaagtcccctcctaagcaccaggggtcctcccagaggccacagatggcactaagttcctcccaaaaatcctccttttcactgctaatcactggcccatataccccaaaaaaaatccaagtgaaaccatcgacatagtttttgaaacggatagagatagagtaccccccgctttctacctccaagttctccaagactctgttgtcccagaggagcaggagacctcctgccgcacccctagcatccatagaagcccaattaagaaatcttcctatacccacactgttgaccatttgctgagacatttctttcaccttcgtctccaaaaggcaaaccaaatctggtttttggttccttaccacgcccttgatcaactttcttttctcagagtcattaagcccacgaacattccaacagagaattttaattctcattagtcaactggaaccaaatcccaggaattctggccggactttttagctatccctgaagtctccccgtaactaacagagcattccaacctttttaactctctttcgaaacgggtggtgcaagattttttcttctttcgtcgcttgcaaagggtgctatttcctgtccttagcttcaatttctcaagtaaattcagaatttcaacctcgtgtccttcgacaggcattcccaagactttgctaaaatgaaagagattggaaatctcctcctctgaccatacttcttcgcacggggagaaagctgtctggtccttctgcttcgccgcaaagtttggggggtcgggcctcaggaccactgtcgacccatctctaagcatcaaggacagaggaatcggcgtctcttcagtctctcttgacgtcagacccgtctgtctagagcatcccctttccctctcggatcccgtaaccaagaatggagtagaagaaggagaagaaagcatcccactcaagggggggtggagggggcaagagcataccttgaggattgcggccttcgacagagggggggaggtcatttgcagacgttacttccaaatgggacggcacttccagctgggggctctcagcaggggttcctctcctccggcgcggggagcagctaggggttcccagccctaagtcaccgggagaagctaggccaaagggtatatgagtgattcccagagaggctgaggaaagggccttccccagcccaggcccaaagggacgggccaggtccgggtgggccgaggcgtccagaccaaggcctaaatccaaatcgcaggcaagggcctagtgggcagatgccttcgacttgtctgaggtgccgccactccccaaaaccggcggagacagcttttcaagctgtgaaggcagcttttcaggctgcggaggcagcttttcaggctgcgaaggggttgaggaagagggcggaaagcccacgctcccctcggcgcgtgagtgggatacttcgtcatccttacgcttccaagcaccgggcccatgggaagagagcacagaggagatgcagggttcttcttcccaccagagctgcagagcgaaacaagaggaaccggtgaccacctgcagagaacttgggtgatgccaatctctggtttcgacgaggattctggcccatttgagattccgacgctcggctgtgttttcatccacagccacaaatcttccacaagagtccccaaacctcttgaagagacttctttcccaaaggtgcagagggagacctaaaattttgacccatacaaggcgcgtatccccgttgtcttcctcaaggcagcccactgaaggcttccatttttcaaggtggaagcttcttcctctaaagcatttctcccctaaattaaacaccctctcagcttcgttcgtgaactcaaattccagaaacaagaggttttccctcatgttagacaaccagaggttcccttctaggagccaggaatttttcgcccacgacccgaaggtaacgagatcagggaggcggtctgagtctcccttccaaaggcctatcagacacctacccagcatttcctcatttctaacgagagattctttatcaacttctaaccagacggcatggcggggcgcgggacaaacccgaagggggatggaggctttgtccacacctctgttaggcagagcttgaggcagagcacctttccactgaaagggagagacacccaagcttttcagtttactaacgagcagattccagcctccaacgagcccacctccttctggaaaagccaaggagaatcttttgttctctgcatctcttgcaacgcaaaacaagaatctccctgctttgttgcttcgcagttccagactatagtctctatctccttccaaccaaaacttcctgaaaggagatctttcctgtagctcacagcatgactcaaccccttctagcaacaaagatagacttttccctccaaatcttatccatgaagaagacttagggcctctttcacagattttcccacacactctccctttgtgctcttctatgttaatctcaaaagttttcttctcaagaccaaaccagcatctacctccaggcttcatggttggaggcagttagtacttccatgaacatgcagctttcatgtctatgacccttcaagcagtcgtctactctagtttctttttcttagattcttatgataaatttaatttttcttttttcctttcccattttgataagaacccaacaattatcagtaggaaagacagattgcctttctcatcttctatctagtgcttgctatgatcaggcagatagcttgacagatatagcattttcatcctcttgtgcatgcaatagaagagtccatatagtcatgcttaaggatactctagtgctgattagatattcattttttatcatttgatatttaattgagctatgttttttatgttaattgccttcatctataacattgtgtgagcctagaatgaaaggccacacagattgtgtctcaaacatggaatcatctttgcaaggggaaaaaatttattgctgtgtgaattttctgaagtcattacctcctcttttctaaacttctaattttctaaatcatgcaatctttgcttctcctgtaactattcaagtaatgctgttaagtcaaaagcattacattactttgcatgatgaagaaaaaatgtccacatgagattggatggccatcttgtttttaatatccattttctcttggaatttttgaaggggaattttcacttggtaatgttgtgtctgaacatgaggattacttatttgtgtgtagcactttcattttctttacgtagacaagatatgttaatgaatgtgtatgtgtgcatggacagtcatgctgatgtgacattcttccattaggactcaacattatcatgagctaaagcactttgagccatggttctttcaactatctttcccttcaattctggagggaagacaatattaattgtggcttacttgcctacttatctttgtgtataatattgctaaaagtgacattccatcttgttctagtggtgtccaaaattctgcaattataggtggcaagccttcccagtcttgttaagccaacccatctaaatgggctttggtcaatctatgtggtagagtgttgagcaaaatgatgtaggggctgttcgtcaatgttttcggaaatagttttcaaaaaacagtttttaggaacaactaaaagcaattctcaattattttcagaaacaatattatgtttggaaattcaaatatgaaaaacatttttttctcaactatttctttgtaaaggcattgtacacttatttacaatgcaaatgttcccaaagaattctccatattttcaattgtttttcaaaaaacacctggaaacacctcaagtttgttttaaaaaacaaccttctttcaaaacaaattctcaagaacatgttttcagtcaaaaaaatcatctttgatgattttttttttttttttaagttacacaattgttttctgttttaaagaatataaaactattttcaagaacagttcccaaatggacgaataaattcttgagctatgtttcaggtttgagttggacttctggactgttccactcaaaataatgaaattttaaatactggtgttagtgtttttaaccaattgggtagggttgacttcctattaaatggtttaacctgattataagtgggaagattatggttgggtagcttctgatctggccaaaacatgctttattgcatgtcaactcgcaattaacttcaaatttgttttgaactgcggttcactaaaatatttaatgcagtccttgaaatatgaacttattatggtccaatatttacctagatggtggatgaggttagtgtcttgtgcactatcatctatcagaataaagtcccaattcattcacaagctgttgtaaatgatgcttttcttggcatggaaataatttttcgttttcatttcatggtcaatataaaggcttgaaaaatacttgaatgttggcattggctgtcacttgccattattagttcatgttttcgactattcttgttcccctatgcttgacatgctgcagttatctaaattctggtgcatggctttccaagggtagacaagaaatggacttaagtagttaagttatattcattatttaacatgactacatctttcctttcttgagagatcaatccacagaatgaccttgcaggtgcaggaacatactcatccccacatccttcttct

SEQ ID NO: 10844 - DNA, 11776 bp, Vitis vinifera
  Intron number 1 from transcript GSVIVT01016537001 (locus G SVIVG01016537001) derived from phytozome v7.0 (chr-ID chr1 3; pos 3002975 to 3014750)
caaggaaactcagagtaaatccaaattttaatttctttaacttaatgcaaacagatggtttccatatatacatctagagatgttgaatacccttctttgttaaaggcattcttaactcggaaatcacaaaattgtctatgttataagtattagaagcaatcaatcttcttactcatgggtttatagatagaaaaatgacaaatagaaaagttcaaactcgaccttttatgataaagaaatcaatttcttatatcatgtctttgaaaaaaaaaagtaattctaataatataatcattcaagtgcatatttgtaattattgaaataacaaagcccatttaagtggataatcatataaataatttacagaacaaactttccttttcattacggataatgatcatacatcctcctctatagaattgtacgttaacagtcacataggtaactatcaaaacatggctaaggagaagaagaaaaaaggaaagaggtgggctgagccgccggttgtggagtgaagggagtggtcgtcatcagatgctcacggtcgggggattcctacttttcccacgtgccacgtcagatcccacagggtcccacaccagcccaacaagaatatatatacttgggtcggtgaaaaaaagcatggaatggtctcatcccacatatttccagggtccccacttgaaacatgaggcctacatattttgtgttagggttttcaagaggactttgggggtcttggattatgcaattggcatcaaatcttggttgaagatgatgagattttaatccatgattccatgaatgtacccccactgaggcagcggtccatggcggttcaagagaaaagcgcggatatctgtgattcgatctacattggctctatgccattgataatttatttgcagtgatgattcttgattttgctaagtgggtttaattcatgttcatgttcatgttcatgttcatggtcaatattgaacaccaacatggtgtgcacgaggaacacggcacgaatttgaatggtgttgagttcaaacatgattgtttttggcgtgagattccattcttgaagagtcataacttcaatttttttagttaaaaggcaggatgaggaaaaggattggttagctgcattatgaatttatggtgcatggactggggtcctggctatggcttctttttattattattattgtatgattttgccattacccatcatccttttcgtaggacccatcgaaattgtcgggtttggtggtttgagtgaaatcatccccccaataaaaagtgaaaaatacatcaaaacctcatgtttcacctgcgaactactttgatgcaaaactcaattgttttgtagggatttttctttccttttgtttgaattcttaattgtggccatgcattgcattaatcttgaaggaaattggctgtgttaaaccacttttccatagattattaaagcttgtttagggatggtaatggctcctcacagatgtcaccctagtgggaccgatcgatgaccagagtcacaaaccgtaaaagacgtcttcccgtgttataagttataactaggtcacaagttggtcttagaaagtgtttgtttaagtggaacattcaatcaaacgacaagagtagggcacccatatcaccgagttcaacccaaacaagccaatttggtcccaaatttcttcctaattggtgccgtcaacctctactacagccacttgtagaaagaatggcctagtgtgaattgtgagttaagcttaacaaccccccaagtccaaaaagtaaattgaacatgacttaagatttacgacctaggaactgagttcccacctccaacagtacaatataaaaactgtttcaacattctggtcattatagcatgggaaagagtccaacctcgaattcttctagttatatttatggatatttgttaaaattttcactgataaggctgaaaagaaagcaaagttcaggctgctgtctcaaccttccgttggcaaagaagactgtggtccaaacaccaagtacaacaatctagatagcccctttgttatgggtctcctattttagcctcagttgctagctagcttcttcctcaaagaagaccaagttgctttcacttgtagattgtacacagctcaaactttacatcactgttgctgctatcccacctcactgctatctttctatataaccttctgtttttttcccactccatatagcatatatattatgattccaaatcttacaagcttaaacgtaacccaatttcaggtcatgggaacccaaatcgagcttaaactttttaggaaaattgattgtatagaagcacatgactcgatttcggctttcaacatgctgtgaattaactcaaaacaatgaattatggtaggcttaggaagtgtgttacagaagattaatggcataggcaaagtgaaatagggtgcaggatctcatgtctttcaggctgcccacctgaccatcagccatgtgctctgaaaagctacggcattggataatgcactggctttgctttatatatccactgttcacagtgtcaagccattttttcattctaagttcaattattgattaggggtttgatctcaactccattaatcacggaagcccaatattcagcaccacagttcttcttaatattagtcctccaacaatgcctttggcatcgcagcatagtcaaattgtcgtgaaatgtggaagttaattcttgattttacactactattggcatgtaactcactagagaggatcccaaaaagagaactattaaatattcctcttcaaatacttctctccctttgaaattccttttctccccttgctgaaaattgcactatttcccacacgcctttggatagagtacgaagtatttcttagcccatggaaaaactaactgagtgccacttttttgcttggtcccgcgttttccctttgcttaaaagtggaacttatgtccatatcatttagtgtccataacatgccttaatacgagtgaacaccaacacattcagatctccttttttcgtgtcactgagtagaattccgtccccatggttatctgttgagtcagtctgtcctgacccatggaggccctctcgttccccactcagctgattaccgactagacatgccgcgtttccattttttcagtgcgaatcctaaaggtaattagtttgataagtgcttatattgttcattgtcatacacagtgatttagcatccaataattggctcttcgaaaaagagaatttcaccaactgatgtcactagctagccaagattctagcaacctagtacatatcctatacatatatattagggttttaaattgactctttaggcagaaattaaattaatgtttttcaactatgtccactttctacttttagggtacatgcatcttcatgcattgattgaaccatggctgtcttgatccaaaccatgagctgggattgaaccatctatgtcctcttctagccctaacttggccgcaaatcgtgggggttccatgcaatgaatatatacaaacataagagttgtgatccatggcaggcaaatgaaaaagtgtaagttaatttttgaaggagatgggttcgtgcatgcaactagggtaagatggatgaaaagatcagaagaagaattagaaattcagaaaactaaggttggtggtgtcggaatctaattccctatctaatcagaatatatatctttaactcattttcatgtaaaaagcaactcttcttcttcacatacatagttggaaagggaagcttacccactgccagcttttttcctctcattatttcttcttcaattgctctctctctctctctctctctctctctctctctcatcttcccatcctcacgtgccaccatgaaaaaactatgtaatcaatttacatgctgacaaaccccatccttcatagtgctcacgtgaacatcatcatctttgcgaagatgcttctatgccagattccaacatggttttcttttcgtttttttaattaaaatttgttcattatcccattgatttggtgaatggattagggtttttttattattattcttttaagacaaagatggttgatgaagctcgtggtactttcacttaatcatggatctatgtatgctttgtcttgatctataattttccttttccttttttttttttggttctatcatcaatcaactatacatggtgccacataaaatcttacaaattctataaaatacatatggaaaaaaaatgataaatgtgtatgtggtataaagaaaataaaattttcagggccttcgtccaattttattgagacatttgagaaaattttcataatcatcaaccattttatattatcatcgtcatcaagttatgggagcaaaatttaaattatatatatatattttatttatactagataatttttgtgtaaaaaattctacattttatataaaactttcaattttttaaaaacaaaaaatagaaaataatattgatatgtctatcattcaataatttattgcaaaataggaaataataatgattgcctaacattcaaatatttatttgaaaatcaaacttaataattttcttttgtgcttgatccatggaattcataggtccagaccagtcgtgcgatccacatccatggtcgatccagagctattgtcagcccaaatagggtggttcaagcccatcttgaaataggcttcttttgcaagcggaccgttacactcctaacccaaacttgtattgcctcattaatgggcccaagctatatgagacccagtgggctcacctttcactgtaaaattttaaactttgccggacatgctcagtccatattctaggctttgattcaagttgtaaacgtgtcactgaatgtgaaagggttacgggccgggcatttggtttcggttgctaaattttgatcgggctcggcccaagaacttgtttaattcaatacaatgtagcccatggcccagcccatttggatgctccctcgccttcagaatgctgagagcctgagaagtcaaattttgactgggctcagcctgagaactaatcaaattcaattgaaataatcgggccctctctcaagcacaagccccagcccgtgctcgttgggaggaccacaaccccaagtcaatatgactagtggttggagcatggatgagttttacaaaataaaatatctgaaaatctattataagattgcaaaaaataaataaataaataaaaataaaatattacgatgaattatgaaattaatataaacatatttatataaaatgaaaatatgaatataattatgaattaaggtttttacttatatttataataaagatttgatccattttttctctacatatttaactttatccatcttattttactaattcatattgttaaagagtgattaaccagtttgttgaagttagtgtagtttcctatcaggtatgttgagttgtatagaatcccggtgtcataatatgattggcttactttaaattttgtaagaaaggttgttaagccacttattaaaaatatgttgtttgttcaaatgaattaactaatttattcaatactcaattcaaattaaatcttctttttagtctcaatttctttatttttctaagttggtagtagagtttggtttgccattagtggaagattctttgatccccacctcacacagaggttcatccttttcttaatgattcactttagtttatatcatacgatgttctgttgggaactctggattagttctttctttggccttagataatatagggtgcatgttttctatcataggcatcttgaaatctattgaagcaaaataatagatttataaaatgcagatgtcataccttttgaaaaaccgaaagtccaataaggaacacctagaaagagggtgaattggtgattttaaaaaattcaataaagatttatatattatactcaattcttttaccctatgagatgttagagataatcaactctttgaattatgaacaattcaaataaaatatcaaatataaaaatatagacaatgagtcacatgattttttacataaaaaactctcatactaactgtggagataaaaaaaaccataaggtctaaaacctattaatctaaatccattatacaaatcaagttacatagatttatcttgtcactttacactaaatacttactctctagtatttataacttgattcacatccacaacgcagcaaccttcaattgctccagcggatcacttcaatctcgccaaagggataaaggtcttcaatctaagttttaaagatctaatctttgaatgaaatattaggaatagtgtggcactttaagctttctcactaggagactctttctaaagaaaataaggtctctaaacaatctctatacaatctctataatcctcaaggggttaataggaaggtatttataggtaaaagtttgaagagtctcagttttggaaggtttttcaattaaaattgtgtgaaaaacttggcaaaatcaacatgaccactcgaaccaacttacccacgctttagtgcctcagacactttagtgatatggcttgcttgagcgatcctaagcactcgaaagtcaacattccactaaagaaagtcaactacatttcagtatcctatgaaactataatgagttaaaactcgagttcataacctactattcattgcatgcaaactctccatgaattggtatccataatcaaaatagagtagtgttatcaatccatcaagattacttcttcaatctttatgttaaagatcctcttatcaagattcactgtgggtcatgtctaatgtgttaccatacacactagtacactcaccatgagaaactcatctcaatggccaaaataagtcattctctaattatgagatagtgtactacaatctccactaaattgcttaaatttataaactaactatgaacaacttatcatttcgcaaggaacttatgacttatatcttttatgcaacacctaatgtacctaagtcatgtataatacaagtgatatgaatttgaatactcaaatcaaaatcaacgcaaatgatggatagataagcggaagctcaagtctaattttgtcacattatgtcttgcttttaagaactttatcacaacacaatcaaacttagtctttggtgtctttacatctaggaaagcaaactattgattgtaaatgagttttaaaattgaaaaagaattcaaacaaaacaatacaaaagtataaggctcgattgataacaaaaggttttattaagtagcatgttttgattttaatggcacttttagtcctatgattaaaccaataacaattaaagttgttcttataatagctttgtctagagggtaacaagagtatcaattagatattaataatgcattcttgattgatgtgtttcaagaggaggcatttatgtagcaactatttgtcttagtcgatgttaaacagtctcattttatttgcaagcttcataaagcattgtatatactaaagaaagttcattgggtttagtttgggaagtttgcagtagccttgtatgcccttggttttgcttgtgttaagttagatcaatcattgtttatacatactacatcaatcattgtctcaatatatatagatgatatagcaataactagaagcgatgcccaatcatttcaattctaagaataagctttgcataaggaatttactcaaaaatatttaggagctagatgtcaattactttttggcaatacaagtgaagaaaattataagcaacatttatttatctcaaataaagtgtatcataaatgttggaatagagctcttaaaagtatgacatgatgtaataataaatgaattttattaatatttatattatgattttggttttactttcatttctcatttatacattatgtatgatgagcattcaagtttgcatcacttacatcatatataacttagatgcattaagagttacataaaaaattcaagtcataagttccttgcaagtaaataagatgtttataaccaattcatagactcaagcaatccatttaaggttataatatgcaacctcctaattgaatggataacttgtcttggttattgagatggggttttcgtggtaagtatactaatatatatggttacacattgaacaaaacctgtaatgagtcatgaaattggttatcgggtattcatgacccttactaagctactatactatatgaactttcaatcttaagaaaatattgagctaatgctaaggtctttaatcctttttacctataggtgagaccctaaagtggtcatatattccctatgaattaggtcattgttgattaaggtaggtgacaatagtattctgaaaatggggaccatgatatctcatagatttgagacaatgtatacccatgagtaattctaatgatatgtgatcatgaaatttgttgtagtagtaattcttttagtgaaatttgatatatactcttagaaatacataatagaaagatctaagacttaaggatgacaaaggtaatcttgaaaggataataacatataccttgttaaattataaacactagtttatgaggagcttgcattcaagcattaacaagtcaccaacctgagctttgtatctcggtttaatatcatatgtcaagccttctacaccaatgagaagttatcttcaattttatgagtttagtagtgatctcattacaagtctcaagtcaattgttgatgcattgcagtatgtagtagtgacttggtatgaaatctcttacagtgtaaataaggtttgtcaaatttatgtataatcctttatgagctcactaaaaggatgtcaaacatatattgatgttacctgaggggtacaataaatatatgattggcacttcataatatcaactaatcttgaattggtaagttttgtgatgttaactgaggctcaaactctaatgacaaacactcaacgtatggtttttatatctatttgaaatccaacttgataacttgggattcaaagaaacaacatattatttcaagatcaagcacaaagagtataggagcttggctaatttagtggcaaaggttacttggatttaatcactacttgatgagcatggagttttcataccaagaccatcgataatttggtaagataatcttcatacaatcatacttgctactaatcatgttttacatgtcataattaaacacatcaaactagatttgtattacaaaaacaagttggtgttagacatgtaccacctttagaccaaatgccaaatattttaattaaagttatttcaagtattaaggttatgtttggttccaagaaattactaagaaatgaaaaaaaaatactaagaaaaatgattttctcatatttagtttcaatatggaaaataagaaagaaaataaaatataattaaaattagttagagatgtatacatttttgaattatttaatctttacaaatgaaaaataagttaaatgagtttgaatgagcatataaaattatttatttatttatttatttcaatttttctactttttcattttattttctttttctgacattttccctcatgttttctaggaccaaacataatataagttttagaatttgagaaacaaactcaaaatagaaatctttctcctaagtttaaaaggaaatgttagagaatattagagaatggttggtgagttaattgaagttagtcaatattcaattaggtgtgtggagttgtgtagaatccattttttttttcgatatttggttataggacctacacacacgattttctcaaattagaaaattaattgatttaaaattaattaaaaaaaattgcatttttaaattgtttaatctttatactaaagaagaaaacaaagtgaaatgagttcaaaaaagcatgtaaaaattatttattcacttaaaatctagttttttttttttttttcttttcttccatttccaacttttaatatttccccactaatttttcaaaaccaaacatagggtttgagtaaccatccatgatgaaaacagggtctaatccccaaaatatttcccatatcaaggacaccaaccatgacgaatttttgtgaagcataatacatcatgctcaaattatgtgatatattagggattaagaaacatcatacatgatgataggtgtgccaactttcaaattgaatgtctaatccatctaaccaattctacagcccattttctttctatcatccccttcaaatctcaaaccccaccatgtcaatagattagtatcttctaatattgcaaaaattggtatgccattttgtcattttgatctcaatatagcaaaagttgatataaaatttctcataaatagatcatttgaaaatgatttgaatagtggcaaagagaagaggggtttttttttttttttataaaaaatattttaaaattatttttaaaaacctaaaaaattatttgaagtgattcaagataattataaaaatcatttttctgttgtataatacaagtataattaaaatataataaaattatatttgagaatatatatttgaaaagtgaaaattattttttaaaagaattaaaaaaatagaatcccataaaaaaaaaatccttgagaggcctgttataaaaaaaaatgaatattacaaatatgaaaaaatatattaatttaaataaaatattatttcatatatatttgaattcaaattttatctaatataaatattttgtttatttattaaattataaattattataagtggataatttttatattagaataaattatttaattcattataagtacataaaaatattttattaaatcatttaaaaaaatacaatacaataataaagtcgtataattatatatatatatatatatatatatatatatatatatatatatatatatatatatataaattaatatttttattaaaaatttttattaattaatttatatatataattttttattttaatcattttaatcatgaattttttttaaagaaaataaaatattatatatataaattaattaattaaaaaaaaaaaaaccaatcattcttgtggccagatccaaagttcggtgcgtaaattcttagtttttacctatgatcataatgattgtgattgaattcgaaagcaatttaaaaagcattttcacaactaataatttttccaaaaaagaaaaatgaaaaaaaaggccatagcaataatgtgccacgcatgttacgcagagagtttttcttctgacgcaagcaatcattgttccactttgactgcggtgccaccacacagggcggtcttctctgccgactccagatggacacttggaactctaccattggctaacctcaaacctaagcgtaacagacttttctacaagtaaaataataattttcctgcatagtttgtggatgaatctcaaccgtccaaattcctctaatcaacggcttaagatcaatactccatagaacattctcgaaacttacaattaaaatgctatatataccaagcctggcttcacatgtcctcacaaaacctagcggccagactttttgcttctcaatttttttttaatatctccttctattttgttcgacttagtcgtcgattttttcagtcggtgcgagaatggccggaaagggagagggtccggcgattggaatcgatctcggcacgacg

SEQ ID NO: 10845 - DNA, 9958 bp, Vitis vinifera
  Intron number 3 from transcript GSVIVT01025507001 (locus G SVIVG01025507001) derived from phytozome v7.0 (chr-ID chr6 ; pos 230170 to 240127 reverse strand)
agttgctgttacagctggcctcatcttcctgcgaggtatgaaatatatctttttctctgctgggttgtagaagttttgttgatctttttcgatgttttgaattgttttctttctataaccatgtaactggtgtggctataggccttagatgatgcttacatggcttttccctccttttatggagcttggaaatgtatagggattaagcaggtgatgaatgtgttttttgacttcctaatattagaaaatagttttttattttttattttattttttatttttttattttttttatagaaacaaaaacaatttcgttaatagagtaaataaggaaagaatgagaaatcattttctaatacaaaacctgatcaaaacaaaggaaaaaaagtcttaaagacatcaaaatgtcttgatattactattttaatccttttgattcacatattgaaattcaatcaagttgaataaagttgagagaaatgccttggaaagctatagtagtaaaggcccaaaaagataaataaaaatagactaggtcccttaaagtttcaaaagtcctccacttgctctcaaagatccttgcattttttttcctgccatactatctaaatcaatgtaagccaagtgatttaccagaaaactttgcctcttacagtgctcctcaatcccctaaaagaaatggtaaacatgtcactgacacttctaagatgaacctaatccaagctagctggttagaataacttgtatcataagtccaaagttgtcgaatagtatagaaaaggtgatttatcaattctccaatacccatacatagagtgtaagaatatggattaaggactttgaaaggtcttctcacttgaagcaagtcgttgttatttacctttttgttagccactaacttgtcaaaatattgtgtgaatgaccgaatgccttggccttgagttttatatattatatatagactttacaaggatgctatatgttgagccagaaaaccacccacgcgcgtttttccgaccgacgactgcatctcacgtgccggcgcgtgagggcgcgtgagccactttccggcgacgcgcttcctcctccagcctcgcttgacgccgactagccacccttcatacctgtttctgccatccgagccctgcacgtgcctcttttggggttcttttgcctccgccggccctccgaatagtttttccggcgtcctccggctattttttctcaaccccaatccctgcacgtgccttgggaagtgttcttctacctttccggtggtaccacgattgtttttcttttctatttggtctctcacacgggcgattcttcagtttttccttcttcagccgcatctgaagccgtattagggctctcttcgatccaaatatacttcattctccagataagtggatatggctactaaaacttccattttttcctctgtcatatctggatctcctatgattacttcggagaaattggttggcagtgaaaattatctttcttggtctgcctctgttgaactttggtttatgggacaaggatatgaggatcacttggttacacaggaggcagatatccctgaggttgagcgcgtacagtggagaaagatagatgcccagttatgtagtgtattatggcaatcagttgatcccaagatccttcttcatcttcaggcctacaaaacttgttttaaattttggactcgggccaaaggattatacacgaatgatatccaacgtctttataaggtggcttctgctattgtccatatcagccaacaggacttggatctatctacttatattggccagattgcctctcttaaggaggagttcttgactgtgatgcctcttactcttgatgttggggctcaacaaacacagcttgataagttcttcatggtccttactcttattggcctccgtccggatcttgagcctgttcgcgatcaaattcttggtagttcatcagttccgtccttggatgatgtgtttgctcgcctccttcgtatctcgtccactcagattttgccatctgatagcatttcagattcttctgtgttagtttctcacactacctctcgaggaggacgcagtggtaaccgaggtagacgtcaacgtcctcattgcacctattgcaataaacttggccacactcgtgatcgttgctatcagttacatggacggcctcctcgcactgcccatgtggcccagtcctctgattctcagctgcctcaacctctgagctcctctgcatctcaggcatctcaggcttctgttgcctctgttgcccagcctagtaatgcttctgcctgctttacccacacatcttctcttggaccctagattctagattctggagcttctgatcacctatctggtaataaggatcttttctcctctattactactacctctgctttacctactgttaccttagctaatggttctcaaactgtagctaaaggtattggtttggcccttcctctgtcttctctacctctcacttctgtcctttatactcctgaatgtccttttaatcttatttccattagcaaaatcactcgtactcttaattgctctattaccttttctgataaatttgtgaccttgcaggaccggagtacggggaagacgattggcataggacgtgagtctcaagacctctatcatctcacctcggattcatctcctgcagtttgcatttccactgatgctcctctcctcattcacagtcgtttgggccaccctagtctctccaagttccagaagatggtccctcgtttttccactttgtcattgctttcgtgtgagtcatgtcagcttgggaaacatactcgtgtctcgttcccaaagcgtttgaataatcgggcaaagtctccttttgagcttgtccacactgatgtttggggtccttgtcggactgtgtctattttaggatttcagtattttgtcactttcattgatgactattctcgatgtacttggttatttttaatgaaaaatcgagttgagttattctctattttccagaaattttatgctgaaacccaaacccagttcaatatttctattcgtgtgttacgcagtgataatgtcagggaatattttttagccccatttacttcatttatgtctcattatgggattcttcatcagtcttcttgtgctcatactcctcaacaaaatggggtagctgaacgcaagaatcgacatcttgttgagacagctcgtactatcctcctccatagtaatgttccttttcgtttttggggggacgctgttcttaccgcttgttatttgattaatcgtatgcccttctctgttttacatgatcagattcctcatttctttctcttccctgaccaaccactttatttccttcctcctcgtgtctttggttgtacttgctttgttcatactctcactcctggacaggacaagctttccgccaaagccatgaagtgcctcttcttgggatatccagacttcagaagggttatcgttattattcccttgagactcatcgatactttatctccgctgatgtcactttctttgaggactcaccattcttttccaccacttctgcgtctcttcttgtttctgaagtcttgccccttcccattgtctccccatctgatgttgtgcctcctcgaccacttcaggtttatcatcgttgccctcgtgtcgctgctcctctcccttttgctgaggcacctactgactcacttcctatcccttcggcttctcctgcctcgactctgccttttcctgatgatttacccattgctattcggaaaggtactcgctctactcgtaatcctcatcctatttacaattttgagttatcatcgattatcttcaccctattctgcttttgtttctgctatatcctctgtttctcttccaaagagcacccatgaagctctttcccatccaggctggcgacaggcaatggtggatgaaatggctgctctgcactctaatggcacttgggatcttgttgttttaccctctggtaaatctacagttggctgtcgttgggtttatgcagttaaggttggtcctgatggtcaggttgatcgccttaaggcccgcttagttgctaaaggctatactcaggtttatggttctgattatggtgacacattctcccctgttgccaagattgcttctgtccgcttacttctctccatggctgctatgtgttcttggcctctttatcagttggatattaaaaatgtcttccttcatggtgatcttgccgaggaagtttatatggagcaacctcttggtttttttgctcaggggaagtctggtttagtgtacaggttacgtcgttctctatatgacttgaaacaatttcctcgagcatggtttggccgttttagttctattgttcaagagtttggcatgcttcgcagtacagcagaccattcagttttctatcatcataactccttggggcagtgtatttatctggttgtttatgtggacgacatcgtcattacaggcagtgatcaggatggtattcagaaactaaagcaacatctttttacccactttcagaccaaagacttggggaaactcaagtatttcttgggaattgagatagctcaatccagttccggtgtggtcctttcccaaaggaagtatgttttagacatcctggaagaaactggtatgttagactgtaaaccgatagacacacctatggatccgaatgtcaaacttgtaccaggacagggggagcctttaggagactctaggagatatcgacggctcgtaggtaaattgaactatctcaccattactcgtccagacatttcttttcctgtgagtgttgttaatcaattcctacagtcaccatgtgatagccattgggatgccgtaatccgcattcttcaatatatcaaaagtacaccaggccaaggtgtgttgtacgagaatagaggtcatactcaggttgttggttacacagatgcagattgggttggctcacccacagatagacgttccacttcagggtactgtgtttttattggaggtaatctaatatcctggaagagtaagaaacaagatgtagtggccaaatttagtgctgaagttaagtatcgagctatgactttggcaacatgtgaacttatatggttgagacatcttcttcgagaattgagatttggaaaggatgaacagatgaaactcatctgtgataaccaggccgcattacatattgcatccaatccagtctttcatgaaatgaccaaacatattgaagttgactgtcacttcataagagagaagatcgcatcaggatgtgttgctacaagttttgttaattcaaattatcaactagcagacatcttcactaaatctctcagaggtcctaggattaaatacatttgtaacaagcttggtgcatatgacgtatatgctccagcttgagggggagtgttgaatataatgaatttatagtgtacaatctttccttttttaatataggtcacatgtatggtagttaggactcctagccttgtatatatatattttctcaattgtaagtagacactacatgaatgagaatcagggttttcttctctctctctcttaacactatacatggaaagcaaataaattcccgcatgattctagccctatacatgtaaactataatctgtcaaataatgtatgctaactgtacagaataataaatggagaaataaggaaacaattgtgggctaaaataaggaaagaagtgtggacaacaagcgtgggctaaaataaggaaagaagaagtgtggatagcaagttgtcctttgacagccccctcaaattgatgcaggttgatcaacaagcatcaatttgctacttagcaagcaatgtcgatgacgagggagagctttggtgaagatatcagcaacttgtaagtcagtggaaatatgtgaaagagtgataacacgagcttcaaaggcttcacggatagagtgacagtccatttcaatatgctttgtgcgctcatgatagacaggattggccgtgatctgaatagcacttgtattatcggcatgtagaggtgtaggatcggtctcagaaaaatctaactccgcaagcaaacctcgaagccaaatgatttcagaaaagcaagtgacatcgcccggtactcagattccgtagatgacttagagactttgtcttgcttcttacttttccaagatattaatgcatcacctaagaacacacaccaaccagtgatggagcaatgggtatccgcacaaccagcccaatcagcatcactataagcaacaaggtgagtagaattgcctgcagggaagaacaagccacaagtagaagtgccttgaacatagcgtatgatcctatgaacaacagccaaatgaagatgacgaggagtctgaaggaactggctgacttgctgtacagcaaaagaaatgttcggtctagtaatggtgagataaacaaggctacccaccaacttcctgtataaactgggatcagcaagtaagtcgccctcctctttgcgaagcttgacatttaattccatgggagtatcaacagaagtagccccttgtagactagctatagccaccaagtcactcgcatacttatgttgattgagggaaataccaaagggactatgatgcacctcaagaccaagaaaatatgtgagaaacccaagatctttcatatgaaaggactcggagagatgagttttgagctaaccaagtaaaacagaatcggaaccaatgatcacaatatcatcaacataaaccaaaagaacaacaatacccatgtctgatttccgaagaaacaaggaagtgtcatacttgctctgcttgaatgaaaattgtaataaagtggtgcggaatttatcaaaccaggccctcagagcttgtttgagaccataaagagagcgacgaagcttacacacatgtgaagtcggagagggaaacaatcccgggggtggcttcatataaatacactctttaagatccccatgaagaaaaacattttttatatccatctgatatagtggccaatcactggaagcagcaagagctagaatcgtacgaacagtagtcattttagccacaggagcaaaggtctcttcataattgacaccatattcctgattattcccaagtgcaacaagccgagctttgtaacgatccaaacttccattagatcggaccttgactgagtaaacccatttgcaacccagaggaacaatagtgggaggacaaggttcaatgtcccaagtgtgattggcctctagagcggcaatttcttcttgcatagcttgtcgccaacaatcatgcttggtagcatgtgagtagcatgtgggaatatcaaaattggacaatgcagtagtaagggctgaaatcatttgcaatgaaattgaagttagccaagatttatccaccaccctgaacttcattctaataggctgttgctccttttcctcataattccattgagagtctcccatcttagaaagagaagaagcctgagaaacatcccttagcatttccaaatcctctaataaggaaggcagtcttggtcgtgaagcttcatttgatagatcaagaggcaagcctcacaatcctgaacttcaatttcttcacataaaagtctccactaacctaggataactccaactacttgaagaccccatttcacaatgtgtaggagacgggtttaggtccacaatccattgtagattcttggaaattgctttttgacatagaagcaattgaactggaacttatcctcaatcaaaccctaacccccaccaccatctcctcctcctcctcctcctcctctctaaaccattctgaaagcccacttccattctcaatgacttgtgggcccaggatgtactggacacttctttaaaagatccagctattctattctagcccaacatcaaaagagcatccttctcgttgcagcccacttactattcacctcctcaaatcttttgggctcacccaactctctaatacaactgcatccaagactcttagaacactgcaggccaacaacctcctgcttctggcctaataaccacaattgctagtgactttcccttacaagcccaaacaaccatccttacctgagtggcacatgcaatccccattttcttctgcccactagcatgcttcattgaaaaacttttgagaggacattggattctatctaccatcagagtccaagggaaggctgtagaagccatagcttctctgctacactcctttttagacatgtttcattctttggacccacccccatcttccacatgaatcacggcgtgagtctaacttcacttcaacttcaacctcaagactccctttttctttttaaagaacacctgatggagctctcaatactaccaatatcttcaaaggtgaataccacactaagttttcccatgggatagaaaaggatgcaagacctgtcaccacctttaacttagcacctccctgccattgtttatttattatttttatttttatttttatttttatttttaactaagattcccaggcacaacaaataccggtgaaggtttgtttcttcatccactgctatgaagcctcacacatgcatctccacttccttaaaaaactcttactctcacaattgcaccagcaagcctagctatttcacccgattcttttctctgaatgttcaagctagagcatcccaccatgcgcaccacctatccaagatgaactagtttcatttgaaaacaaagcctccctttttccaagactttttgtgctacctatagggatgataactaaaaaatgaacaaggagtcaatcagcgctgccactttccctgctacatagaacttccaatgaaggtttgcccattgttccacatcggtcataactggtgcagaggcactcttaacttcctacctgtccaccaaacaacagttgaggactttcaccttagggggatgctcaacatttgttgcctacaataacagtgcatcccctaccctctttggatttgtcttgaaagtctgcaaagttgaattcctctaagacaaagacaaaggaagaagcccttcttggactgttctacttaaccttcccttctttttcactattgccacccactattaccaagtcttggatctttgaagccattgtttccctcttaaagggccaaagtctgttggaaacatttcaaagtatcttctagcatcctcagacatgattgaaaccctgagataccttttggcttattctgttgcatctcttccttaaaatgtctctgttgtctttcagctcttcttggaaccactttttcgccttccacaagcaacaacatcccctttacctcattcctcaaccttgacttcaacatgctccttagcaccacttgtgagaagctcaaagatttttgaatccacatagaccacttttgatcttgtcatctcggatcttttatgctaaggagttagaccatagaagctattttctttggtgattgactcttattgttgcaaatatgacacctataaggagaaatgatatgatacttttcctttgaggtacgtctcttgtatttatctcttcataatctaattccaataaaagatctttaaattggaagtatgagaaggccaaacaagcttggagaaaggaaaaaggaataaggctgatccgatgggaaagggccataaatagctttgaataaagaattgcaagagaaagtaatactcaactatattctagtatcttaaataatgagactggtgcaaagcatgtttagaagagaaggaaaaattgggcttctttggaattttctttgcgttgaaaatattatagtctatagttgtgaaggttatgtcttagtttttcatccaagacatttcatcatctgcaggcccaagaaggtttctgtttcatcatacattgggg

SEQ ID NO: 10846 - DNA, 5440 bp, Vitis vinifera
  Intron number 1 from transcript GSVIVT01003736001 (locus G SVIVG01003736001) derived from phytozome v7.0 (chr-ID chr1 1; pos 7520395 to 7525834 reverse strand)
gaaaacaagtccacccctatagaggtttagacaaaatgattcacacaattcttattagaagaagaggtataaatacagatttgagaaactaaaattactcctaaacttgtgctaacgtataacaacatatgtgaaaataaaggaaagaatgagctgtacagatttcctaaactagctgatcaaatgcagttacgaattctgatgctgattttctgcatgaatactagctgtccttatatgccctctcaagatggaggtgccatctgcaacaccaatcttggatcttaatagttgaaagcgttgacgtgagagtgattttgtaaggagatcagctagttgatcaatggtatggatgtgctgaacacgaatagttcccttttggacaagatctcgtacaaagaggagatcaatttcaatgtgtttcatccgtgtgtgctggactggatttaaactgaaatggttggcgccaatattatcacaaaacatttgaggtgcttctatgagagtgagaccaagttccttgataagagaatgaagccaaattgtttctgatgtggcagtagctagtgcccgaaactctacttctgtagatgatcttgagactgcccttttcttgcgtgcagaccatgagattggattaggaccaatgaatgtgatgaaagcagtggttgaaacacgagtgtccgtatttgatgcccagtccgcatcactataggtcttgagttggaattgatcatgcttttggagaaggataccatgaaacatggtctgtttaagatatctgagtagtctttttgctgcggcccaatggtttgttgtcggcttctgcatgaactgagataatctgttgactgcaaaggcaatatcgggacgagtgagtcccaaatactgaagtgctccaatgatcttgcgatactcagtgctgtcaacacattcagaattatcttgaactgtaagcttggttgtagtggacattggagtgagtgtttctttagcattttccatggaggttcgtgaaaggagatcccgtatatactgatgttgagatagaaagagcccctgtggcgttggaatcacttctattcccaagaaataatgcaaggagcccatatctttgactgagaatgtagagccaagcttgttgataatgttattcacaaagctgagtgtgttgcttgtgacaattatgtcatcaacataaacaaggcagtagcacaagatatcatgagacttatagatgaacaaagagttgtcagtggccgagtgaataaaaccaaagctgaggagtgcatcccgaagggccttataccattgtcgtggggcttgtttaagaccatagatactcttttttagcttgcaaacatgctgaggttgagatggatcttcaaatcctggaggttgatgcatgaagactgtttcttcaagattaccatgcaagaatgcattattgatgtctaactgacgaaggggccagccatgcatgacagcaatggttaaaagaagcctaattgttgctggctttacgacggggctgtaggtttgagagtagtcaatacctggccgttgatgaaatcctttagcgacaagtcgagctttatatcgactgattgttccatcgggatttcgtttcttccgaaacacaaatttacacccaacaagattctggccaggagtgggaggaaccagttcccacgtcccatgttgaaggagggttgtcacttcttctgacatagccttgcgccagtgaggatctttaagagcttgacttacacaacttggttcgggtggttcaggtaaggggtgcttggtggtagtgtggagttgttttggccgaaagatattgttcatggagcgagtgatgatggttcgtggacatggtggtggagaggatggtattgaattttctggttgagaaacagaagtagaaggtctaagaggtacctgatctgaagtggagagtggtgcctcttgaggttgcacaagagctggatcttcacttggagtcgaagaagcagaggggatatctccttgagcccgtgtgattgctggaagctccctggaagcaagctgcaaaattggtcctgaaaagaagaggtttctggtggggatgagtcagtgggtgatggcatggaaacctgtttgaaggggtaaacagattcatcaaaggttacgtgtttggaggtgtatatgcgttgactttgtagatgaagacatagatatgcactttggctagtagagtagccaacaaagatacaaggaacagatttcttttgaaatttgtttgtgttatacgacttcatcaagggaaagcagaaacatccaaaggaacgtaatttttcataccgaggttgttgcttgaagagagcttgaagaggtgatttatgatgaagaacaggtgatggaagtcgattgattagatatgtggctgttgcaaaagcataagcccaatattctgatggaagagaggcatgacttagaagggtttgacctgtctccacaatatggcgatgacgacgctcagacactccattttgttggggtgtataaggggttgttgtataatgactaatgccatgggttgtgaaaaagggtcaaagaacagtgaactctcctccattattggaataaactcctttaatttttatgttaaaacgagtttcaatcattttgtagaaatgaggaaatatggttttaacatctgatttttgatgcaatggaaagaaccacacatatttggtaaagtgatcaacaaaaataacataatatctgtggccattgagactaggagtgggagaaggtccccatacatcagtgtaaagtaaatcaaatggtgttgtgctagttagaccgtgtttatgaaagggtaactaatgagctttattggtagaacacgaatgacaattattagaactagaaagatatgaagtggtgggaagggagaaagaactaatgaggcgagtgacaactttgaaggatggatgaccaaggcgctgatgccaaccagctactgatgtgcgttcatggacaaaagcaattggagtagcagcaggcgatgagggtagagggtagacttcattttcacacggtccttgaagaagaatctcccccgttctccgatccttcacaagaaaataagttgggtgaaattccaggataacattgttttgctttgtgaagtggtgaacaaatatcaagtttttgttaatggtaggaacacatagagtatcttcaacttgaaattttctgtttggaaatgaaagagtaagagaaccggaatgagtaatgggcaaacctgatccatctccaataataacttcatcagtaccatcatattcagagtgaaattgtaaatttgaaacctgagaagtgatattatgggaagccgcagaatcaatgagccaacgtttgtctagactagaagtagtagttgtgcagttcacagtggcttcagagggtttcaatttcggacagtattttgcaatgtggccttgttgatcacaatattgacaccttggagggtatttgtattgtttcgactgtcgagactttgatctggagtcattcttggattgttgataagttgataaagactgattctttgaggagcgtgagtccctgcgttgagtggtattggcagtaactaccaaggattgagcagtggagtcaagccttcgaagatatgcctcatgaccaagtagcagatcatgtaattcttcaaatgagagtgaagactctcaggctcgaatcggggcaacaatgtcacgaaaatctgatcctaagccatgaagaacatatagggtgatgtcatcttgagataatggggcatcgatgagagcaagctcatcggcaatggtttttacagagtgtaggtactctgtaatgttgcgattgccacgttgcatgagggtgagatcctctttgagctgcatgacacgagtcctggatcgactagcatacagttttgtcaatttagtccaggcttgatatgacgtctgggaggttgctatgagtggtatcacagctggggacactgaagtcagaattgcacttagaataagtttgtcctgacggaaccaaaggtgatgagcggtagtggcagctgcatcagttgacgtcggtaggggtgggcaggtatgagtgccatcgacatagccaaagaggttatagccgaggaggagagactcaaattgggcatgccatgaagggaagttggttggtgtgagacgtgcaataatttgctgggtggcattgatggctattggaaaactatcaaaggaagaagtggccatagcagaagtgagaaagacaggaaatactcgttggagttttgaggtgggctctgataccatatagaggtttagacaaaatgattcacacaattcttattagaagaagaggtataaatacagatttgagaaactaaaattactcctaaacttgtgctaacgtataacaacatatgtgaaaataaaggaaagaatgagctgtacagatttcctaaactagctgatcaaatgcagttacgaattctgatgctgattttctgcatgaatactagttgtccttataactcctaacctaaaattgttttcatttattttttatagatacagggtaagtatgaaaatgccggtggaacgaaaattatgtagaagtcatagggatatttggaaaaacttcaaaaaatgataaaataaacaagaatacacatttttaagttgttttataagtgtaattgacttaaatatgatcaagaagaaaaacatcggtagatagagacatattgataaattggatatttaaattttaagaataataaatatgaattttgaaagtgtataaagttagaattgagttaaaaaatatttgattttattgaataaaaacaatttatacataagtataatatatatgagattgcaatagtttttagtatcaaaatgaagatcgatgtgggtccatcatattgttaaatgaaagaaacttatcttattgaagataatatttatttaaaaaaattttaaatatttttattgaaacatgttttattatattttaaatgaaaaattaaattaatttatataaaatattttatttgatatttaatttttaagattttattaaaaatacatggtaataacttttttttattaatattaatttatttaaataaataaatttattaataatttattttatcaaatgaattttaatttataaaatattactgataaaaatcgaaattttggtagtaatttaatcaaaataaagatggatgattaataattatttatatagagaggaaaattgttttcatgatttgtttcccttgttttctctctccactaaatataaaaatcgaaagggccatcatccgcttctcccactcgggcatcaagaactagaagcccttttctgaagttgccctccagacgagaga

SEQ ID NO: 10847 - DNA, 12344 bp, Vitis vinifera
  Intron number 10 from transcript GSVIVT01036597001 (locus GSVIVG01036597001) derived from phytozome v7.0 (chr-ID chr 13; pos 18908505 to 18920848)
ctttagctacagtggcaaggacttcatttattcaggtattggcacatttccttctgaaaattatccatcttaatgagcaatcacaaatgttgcatgaaatatttcattttttttgtttaatttgagacatatttagttgataagtttagtttaaattgtctgaacactaagtctatattttgatttaaaattgggagggagcaaaatcaaggatcgacaagcaaatatgtcaattggggaaaaaaaaggccccatattatactgttaaaatttctagaataaaaaaaaaaccacctactaatcgctaatttacatttagttgggctagccctttttaatagacaaataatagattaaagggtgcctaacataatggggctgcaatccaagtgcatagttgtatgcatagaataatgaagggtgaaaaagaaaaactacaaaatcctacctcctatctgtgccatcattaaagtccaaaactctttcattgactaattagagcactccttttagaacttttgtcattgtacccactccaaattcaccaaagcaaacataaagggctgttctccacacctttctatgctagtccccacacctttgtcatgccatactaagagcaatttttttgctaaccatgggaactccatttaaatcccaagcaaagaaagcaataggtctgagtatttaagctttattattgtggatgagaatatggtttacagattcttccctttcattgtgggaacatcatcttaactaaaggatgccctctcttcatgagttgatcaactgttagaatttgtgtccccaaacagctccccaagaaaaaaaaaagcacgctctaagacacactcttgagccccacacctccttagcatgaaaccatgaggacaagaaaaattaaaggatttgacagaaaagtacttgtactttgcacccctttagactataatctatcctcactcagccacaaagccaacatgcttgaggaagtgacctactatttacacccctctaatcatgaaatgatctcaggaaaataaagagtccagtggccctgtgctgtctccaccacccaaagagccactactcccattttcatgggaagcaattctgaagggagtaggaaaatgatctttgggaggaacctcctcgcagcatctatgaaacaaaaatttggccttgagcacattccttatggagtttccagttctaagcctgaacttttccaacctgttttgatagcttccgctaggcgcactccaaatgcctccccagattccttagaatgccaaacaccttccatgtttcaagatttactcaatataagctgtctccacaaacaatcctacttaacaacagaccttcatgagcatttaccaagcaaagttctatacaatttaatcatattactatttcaaaccactttagcatagtggtttatctctttcattagaaagattataatactagtatagattataatactagtatagattttaaattgattggatttggtaactagcatagtggtttctctccttccataaggtccaaaatatgcacaaaggagttgctttccatgccttctttcttttcttcccaacaaaggtactccgttgactaaggaggacatctttgattaagaaagttattactcacataaaaaagagcaaagataagatgcaacaacatgattgctgactcctcttcacctttacacaaataacatctgctaggtaaacaccaacccctcttttttagttgatctaaagttagaattttcttccaaactacttcccaagcaaaaaaagtggactctcattaggacccaaggattccacacaatgcttgtggggggaagccttttggaaagcaacctgccaaggaggaataaaaggatttaaatgtaaatgtgccttcctttgataaccaccaaaccatgacatcctcaacaccactttgatcacttgctcttgaaaccttctaagcaactcttccacttctcctaattcccaatcatttatttgtcatgtgaacactagattccaacaacctactttcccaacttgttccacatttggtctagccaaacttccttattaggggctattgaaaacaactctgggaaagccatagccaaggaatcctccccacaccacctatccttccaaaacctcaccctcctaccatatcctatcctaaaaccaatcctgatgttgaactccttccacccactctgaattgccttccaaaggcccaccccataaccttcccttgaatctcaagaacaccctcaccccccctcccctcccctccctctgaagtgaatctccaacaccatttacctataagggccttattcaaagtggacaactttctaataaccagaccctcatcctttttatccaagccaacaattgatttgttcactacgtgcgacctactttggggctctcttccccctcccccccccccccaaaggaagtccctttgaagtttctccaatctaagactcaccttatgaggaattataaacaaagacatgtagtggattgttagtttagataaagtgctctttagtaaaatcaatctccctccttttgataatttccacctcttctatataacaagttttttgtgaaatcttttttccactacatcccacatgtgtaaagacttaaaggaagctcccaaagggaggctcaagtaagtagaagggagagagcccactttacaccccacctccctagccaaatcctttattttagaaacctgctcaactgggattaactcacttttatccaaattagtttttaaaccagaaatcgcctccaaccatgtgaatgcccaactcaaatactccaaatgttgtatgtttgagtcacaaaaaattagagtgtcattagcaaaaaggaaatgggacacttccatacccactgctcctctcccactagccaagaatccctgaatgatgccccttagcatagccctcttcaaaatactagaaagtgcctccattgccataatgaagagaaagggggaaagatgatctccttgtctcaagcctcaagaactttgcaagaaacctataggggttccattaattagaaccaaaaagctagttgaggaaatgcaccacctcatccaccttaccacccacttagcctcaaagcccatttttaacatggttgttaataagaacccctagtttacatggtcataggtcttgtcaatatccattttatagatgaccaccctttttgagctttttagtcttcaggttgaagactcattttctataaggactatatccaagatttgtttgccctccacaaatgtgttgggaatttgaaatcactctcctaaccaatctttttagcctgttatccaaaactttatctagaagcttataaaggctccccaccaaactaataaggtagaagtccctcaaatcctctaccctacccatttcttaagaataagcataataaaaatgacattaaggtttctctcaaattgatacatatcatgaaattctgcaaagaagctcataactttattcttaagagtgtcccaacaaaattgccaaaaagccaaagtgaacccattcggaccaagagttttgtccccacacaaactggcaagagctatatgaagctatatgaacctcttctgaaaaaaaaggatcctctaagggcctcgactcttctctgtccaaagtagaagagaacaacccgttgatgcttagtttccattcttcagtctctggcaaaattatttgaaaagtgttgaccacctcctcctttatcttatcttctttagtcaactttcttctgttcacgttgatagcaaatttcttcttctctaggcattagccattttgtggaagaaccttgagtttttatcaccttctttcaaccatttttgtctccatgaagtctcttccatgcttgcccacttattgaaatcctccacaacccttcttctagcctcaatatcttcaagggaaaggcccaaatctctttctttggcatcccaaaaaccaatttgagcgagggcaacttttttgttagagaatacatactcgatcacctctttgttccatactttgagatcttgcttcaacgcctttagcttgcaaaataagatgtgactatacgagcaactgaaggtgtagcccgttcaccaactcctatccaagtctttgaacccttccacactcagtcacatgttctctaaacgaataggaattttttttgcttctaattcctcctccatttagtagactaggggcatgattggaagtaggcttgggcagcaaactctgacaaagagcactaaaatgactctcctactcctttgaaactaggaagcaatctagctcagaggaggatctattgtttaggtcaccacaccaagtaccctatgagaggtaaatccctcagttgaaactcttcaattatcttcgagaaatgtctcatcgccgatgacgttctcaagcaagttctcctttctccataaatttgagcatgttaaagtgccaccaatgcaatagagatcactccacaaccccttaatatcaccttgctatgctcataagtccttatcggtgttacaaaccggtccatacacaccagaaaacgcctaaaggaagttgtcatcatagttgttaaaccgaaaagatagagaatacattcttatttccatctgcagtagctccaacactctaccatcctataaaagcaaaatccactttgcctgacctctaaaatccacacttccccaatttaagaatccacctactctgagatttctcactaacatctctgacatgtgttcaaccttggtctccaacaaacagacaaggtttacccttagagatttgataagggctttcactaccttttgcttatcaacaagatttaatcccctgacatttcaatatagtatcctaattttcatcaccaaaacttgtacaactcccaaaagaactcccactcctttttcctaaccttaaagcgaaatcataattggtagggcattgaagcttgcataattctctctaaaatctagacttgaaggctaaaactttctgttttccaagagaagagcttttgcccttctttctagactccaatcttcatagtagagttagaatttcactctcgaatgcttcaactggcatccccacaaacctactagaggtcaatagtttaccaaatgagtccttggaagaagccccctctaccaattcaccaaattcaatgctacaaccaatccttcactgaaacttgcctccgttactaccgatccatctacctgaaaaatacttaaaggcccaggctctagcacaactcactcccaaaggggacctgctcttatcctcccatcaaaccaatgaccccatggcttcatccaaaggaaaggagtggttttcccgcccaaaagaagtagagaaaggaaaggatggacctaggaaacaaaaagcctcctccactaacacaacatttgtgatgacaggacgtaaggaaactgtaacaggaaagtgctactcaaacaccaatctgaagtgttccccatctttgatgcaaccattggagattgcacaaagattgaagatagggactgttgaatataatgtatttatagtatataatctttccttgttaatataggtcacatgtatggtagttaggactcctagccttgtatatatatatatttctcaattgtaagtagacattacatgaatgagaattaaggtttttcttctttctctctctctctcaacatggtatcagagccaaggaagaaaacctaattctttcctgtttcccgtgtcatcaactccgagaaaccttctggtgaccgtgtttcattccggtcaccttccccatctcccaatactttccggtcagtcggatcatcgtcagaaaccactcaccgccggcgaactttccggcgacgtatttttccgacactgaccataccagaaggagcgcctggaggagatctccaacttttgttaaggcaccggcaccaaaagatcatccacgcgccggccatgtgcaatttttcgaccggcggctgcatctcacgtgccggcgtgtgagggtgtgcgaagccttttccggcgacgtgcctcctcctccagcttcgcctgacgccgaccagcctccctacctccttggttctcccatccgaaccctgcacgtacctcttttagggatttttgtctccgtcggcccttcaaacagtctttccggcaaagctccaactactttttctccactctaatccctgcacgtgccttgggaagtgttcttctacctttctggtggtaccacgccgcgatctgaggtcgtctcccttttccggtggtgccacgccgcaatctgaagctgtattagggctctcttcgatccaaacatacttcattctccagataagtggatatggctactaaaacttccattttttcctctgtcatctctggatctcctatgattacttcggagaaattggttggcagtgaaaattatctttcctgcctctgttgaactttggtttatgggtcaaggatatgaggatcacttgattacacaggaggcagatatccctgagattgaccgggtacagtggaggaagatagatgcacagttatgtagtgtattatggcaatcggttgatcccaagattcttcttcatcttcgggcctacaaaacttgttttaaattttggactcaggccaaaggattatacacgaatgatatccagcgtctttataaggtggcttctgctattgtccatatcagccaataggacttggatctatctacttatattggtcagattgcctctcttaaggaggagttcttgactgtgatgcctcttactcctgatgttggggctcaacaaacacagcttgacaagttcttcatggttcttactcttattggtctccgtccggatcttgagcctgtccgcgatcagattcttggtagttcatcagttccgtccttggatgatgtgtttgctcgcctccttcgtatctcctccactcagactttgccatttgatagcacttcagattcttctgtattagtttctcaaactagctctcgaggaggccgcagtggtacccgaggtagaggtcaacgtcctcattgcacctattgcaataaacttggccacactcgcgatcgttgctatcagttacatggacggcctcctcgcactgcccatatggcccagtcctctgattctccgctgcctcagcctccgagctcctccgcatctcagacatctcaggcttctattccctctgttgcccagcctggtaatgcctctgcctgccttacccacacatcttctcttggaccctggattctagattttggagcttctgatcacctatctggtaataaggatcttttctcctctattactactacctctgctttacctactgttaccttagctaatggttctcaaactgtggctaaaggtattggtttggcccttcctctgccttctctacctctcacttctgtcctttatactcctgaatgtccttttaatcttatttccatcagcaaaatcactcgtactcttaattactctattaccttttctgataaatttgtgaccttgcaggaccgcagtacggggaagatgattggcataggacgtgagtctcaaggcctctatcacctcacctcggattcatctcctgcagtttgcatttccactgatgctcctctcctcattcacaatcgtctgggtcatcctagtctctccaagttccagatgatggtccctcgtttttccactttgtcgtcgcttccgtgtgagttatgtcagcttgggaaacatactcgtgtctcgttcccaaagcgtttaataatcgggcaaagtctccttttgagcttgcccacactgatgtttggggtccttgtcggactgcgtctactttaggatttcagtattttgtcactttcattgatgactattctcaatgtacttggttatttttaatgaaaaatcgagctaagttattctctattttccagaaattttatactgaaatccaaacctagttcaatatttctattcgtgtgttacgcagtgacaatgtcggggaatatttttcagccccatttacttcgtttatgtctcatcatgggattcttcatcagtcttcttgtgcttatactcctcaacaaaatggggtagttgaacgcaagaatcaacatcttgttgagacaactcgtactatcctcctccatagtaatgttccttttcgtttttggggggacgctgttcttaccgcttgttatttgattaatcgtatgccctcctctgtcttacacgatcagattcctcacttccttctcttccctgaccaaccactttatttccttcctcctcgtgtctttggttgtacttgctttgttcatattctcactcctggacaggacaagctttccgccaaagccatgaagtgcctcttcttgggatactccagacttcagaagggttatcgttgttattctcttgagactcatcgatactttatctccgctgatgtcaccttctttgaggactcaccattcttttccaccacttttgagtctcttcctgtttctgaagtcttgcccattcccattgtctccccacctgatgctatgcctcctcgaccacttcaggtttatcatcgtcgccctcgtgtcgttgctcctctcccttttgctgaggcacctgctgactcacttcctatcccttcggcttcacctgccccggctctgccttctcctaatgacttacccattgctgttcggaaaggtactcgctctactcgtaatcctcatcctatttacaattttttaagctatcatcgattatcttcaccctattctgcttttgtttctgctatatcctctgtttctcttccaaagagcacctatgaagttctttcccatccaggctggcgacaggcaatggtggatgaaatggttgctctgcactctaatgacacttgggatcttgttgttttaccctctggtaaatctacagttggttgtcgttgggtctatgcagttaaggttggtcctgatggtcaggttgatcgccttaaggcccgcttagttgctaaaggctatactcaggtttatggttctgattatggtgacacattctcccctgttgccaagattgcttctgtccgcttgcttctctccatggctactatgtgttcttggcctctttatcagttggatattaaaaatgccttccttcatggtgatcttgccgaggaagtttatatggagcaacctcctggttttgttgctcagggggagtctggtttagtgtgcaggttacgccgttctctatatggcttgaaacaatctcctcgagcatggtttggccgttttagttctgttgttcaagagtttggcatgcttcgcagtacagcagaccattcagttttctatcatcataactccttggagcagtgtatttatctggttgtttatgtggacgacatcgtcattacaggcagtgatcaggatgatattcaaaaactaaagctacatctttttacccactttcagaccaaagacttggggaaactcaagtatttcttgggaattgagatagctcaatccagttctggtgtggtcctttcctaaaggaagtatgctttagacatcctggaagaaactggtatgttagactgtaaaccggtagacacacctatggatccgaatgtcaaacttgtaccaggacagggggagcctttaggagaccccgggagatatcgacggctcgtaggtaaattgaactatctcgccattactcgtctatacatttcttttcctgtgagtgttgttagtcaattcctacagtcaccatgtgatagccattgggatgccgtaatccgcattctttgatatatcaaaagtacaccaggccaaggtgtgttgtacgagaacagaggtcatactcaggttgttggttacacagatgcagattgggctggctcacccacaaatagacgttccacttcagggtactgtgttttttattggaggtaatctaatatcttggaagagtaagaaacaagatgtagtggccaaatctagcgctgaagccgagtatcgagctatggctttggcaacatgtgaactcatatggttgagacatcttcttcgagagttgagatttggaaaggatgaacagatgaaactcatctgtgataaccaggccgcattacatattgcatccaatccagtctttcatgaaaggaccaagcatattgaagttgactgtcatttcattcgagagaagatcgcatcaggatgtgttgctacaagttttgttaattcaaatgatcaactagcagacatcttcattaaatctctcagaggtcctaggattaaatatatttgtaacaagcttggtgcatatgacgtatatgctctagcttgagggggagtgttgaatataatgtatttatagtatataatctttccttgttaatataggtcacatgtatggtagttaggactcctagccttgtatatatatatatttctcaattgtaagtagacattacatgaatgagaattaaggtttttcttctttctctctctctcaacagggacctccatccctctacaaagcaaagcgagccctatttttcccctcttattataccaatacccttataaaagcattatttggaacaaactgcccttctttagtggttgaaacaataaagacaaaaggagaaatcaattacaaaatcaattagctatgtccaaagaaaaagggatgcagttggaaaggatcgttttgcatttatttttcttttctctttttggttgctaatggagaatccaacttgacaacaggacatttactccgccattgtcgaaggaaatcctacatgatctaagcctacccttttaccttatactctacctaaatacaagagactcaaactttgaatctctaactcattgtctgagggtagaatcgttgagacaagcatctttgcctcattacatgtggtgttggccgggtaccttagttgaaattgaggagtccaaggatcctaggaggtgaactaatgtatttcgttggtaacgattgatactttagaatgaataaataagcaaataagttaatacgtgaaagtacatcaaggattataatttaataaatttatatatgacaatgcatcttgtgaatcgcattgactctcctttgtggctgaaaacctgagaattcctatatcaaacaacattctacgtccttttttccaatttgagaaaatcatgaatggtctctcttggtttcttaattgtaaattacatagcaaatgataggatatcctactcataaattggccttaactaaggatggcaacaaagtgagtttttttcaatacccgccccactccaaataggatggatttaggataaaaataaacaagttaggggcgggtttaggtattgccccaccatcctgccctcatttatatatataattaaagaaaattattttattttaatttttttaaagaaatttcaattttttaacacatcaaattaaaaataaaaaacttatttcttataaaaataaatttataaaaaattataatatttatttatttataaattatatatatatatatataatgtaattaatacttttaaaaaaaatggaaaaagaaaattttagtttgggtggagtggggtggggttatttagtacggaaatgggaatatatttaaataattaggatggacgggatggaggtgacccatcctaaacctgtcctattgccatcactagcctctacctaggtttacaatcagccctttccctgccattcctccttggaatttggtattggttcaaggtgggttgacatcaagttcagatccgattgtacaatgatctcaagccttgatggatcatatgtctgtctgtaaaaccgatcttaaatagttgaggtcaaacttgctggtttatatagctgtgtgtgtgtgcacgcacgcatgattattttttacatggtttgtaacaagaaaaaactctcattaggtgacacactggctgccattttgtatgtggttgtctccaatatcacaccaaaccaattatattacttatgattagatgtgaaagtttgagaaagggaattcaggaatttaagagatgccagccacaatgatctaaagcgtgtgttcatgtttttcaaaagaatcctgatttccaggcatatctttttcaggtatcacaggctgtccactacaagcatatattttc

SEQ ID NO: 10848 - DNA, 8648 bp, Vitis vinifera
  Intron number 2 from transcript GSVIVT01001703001 (locus G SVIVG01001703001) derived from phytozome v7.0 (chr-ID chr3 ; pos 12363928 to 12372575)
aacagtggtttgtgattcttttccgagatcaacatgtcagaatctttaaaaaatactagaacttgcagagaaaaaataaataatttgagagttaagaattgaaggaaggcacacatatatttcacaaatgagaatgcctatttataggcttacaaccaaaccaaaattgcaaaaaaatctcagctactttcagattttattggcactacttctactacctgaaaacagaaaattatggagcaagaatctgatataaaacaataacaaagactaatctaactaagactttttcaaacttcagaggcaaactctcatgagttctaacactcctccttgagatttgccttggacatgccaagcttcaaccttaggaactccaaccttgatttaggaagtgccttagtcattatgtcagcatgttgcacattagttgagcaataatgcaacttgacaagtgaattcttttcagcttcccttatagaatgaaattttacatttatgtgtttggtcctgccatgttggacaagattttgagcaatggcaatggctgagttgttgtcacggtaaagctctgttggtgagctttgttcatggcctagatcaacaagcaatttctttaaccatattgattcattcccaattggtgtctcagttgattcatgtcctctcaatggtccctgacagtggtgccatttgatacgtgtccagctggtgtcccttgattgtggtcctcagaagggagtaatcaacaaaatttataacctattacaccatgtactaggatagccttagctagcatagcatagtggctctagggtcgttcactgggatgggttttcactccacaattgatattaatccaaagatgaattggtgccttttcatttcaaggttagctttaaaagaaaacataaagatgtttaaaaaaggattggttttaagctaacaaaaaatagtaactgattttacttataaagaaaagtgtttcttggagtttagattactaggctcaggttcctcatacaaaaaggagagttccggtcacttgtttctttttctcgcattagagaattaacatatagttaattctctaaccggtgcggtacagatgcttcccattaatgggttcaaacactaaatctctctcactgatgcaccttgcaatggctcatgcttctcacctagcatttgccattcaaggtgatctttaaccttggattacccgtcaaaatctcgtaagagataactaatggatgtctccttatagtccaaaagcttaccaagtgttggctattctagaaaatcctaccttcaaaccacctcccaaaggctctcaagagataaactagtgcatctcaatgaatggagatcacttgccttatcaagtgttggtccaggtgagttaaaggcgttttaagttaactaaaaagataaaaaccattaacgggtcatactttctcttcattaaaaactaaaacaacaaaacttccaatttatgcatgaagaaacttacccggctttcttcactccaagagacgaagagcctagccactcatcctctgaggaaaaatcctcagagtttggttagctagaaataaaaagaacgagaaaacaaaaatatgaaggaaaaacagagcaagtgctctgtaaaatatatttcttactattacaaaaggttgtctccaagaacaagctcccgagatctctctgattgtaaagaaaattacaactatttataagaggttattcacccctttgttcttacttaaagactaaggaatcctatgataggtgggttacaaggagtttggggatttagacatcaaatatctaaagcaaaatatctcaaaaagtcggtcgaaaatatcaggaagcttcaggagaacaccgcggtactgtatactgagagaaaaactctccgggtaagcgttatcagaggatccagacatgtctgaccagagaagttgaaacgtcctcctctcccatccggcgtcaggcgccggatgtgaaatatccgatcagaggatccggacatgtctgaccggggaaattgaaacgccctcctctcccatccggatgtgagatatccggagaaggtggaatgtcggccggacagaattcttcccccgggtggaatgagctatgtcgcaagggggaccgtctgcgtgtgcaaggtgtagggacccctcctcctgatgacacggagcgcgcatcgctattcggagcaactccatctggattccccaagaggatacgtggcgcgctctcctatccggactccctcagggagaagcacatagcactcgtgaacatcacacccggacgataacatatcctatccgaatatgttgtccggatcattgactaaagtgagcaagccttgctatgtcattccgacagcctgccacagcccacgttctgcggccctccgatggtgtgtccggacgacctgtccggacatcttttgctccttgcattccggatttgcttatggcaaaggacttcaaagcttcggttcttcatgtttctgagctttccattgctttgccatggattccaaagaactctcctcaatcacggattgctttggtgatcaaaaagctatcaaaacaccaaaacttaacacaatttgattagaattgattgcaagggtccttaatatgttaattgggttaaaaggtgataactactactcaaaagtgtttaaaagagttaattacagtctatgaaatagcactttttgagtagtaatcacatattccttgatttgcagcaattgctaaggagatatactcaacttctacagttgattgtgccactacttcttgctttcttgaattccagcaaacgacacctgaactgattgtaaatacataacttgaagtgctattcatgtcatcaacacttcctgcccaatcactatcagcatagccatctagcttaactcctcatgtctttaaataccagatgccaagatttgctgtgcctctaacatactttagcaccctttttgcaactcccatgtgaacattgctaggtgaactcatgaatcttgaaagcaaaccagctggaaacatcaagtcaggtctggttgctgtcaagtatagtaggctgcctaccaagcttctatatgcagagggttccttaagtttctcaccatcattctttgaaactttctcattttgtgccaacagagttgctacttctttgcatgattctagcttgaatttcttgagaatatcaacaacatattttctctgtgaaatgaagatacccgagctacattggtatatttccattccaaggaagtagttcatgatgctaaggtcagacatctcaaatacatcttgcatttccattttgaactcagccagtaatcgtacattgcttccaatcactagcatgtcatcaacataaagtgacactaccaattgcaaaccatcctcattttgattcaaatacaaagtaacttcattttcactcctcctaaatccaagttggatcaggtgagagtcaattctgttataccaggcccttggtgcttgcttcaaaccatagagagccttgtgcagcttgtacactttgtgctcatgcctagtaacctcaaagccttttggttgttgaacataaatttcttgaagaagtataccatttagaaaagctgacttgacatctaaatggtacactttccatcccatttgaccagcaagtgcaagtagcagccttatagtatcatgtttgggtactggtgcaaatgtatcaccatagtccactccaacaacttgagcaaaacccttcacaaccaatctagccttgtgctcgaggattgaaccatctgaattgaatttggttctgaaaacccattttacaccaatttccttcttagcttcaggtaattctgtcaacttccaagttccatttctttcaataacatcaattttagctttcatagcctcaatccattctggaaatcttgcagcttctgtgtcacatgtaggctcaacaagtacaagattgcacctctcatacacatcaaataatggccttaccttaagcactggtgtgtttgaagttgcttcaacatcaagtggatcttcaatacttgtactttctactactggttcaagaatagatggagtggtttgatcacatttatggactttcttcaagtcccaattccagtaggaattttcatcaaagtgcacatctctacttatcaaaattttcattctacttgagttataaaatttgtaaccttttaattctgctgcatacccaacaaaaacacctttctcagctctttcatcaagcttacctctcttaagagatggcacatgaaggtaacaaaatgaaccaaacacttttaggtgcttgatagatggttttacaccagaccatgcctctattggtgttttgctctgaacagacttagtcggtagtttgttaagcaaatatattgaggtgttgattgcttcagcccatagaagctttggtagcttcttctcgaatagcatgcatgattcatgcccagttgggtatttttatcaaaaatatttataaatcctatgaccttatactggcgtagcaaaactactatagtatagcagctctaaggtcgaactctgggatgggttttcactctaccagtgatagacacaagattagaaattgagtctaatgatttcctttgttaaaaacttaaagtttaaaagaaaagaaaatttgttttgaaagtggtgtttggaactaaactaacatagaactagatacaaatggaagaaagaaagtctcccggagccaaaggttgctaggatcaaattcagaatgcaaagtgggaaattccagatttttctcctcgtattggggacaacaacataaatgatggttgtttcccgaatcggtataggtttaacaatgaagatttaatccataaaaagtcaatagaaatggtagtcaagttccattaatggctttagacactgtgggtcttcaccttgagccactttccaatggctcgtacatgataactaatggtcttatgtggatctagcaataagtatccacagagacctaaaagcttatcatgtattggccattcaaagtgattcaaagggatttaaagcaaaaatttagatttaaaaggcattcatgaactccaactacctatatttaatgcatgagagttttccacttttgcatctggacttttcacctagcttccttcactccaagaaaccaaaggtttagcctctcatcctttgggaaaacatcctcagaggttgtttggattccaagaaaaagaaaataataaaacaatcaaattgagaaggtaaggcagagcaaaggctctgtattttacttttttgcaaaaatgtacaaaggttcgtctcttcgaacaagctctcccacgagtctccttttttaagtgtttacaagagagtttatataggaaggtaatttacccttccttgaatacttcctagataaggaattacatgagtggctgaatacaaggagaaaatggagatttggtcacaaaatatcagaagaaaaagagtcggcacacaaaaatcccagtttcgcacgttgcatggtgacttgcgaaaatttcgcaagttgatttcgcaacttagaatccactttcgcacattgagatccaagtttgcaagttgcaaaatcactttcacatgttgggcttcacagcgaatgcacagctgccatccacttcaaatttcgcacgttggagttccaatttcgcaaggtgcgaaattgtccctcagcttaatgcagttgccttccaaaggccatatcttcctcatttcagctccaaatcatacacggtttgaagctttggattcttgacttcctgagctttgaaatggtatatagcatgtaaaaaatggacttggggaagtgctccaaaagtgtgaaggaagactgcagctgctgtcctctgttttcttcactctgtttttcctctctccattgctctttccttgcatactttgaacgactaaggcaaaggactatgaggttccaaagcttggtttcttcatgaatttgagcttccaaaagctttatcatgaactatatacagctttccctcattcttaaattgctttggtgtagctaaaagctatcaaaaacaccaaaacttaacacaatttgattagaaacgattgcaagggtccttaacatgtcaattgagttaaaaggtaataattactactcaagggtgtttaaaagaggtaattacaagctacaaaatagcatgttttgagtagtaatcaatgcaccttgccatctccattaccgttctgttcttcctcttagagactccattctgctgcggtaagtatggagctatcagctggtgcacaattccagcttcttgacaaaaaacattgaactcttttgaggtatattcacctccattatcagttctgagcactttaaccttctggacactttgagtttcaaccattttcttgaagctttacagagagcacttgtgatttggtttttagaaaataaacccaagtcattctactgaaatcatcaataaatagtgcaaaatatacattgttgcttaatgaggctatgcttattggtccacaaatatcttaatgaactaattccatcttctgagtagctctcttagacatattttgagggaatgatttgcgatgctgcttccctagctcacaactttcacaagtttaagcattaactatgatttcaggcatgtcttcaaccataccagcttcttgtatgaacttcaatgacttcaagttgaaatgaccatatcttttgtgccaaacaacactctcatcaatcttggcactaaagacatgaccttcaactaaatcaagcttcaaataaaagctatttccattcattttaatttttgctatctctgttccatgtacatcagtgataaaacaaaaattttctttaaaagagactgcatatccatttcttagcatttgtgtaaaattgagaagattttgatctagttctagaatgtaaagaacattagtgacaatttttgtacctctcttggtgcttatagcaattgtcccttttcctttggcctgcacaacttcaccatttcctaacttgacctttggttgaattgatatgtcaatggaggtaaaaattgatagatgtttggtcatgtgactggtgcagccaatgtcaatgagccaagtattcagttcatgagaattgagtgcttatgatgccataaataaatgctcataattttttttgtcttcttcactcacatttgcatgttgttgtgtttgctgctgagattgtttcttcttggctttgcaatacttctcactgtggccaagtttattgcagaaattacaattaaaaagaggtttacctttgtaccaacaatctttctcagcatggttggttctgctgcaatgagagcaaggagaaaattttccttttcttgaagatcctttagcttttcctttgttgttcttgaagaacttctttccttgaaagtttccagaactctttcccttatgattttcttgaaaagcaccttcagcggcttcatcacctctcattaagaccctttgctcctgtgcatgaaacttgatggttaactctgcaattgtgagactttgcaagtcacaagactcttcaattgtagagatcttggcttcaaacttttgaggcattgaaaccatgatcttttctaccaccttttgatctgtaaatgcctcaccaagaagcctcatttggtttacaacatccattaacttgctagaataatctttcatagattcgttgtctttcatcttcatcaattcaaactctctcttcaatgtgaggagcctgacaattttgacattgtcactaccctcaaattcaccttggagcttgtcccatacccgtttaggtgtttccaagtccatgattttggtgaagatgtggtctgcaagtcctgaatgtaggcaggtgatggctttgtctttcttgagtttttcctcttcatatgctttcatctgagcaactgtaggatttgctcccaatggtggtggatcagattcaaacatcacaacattctacaaaccttgagaccttaagtaaaacctcatcttgacaacccaaatgtgatagtgttcaccattaaacactggaattacaaaggaagtattgctggaagtaggcatgtttgcaccacgattgcctgaaaaaaaaaaaaatcacttaacctcactgtgtttagcactcaaaacagtcagaaactttgcctcacagcccataggaacagctgctctgataacactgtcagaatctttaaaaaaaatactagaacttgcagagaaaaaataaataatttgagagttaagaattgaaggaaagcacacatatatttcacaaatgagaatgcctatttataggcttacaaccaaactgaaattgcaaaaaaatctgagctactttcagattttattggcactacttctactaactaaaaatagaaaattatggagcaagaatctgatatgaaacaataacaaagactaagtctaactaagactttttcaaacttcagaggcgaactctcatgagttctaacacacgcagcctagctagcccaaaatctccaagcttagcattaa

SEQ ID NO: 10849 - DNA, 26951 bp, Vitis vinifera
  Intron number 9 from transcript GSVIVT01029404001 (locus G SVIVG01029404001) derived from phytozome v7.0 (chr-ID chr1 7; pos 16349093 to 16376043 reverse strand)
agccatcgacggttgcctgaagatcttagaaggtaaaattttaatccctttgagcttctcatacttttatcttatcctttttctctttattaattaccttagttctctaaaacttggcatatttttgcaggagaaatttttatatcttctatttatcctctggaatatatttttcttgtgatatagatctgccatcagaacatttggaccatccttagtttggttcaaattctggtctgccattattagatccaaaatttcataaaattgatccttgtcttgattgattttattgggctaggctcagacttctagccttgagttggtttgatcttcgtaacttttctttgttagatacgttaaaagatgcactttaaaatgataaatttattaggctttgctgctatttattttaaagattttgacaccacttatagtcctcatcattgtttgcttcttaagaaaatatgctaaaacttcaatatgaagttattgtgaaactttgaattatgcgtatttcacaaaaatcaagagatacaccataatatatatctagcctcatcctattgtaggaaaggataattccttgtaattcaaatcaattcaaatctacgaactaatttatagttgtataagaagagttctaaaaggagaaaagtcctaactaatttacagttgtaaaagaagagtactaaaaggagaaaaatactaaattataggacccaaactttcaacactccccttcaagatggtgaatagagattcttcatgcccaacttgcctatcattccttgaaatgtggtattaactagccctttagttagaacatctgcaagttggccacctgtgctaatatatggagtgaaataacaccactatcaagcttctcctttatgaaatgttgatccacctctacatgttttgtttggtcatattgtatcggatgatgagtgatattgattgtagattcattttcacaatagtagagtgtgcccactcgatcttaagatcatctaaaataatttttaagctataacaattcaaaaattccatgaatcattaccagaaatccacttcaatgtttgatcttgtgaccattggttgctttttacttcaccatttgactggatttcctccaagtacaatatcccgatgttgaccttctatccaaaactgaaccagcacaatccacacctgtgtaggcttccaagcacaattttgtaccttatttaaacaacaaccctttatcagaagttcctttaaggtagtgtcgcatcagataggcatcttgaagatgagagtctttgggattgcaaataaagtaactaacaatgctcaaaacatatgcaatgctcagtctagtatgtgctacataaatgaattttcccactagtcattggtacacgccacgatttacagtcccatcctctaatgcctcttctaatttatggtttggttctatgggggtgtccactggatttctttgcgaaaattaatcacatatttctgttgtgaagcaaagataccttccttagcatgagccactttgattaataggaaatgctttgatctaccaagctctttaatcttaaattctctagctaaatactactaatgaacctccttttctctaggatcattaccgattacaatgatatcattcacatacaccatcaaagttgttactccatttgaagctgaatgcttcatgaacaaagtgtgatcaccctgaatttgtttgtatttcattgctaacatcacttcagaaaatctaccacaaagataccctccttatcatgagccactttgattcctaggaaatacttgaatccatcaatctctttaatctcaaattatccatctaaacactattgaagagcctccttttctttaggatcactaccgattacaatgatatcatccccatacaccaataaagttgtcactaccttggaaaccaaatgcttgatgaacaaagtgtgatcaccttggcccttttttttttttgtatttcattgctaacaccactttagaaaatctcccaaatcatgctcttagagattgttttaagccatataagggttttttttttaaaaaaaattgcacaccttggttctacaaagagttttgccaaaactcaaaggaatttccatatagatctctttttgtaagttctcatgcaaaaatgtatttttttacattaaattgttgtaaactccaaccaaaataagccgccaacaacaataacaccctcatggtattcatcttagctttgggagcgaaggtttcttggtaatcaacccaaaggtttgtgtgtagcctttggctaccaacctagctttatatctttctaggggcccatcaactttgtacttgaccatatatactcatttacacctaactagtttcttcctcttaggtaacttcactatttcccatgttctatttttctcaaactctccatctgaactctcatgtcttgtctctaattctcattgttaagtgcctcggcaaggttttgtggagtggttatgatgtacaaatgaatgagaaaacttctgtgggacaaggagaagttatcaaatgacacaaataatgacaacaaatgttaagtgcattgtcttgtacctttcctaatggcaatgggtaaattaagatttaaattaagatcattgtcaacatttgaagtactaagagagatagagctattagttggcctcggttcaaactcttgagtatgcataggtttaatagcggttgtttttctctttaagcaaaattgcaaacgttttgtagcaatagctttcaaactagtgttagcaaaggaatctcattcattgtttttagaagatgggtctgattcaagcttagttggaatattatagacaaaattgtcaatgacaacaagggttggatcaggttttgaagggacagaattcatggagaacacaagaaggtcaagtaatggggataaaggatctttatcttccaaaggtaatgtctccccttgaaggtaagaacctgagaaataatttttttttttttttttttttctgcataggttacatccatagatacataacactttctagaaggagggtgataacatttgtagcccttttatgtaggcaaataccccatgaagatgcatcccaatgatgttgaatccaaggatgaaaatatcagtttttacaaatatattagtagttgaattttatggatatattaggaaatattggtggaatttttgacaaaaatcgatgggagaagaattgataaaaaaattacaaaaacttatagaaatattgagaaaaactttaagaaatgataaaataagtattctttgaaaaaataatatatattatatatattatagatttatattgaaattataatatattttagtttttttatattgaaggatataaaataaaatgataatatatgcataagtattttttttaatttaaaaatattggtaattttatttatagatttatatttttcttgtatttaatattatacaaaagatagtaaaataattcaaagtgacttttaatttatgttgaaataatgccaaagttaggattttaatttaggaaagtattttaggaataaaaaaggagagatcatttaggatatttccttatgattcagtttcctaattttaggagagaattaagctagattgattttttcttattcagtcatttgtgtatatatatgtgtatggtgtgtaccgaatataatcaataaaggtgttcagaaattcttcatggtatcagagccagttttctgaaaccctaatcccttctggccacctcttattcaggccatcattcattccggccaaatctctctggccatctctcaatccgaccatctctctctctggccatctctcattccggtcatcagtccctattctcagagtcaagggagaaaacgctttccggtcggtcgaatcgtcgtcagaaaacattcacctccggcaacttttccggcgaactttctggcgaactttccggcgacggtttttttctacaccgcaaggagcacctggaggagatctccaatttgtcccaaagcaccggaaccagaaactcatccacgcgccgtccacgcgcgtttttccggccggcgactgcatctcacgcgccggcgcgtgagggcgcgtgagccacttttcggcgacgcgcttcctcctccaagctcgcctgacgccgaccagccacccttcttacctgtttttgccatccgagccctgcacgtgcctcttttgggattcttttgcttccgtgggcccttcgatcagtttttccggcgtcctccggctattttttctcaactccaatccctgcacgtgccttgggaagtgttcttctacctttccggtccatgacaaaatatggaatggcatcatcacaagtatccagcgtcacgtcaccagaatcagggggcagatctgaaattccaaaccttggtggcaatgattcctctcctattctcatcacaggacacaaattaaatggccataactatttacagtggtcacaatctgtgttgctgttcatttgcggtaaaggaaaggatgagtacctcactggagaagcagccatgccagaaactacagaaccgggtttcaagaagtggaagattgaaaacagcatgatcatgtcatgacttatcaattccatgaacaatgacataggagaaaatttcttgctgtttgggactgcaaaggacatatgggatgcagccaaagaaacttactcaagttctgaaaatatttcagaactttttcaggttgaatcagccctacatgacttccgccaaggagagcagtcagttagttagtattataacacactcacaaggtattggcagcaacttgacttattcgagactcactcatggaaatgttcggatgatgcagcaacatacaggcaaattgtggaacaaaagagactgttcaagttcttcctaggactaaacagggaattggatgatgttagaggccgaatcatgggcattaaaccccttccaagtctcagggaggctttttcagaggttaggcgtgaagaaagtagaaagaaagtgatgatgggatccaaagagcaacctgccccaacattggatggctctgcccttgctgctcggtcatttaatagtagtggtggagatcgtcagaaacgagataggccttggtgtgattattgtaagaaaccaggccattataaggaggcttgctggaagcttcatggcaaaccggctgattggaaaccaaagccacggtctgacagagatggcaaagcacacgtggctgccaactctgagagcacatctgttcccgagccgagtccattcaacaaagagcagatggagatgctacagaaactattaagccaagttggcagtggcagtactaccgggatagccctcactgctagtcgaggaggaatgaagccgtggatagtggacacaggtgcttctgatcacatgacaggagatgctgccattcttcaaaattacaagccaagtaatggtcattcatccgtccatattgctgatggttcaaagtcaaaaattgccaggacaggttctataaaacttactaaagacttatatcttgactctgtcctccatgttccaaacttggattgtaatcttttgtccattagcaaattggctcgtgatctccaatgtgttactaaattctatccaaactcgtgtgtttttcaggacttgaaatcggggaagatgattggcagtgctgaactgtgttccgggctctacctcctcttatgtggccaattctcaaaccaagtctctcaagcaagttgcgtacagtctcagagtatgttagagtctttcaattctgtgtcaaattctaaggtcaataaagatagtgagattataatgttacactatcgccttggtcatcctagctttgtttaccttgcaaaattgtttcccaaattatttatcaataaaaatccagcatcttatcactgtgaaatttgtcagtttgcaaagcatactcgaacagtatatcctcaaatcccatacaaaccttcgactgttttctctctagttcatagtgatgtgtggggtccctcccggataaaaaatatttctggcactcgatggtttgtgacattcgttgatgatcatactcgggtaacatgggttttccttatgaaagaaaagtcaaaggtcgggcacatttttcaaaccttcaatcttatggttcaaaaccaattcaattccaaaattcaagtcctcaagtcagataatgcaaaggaatactttactagtagtctcagtacttatcttcaaaatcacggcattatccacataagttcttgcgttgacaccccacaacaaaatggggtggctgaacgcaagaatagacatctcttggacgttgcccggtgccttatgttttcctctaatgttccaaactatttctggggggaagctattctcacagctacctatttgattaaacgtatgccatccagagtgcttacctttcaatccccacgtcaacttttcttaaaacaatttcctcacacccgtgccgcctcttctgatttaccactcaaagtatttggttgcacggcattcgttcatgtgtatcctcaaaatcgtagcaaatttgctcctcgagcaaataagtgcattttcctagggtattctccaacccaaaaagggtacaaatgctattctccaaccaacaaaagattttacaccaccatggacgtctctttctttgaacatgtcttcttctatcccaaatttcatgttcagggggagagcatgaatgaacatcaagtttgggagtctcgtcttgagggtgtaccttcttttcactcagagtcaccaaatccttcccaattcgcgcccactgagttgtccacacccatgtcgtcatcagtccagccagcccagcacacaaatgttccttctcccgtgaccatccagtctcccatgcctattcaacctatagccccacaacttgctaatgagaacttacaagtttacatcaggaggaggaaaagacaggaattagagcacggatcacagtcaacatgtggccaatatattgactccaattcaagtcttcctgaagagaacataggtgaggatagggctggagaggtgttaattcccagcattgatgattctactctgccgattgcattgaggaagggtgttaggagatgtacagatcatccaattgggaattatgttacgtatgaagggctatcaccatcttacagagcatttgctacttctcttgatgatactcaggttcccaacacaatacaagaggcattaaaaatttcagaatggaagaaggcagtacaagatgagattgatgcacttgagaagaatgggacgtggactatcacagatttgccggttgggaagagatctgtggggtgcaagtggattttcaccataaaatacaaagcagatggatcagtcgaaagattcaaggctcgtttggtagctagagggtttacacaatcctatgggatagactatcaggagacttttgctcctgttgcaaaactgaacactatcaggattcttctctcattggctgtcaatcaagattggtgcttgcaacaactggacataaaaaatgcgtttctaaatggtgacctagaagaggaagtctacatggaaataccacctggtttcgaagaaagtatggtaaagaatcaggtttgcaaactccaaaaatccttgtacggccttaaacaatctccccgagcctggtttgatagattcacaaaagcagtcctgaagctgggttacaaacaaggtcaggctgatcatactctatttgtcaagaagtctcatgccgggaaaatggccatattgatagtctatgtcgatgatattattctatctgggaatgatatggaggaattacagaatttgaagaagtatttgtcagaagagtttgaagttaaagaccttggaaatttgaaatatttccttggtatggaagtggctagatcaaggaagggaattgtagtctctcaaagaaaatacatactcgatcttcttaaggagaccggtatgcttggatgcaaaccaattgatactcctatggatagtcaaaagaaacttggtatcgagaaagaaagtacaccggtagacagggggagatatcagcggcttgtcgggcgcttgatttatctctcacatactcggccagatattggctttgcagtgagtgctgtaagtcaattcatgcacagccccactgaggaacacatggaagcagtctacaggattcttagatatttaaagatgacaccagggaaaggtctattcttcagaaagacagagaaccgtgacactaaagtatactcagatgcggattgggcaggaaacatcattgacaggcggtccacttctggatattgttcttttgtctggggaaatcttgttacctggaggagtaagaagcaatcagttgtaaccagaagtagtgcagaagctgagtacagagctcttgcacagggaatctgtgaagggatttggataaaaagggttcttagtgaactgggacaaacgagttcatctccaattctgatgatgtgtgataatcaggcagctataagcatagcaaagaaccccgtgcatcatgacaggaccaagcatgttgagattgacagacacttcatcacagagaaggtgactagtgagacggttaaattgaactatgttcctaccaagcaccaaaccgcagacatcctcaccaaagctttacctaggcctaacttcgaagacttaacttgcaagctgggattatatgatatatattctccagcttgagggggagtgttgaaataatgccaaagttaggattttaatttaggaaagtattttaggaataaaaaaggagagatcatttaggatatttccttatgattcagtttcctaattttaggagagaattaagctagattgattttttcttattcagtcatttgtgtatatatatgtgtatggtgtgtaccggatataatcaataaaggtgttcagaaattcttcaatttataacatatattaaatatatttatatgtgcaaatgttacaaagttcatgatctggtctagtggtcaccactaccttattccgcacaccacgttatgggttcaatcttgggggttggaattttaaccattttttcttcttcaagaagaaacaatcccacattggaaatgggaaaccaaacagatgcggatttattatggattgccttaattaaagtgcacaattgagatgtgggttgggcttgacagaggtggactgattgcttctctctccataagaccattattggaattttttaaagtgaaatttgtggtgatgtggtgaaatatagtcaagaaattggtgaaatattggtaaatatcataatatcattgataaattgccaaaacagtgacaaaaaactggaaacatcgattcatcaagatatccttgttggttattatgtcgaaagggtctgacacgcgatatttcaacgataaattgtctatatatcagaacatttttaaccttggtgggatctagcttctcatgattatgcgtatgaatgtgaacaaatgacacacccaaaaacctttagactcaatttataggaggtaaggcaataaagaaataattttgcaaacgcttccatggaacttttgaatcataagactctagatgagactttgtttatcaaatgggtagtgaaacatcttctccctaataagattttggtaccttcttttggaacaataatgcccgagtaacacctagaagatgaccatttttccttttagcaaaccaattttgttggggtctattagcacaagagaacttatgaattatctcctctttttggaagtatggagataagacttgattgaagtagtcctttgcattatcttatacaaatcccaaattgatttttaaccatggaatgaaacctgggaaatatattgctcactttagatttttgttttaataagaaatccatgttaccttggtatagtcatcaatgaatgacataaaccatttagcattagaaacattcggaactcgaggcagaccccaaagtaaatggaaagggagtttttatattactcaaagaaaaagaaacatgttgatgcttgatgaattcaaaagtgtcacaatggaaatcgtttacattccctgattcaaataacaaaagaaatatagttttaataactccaaatgaaagatgtccaagactaaccggtgaagccaaatttgctctttattaggtgtagttttggtcaagaaggatagagatgactagttttttttactaacacatccattggttttttcaaggtagtaaagctcatcatttgccttagcacacccatttattgtccctgtagcttggtcctgcagcacaataattttggaaaaaggttaaataacaatttagatttttgatttatttattgattgacacaaggttaaccaaaagtttaggtatatgtaacatatcttgtaaaacaatcctctgcaaaagcgaccatgcagcctcgtccaggcgatgagagggtcggcgtcgaagttatatatggagaggttggtcgggccgatgagttacaggcccagactatgtccaaccttagcccaccttcagagatagaagactttagctacgggcgtcggaccatgggctgtaagttaaaagacccgtcggggttgggccaaattctaggaggaccgaagtcctctggcatgaaaggtaggtctcgagaggaaaaaagcacaacgagaaaggggaaagctccagtggtttcagatgggagacttcacgcaggaggaaaagacgatagattcaaggatgatgtggtccaacctcttccttccaagcatggatcgctgtcatgcacaacggagtagcagcgagcctcttcccctacggagcgcatcgccatttagcaaagtcagcaatcaggaagtggattgcagaacgggatctcaaaagatacgaggtatcagagagagtcctatcttccgctgtcttctgtcaaggaaatgtaagagctggtcgaaggaagagacctcgacgtcaagaggagagatggactcgcgaaaatcccatctcgaagtagacaaaggaggatttacgggccgagcggggtacgatcctcgtggttcttcagtcacggattcaccttctattccaagaatcagaggtaaaggaatcatcttggaaggaaattgtgaaattccgggaacggaaaacagggaggaaagtcagcctttttcttctcagccacccgagccttattcctttcctttttataatctggaaaagcatttgccgagtccctctggtcctcatctcccaaattcagcttttctttcccaatctcctacggtaaatcaaggtaaatttaaaatttttcctgaaaaaggtggtgttggctccttaaattttgttggcatccctgtccttgttgaggaggagaatcagagagctttttctaaccagttgtccgagagctctacccctaggaagtcttctaacctgatgttaggtagtccgggggataatgcggcatccccaccgggagactttcttattgatggcctgtcccctaggaaaatggctaaagtgcgagaggttctatgctctctggacattaaggtgtactctaggaggaagaatagaggccccataggcgattgagaccaggtggatttggttttgagggttagggtctgagtgtttttccatgaaaattatcagttggaatgccaggggtttggggttcaagtaataagcgaagggtgattaaagatttccttaggtcagagaatccggatgttgtgatgatttaggaaacaaaaaaggagaagtgtgacagaaggtttgtgagtagtgtctggacggtcagaaataaggattgggttgttctcccggcgtttggggctttaggtgagattttgttcatttgggactcaaaaaagttgtgcaaggaggaggtggtattcagctctttctcgatctcggtcaagttcgccttggatggctatggacctctttggatttctgcagtttatggtccaaatagtccctcatttaggaaggatttttgggtggaactttatgacatttatggtctaacttttccgttatggtgtgtgggcggagattttaatgtcataaggagaagttcagaaaaattggggggctctaggctaacttcaagcatgagggactttgatagttttattagagaatgtgaattgcttaatccacctcttcggaatgcatcattcacttggtcaaatttgcaagagtctcccgtgtgtaagagattagatcgttttctttactcaaataagtgggggcagctctttccctaaggccttcaagaagcccttattagaaggacctcggatcattggccaattgctttggataccaacccgttcatgtggggcccaacaccttttagatttgagaacatgtggctacaacatcctagtttcaaggagaactttagaaattggtggaggggttttcaaggaaacagatgggaaggccacaagttcatgaggagattacaatctgttaaagccaaattgaaggaatggaataagctttcttttggagagcttaatgaaaagaaaaaaagtatcctcaatgatttagctaactttgacgccattgagcaggaagggggtctcacctctgaattgttagatcaaagagccttaagaaaaggtgagctagaggaattaattttgagggaggaaatccattggagacaaaaagctagggtgaaatgggttaaggaaggggattgcaactctaagttttttcataaagtggctaatggaaggtgaaataggaaatatatcaaggcgttggaaaatgaaaggggcttagtgttgaataatgtcgagagaatcacagaggagatcttactttactttgaaaaactctacgcaagtcctataggagagtcttggagtattgaaggattagattggtcccctatttcggaagagagtgcgataaggttggatgcccctttcactgaagaagagatttctaaggccatttttcagatggatagggacaaggctccagggcttgatggctttactattgcagtattccaagactgttgggatgtgattaaggaggatctagtgagagtgttcgcagaatttcataggagcggagttatcaatcaaagcactaatgcctctttcattgttcttctgcccaaaaagagtacgacaaagaaaatctcagattttagacccattagtttgatcactagtctctacaagataatagccaaagtgctctcaaggcgtctaagaggggttctacatgaaaccatccactctactcaaggctcttttgttcaagggagacaaataatggatgcggttctcatagcaaatgagatagtggatgagagaagacgatcaggagaggaaggtgtcgtcttcaaaattgactttgaaaaggcttacgatcacgtaaggtgggattttttagatcaagtgttggagaagaaggggttcagtcctaaatggaggaaatggatgagtggatgtttatcctcggtaccttatgcagtattggtgaatggtagcgctaaaggttgggttaaggcatcgagagggttaagacaaggtgaccctttatccctctttttgttttagtagcagatgtactgagtaggatgcttttgagagcagaggagagaaatatgttggagggtttcagggtgggtaacagaactaaggtatctcatttgtaatttgccgatgataccattttcttttctagcactagggaggaagatttgtagactctcaagagtcttttgttagcatttgggcatatttttgggcttaaggtcaatcttgacaagagtaatatttatggtatcaatttggatcaagctcatctttcaagattggctgagacgcttgaatgcaaggcttctggttggcctatactctatctgggccttcctttaggtgggaaccctagggcaggtggattttgggatccagtgattgagagaatttcaagaagattagatggatggcaaaaggcatacttatccttcggagggaggataactctcatccaatcttgccttacccatatgccctgttactttctttctttatttaagttacccgcttcagtcgctgcaaaaattgagaggttgcaaagggattttttatggtcagggattggggaaggcaaaagagatcatttagtcaggtgggatgttgtgtgtaaatcgaaggaaatagggagtttgggttttgggaatagttctctgaggaatctcgctcttttagggaaatggttgtggaggtatcctagagagggttcagctatatggcatcaggtcatactaagcatttatggttcacactccaatggttgggatgctaacacttcagtcagatggtcacattgctgtccttggaaggctattacacaagtctttcaggagttttcctcgtttactcggtttgtggtaggaaatagggaaagaattcggttctgggaagatttgtggtggggggaccaacctttgggaacccaatatccaagactatttagagtagtcttggataaaaacatacctatttcttcagttctcggtcctactcgtcctttctcttggaatttaaatttctgtcgtaacctgacagattctgagatagaggacttagaaggccttatgcggtctctcgatgaattgcatttatctccttcagttccagataacagattttggcccttatcttcttcagggcttttttcagttaaatccttctttctagctttatctcaattttctggatctcctcaggttttcccttctaagttcgtttggaattctcaagttcttttcaaagtgaagtccttcgtctggttggtggcacacaagaaggtgaatactaatgacatgctacaagtgagaagaccctacaaaacccttagtcctgatatttgtattctatgcatgaagcatggggaatcagcagatcatatttttcttcattgctccttgacgattgggttgtggcacaggttatttcagtcagctaagatggattgggtccccctgaggagcatccttgacatgatgtccatcaaatttaatggatttagttcttctaagagggggatagccttgtggcaagctgcaagcatcgctcttattcggattgtgtggtgggaaagaaatgcgaggattttttaggataaagctaggaattcagagtatttttgggactctattgttttccttgcttctctttgggctttttgttccaaggtttttaaggggactccccttaatgtgatacaacttgattggatagcggtgtgtactccataaggagtggtctttttagagtgttcgcttgtttttcagtgtaatttactgtagtttagctttctttggcggaaggattcctcatccttctttttgtacttatttttatctttcaataaatctatgtgtcgtttccaatctaaaaataaaaaataaaaaatagactgggtgaaattaatttttcattgaccaacaattgtggtgaaggaaccatcagcaatagaaatatttttgttaatggggcaaggactatatgaagtgaaacagtgagaagagcggcttatgtggtttgtggctcccgagtcaatgacttaagagtcaataaaggacaaatccaaggcccttaaagaacgagaaacagaagaattacctatttgtgccaaataacacatacctgactgtttatcaagggtactcaaaaaatttcataacctttctatctcttccttgtttaattctccaaattctttgttgttggaaccgtgcttttcttaagggctgcctccttcacaatttcccatatttacttgattgtgttgctgccatgctttattttcctcattccaattcaggttttgaagttttccatgaagtttccaacacttgtctttggtgtgtcaaggcttcatgcaattagtacactaaagttcttcatggtgagattttttgacccttcaaaccgctgagtttctctgacaggatttgggctgaatttttttggctttgcaacaacgatggcaaaaccatcaatagaagacaatttgaacatcacacctctccgaccttcttcagcatgaatcatggagatgacttcattaagcttctcttttcctagaacctggactcgcacttgatcgaactccacattgagcccaataagaaattcaaaaattcattctctttctacgaatttttcatcttcattgcatttcatttgaaagttatggtagtagtcaatttcctatcacaaattcttcataatattggcttatttagttacaactttaccttgctttcgaaaatttgagcaaaatctcataccttcgaatatgtttgttgtatggattcccaaatttccctagctgtggtaaaaaacatacatgctccactaatttcaatggtcattgaattccgtatccaagacatgatcttggaatcctcttcattccaactctgaaatttcgggtctttggactttggtcctgtaccaagtaaatggctcagttttcctctgccctttaggaaggttcataccaactgagaccattgaagataactcttctcagtaaggcgataagcagcttggaggttctgcaattccccgatagtttggttcaatggtgcttcaaatgtcaactcaatagaactagtggcaggagtatggtttgacatttcaaacataatagtagtgatggacgcagtcaaaatgaaatagaaagacctaggcaatgaaggccaaggaatcaaatagggcaatgatggctgaggaatcaaaagacaaaaaaaaaaaaaaaaaaaaaaaaaaaaaatcaattatggataggtggcactcaatttttaccaagcacaccaaaaacctagagttggctttggtaccatgtgaaattataaattattcttatttcacgaaaatcgagagatacatcattatatatatctagcctcatctattctaggaaaggataatttctcatatacatgataattcaaatcaattcaaatctcctaactaatttacagttgtacaagaagagtcctaaaaggagaaagtcctaaataatttacagttgtaatagaagagtcttacaaggaaaagaaatccaaaattataggaccctaactttcaatagttatagttagtttatgattagctccttccaaagattactctgcatctttcacttcttatcagtctcatctgagttagactgcctcctggttgtagaatttgcccatggtgagcattttaccttgtttgcttcccttactccatgcagtagcttgaaaatatgagaactataatattttttttcctctaaaccatcggacttcaaatagactcatcaatcaaatggaaatagaatgtaaatgtcaaaatattgtgtgaatggtcgaatcccttggccttgagttttgtatattatatatagactttacaaggatgctatacatggaaagcaaataaaagcaaataaattcccgcatgattctagccttatatatgtaaactataatctgtcaaataatgtatgctaactgtatagaataataaatggagaaataaggaaacaattgtgggctaaaataaggaaagaagtgtggacagcaaagttgtcctttgatagcccccttcaaattgatgcaggttgatcaacaagcttcaatttgctacttagcaagcaatgtcgatgacgagggaaagccttggtgaagatatcaacaatttgtaagttagtggaaatatgtggaagagtgataacacgagcttcaaaggctgcacggatagagtgacagtccacttcaatatgctttgtgcgctcatgatagacaggattaaccatgatctgaatagcacttgtattatcggcatgtaaaggtgtaggatcggtttcagaaaaatctaactccgcaagcaaacctcgaagccaaatgattttagaataagcaagagacattgcctggtactcagattccgtagatgacttcgagactctgtcttgcttcttatttttcacaaacatcttaaactaaaactcccaactaagatagtttttgccattgaaacgaataatagaatattctctagacattacgaagacaaaaatagactaggaaacaaaaaaaaacatcgtcaaagagcctaaatctaataacaaacctccaaataatcgaagatccccaagagcctagaagcaaagaaacccaaagaaaactccaagatcacaccacagatgtgttgtcacaaccaccagaaataaataaataaaagaacccaaaagttgggctagagtccgagagcccttagggctaaatccgagagcccctagggttaaatctgagaaaacccaaagaaaaaaactagaaagcgtgtaaactctaggttcagaacacaaactctgataccatgtcaaaatattgtgtgaatggtcgaatcccttggccttgagttttgtatattatatatagactttacaagaatacatggaaagcaaataaaagcaaataaattcccgcatgattctagccctttatatgtaaactataatttgtcaaataatgtatgctaactgtacagaataataaatggagaaataaggaaataattgtgggctaaaataaggaaagaagtgtggacagcaaagctgtcctttaacaaaaaatattctcaaaaattcatcaaatcaaagacagacttgatcaaattctgttcaaatattaccaaattaaatttaataaaagagttgaacttttgagtttaaggggctaggtatagaatagatgttaaatgctttcccgtcttgccaagaatagtattattgctagcactttgaattcccttactcaagattttagtaagtcaatccagaatctgaattctcttcaatcaattgttgatgacttcaataagttagttctctcatgaactgagttatgcacttctttgatgagaactttattataacagtacagccttatggactctcagtcaagaagcccattttgcttaagaaaattctgaaccactattgctctaagctttgcctatgcactaaagcaagcaagaattgactatttcttacccctacaagctagagcatgtgacaattgactcacagaagcacctctagatgcacaaattttagtcaagttgtaaggttatagcattatctcctctgaagagccaaacagaaccaaacagattcttgaaaattaaaacagcctactcaattgttttttaatctccagagcaggtggaattaattatgttccaattttaatcaagttttcaaagaattgtgaaagggaaaaaaaaaaaagaaatggaatcagcattctgtaggttcagtcaatgaatcctagctttctacatcaataaagactccttggcattgcagagaaaatcaaaggaattaacaaggtccccctcctatagagtgagagaaaggatagaagggtcaagaaataattgccactaaatgtccagaaggttttcccatgccccagagaccataaaaggaagcattccgaatttctctaaatcaaaaattttgaggatgcttaaggattctcaaattgcggcagagtctgaacaaatggtatccatccacctctctaatccaaaccgagttcacaaagggaatgaaagcactatgttctgcccagaactcgaagattttaaaagatcccctggcaggagggcaccgaaaagagactaccatagatgaattgtcaaacatgctcaaaggagagaaagcaacttcagagctaggaaactcccagagccaactgtgcttacccaccctagagttcaattcttcaccactataaatatgtggaaagttctttaacataatgtagataccttagtttaattctgaaaaaattcttaaagaaataaattgtgattgaatccaattgcaatttcccattgctcaataaatcataagagctgctcattgatcaccatggactttgtcaaaattgttagaaactacaatttaattgatcttagtgcgcttcttagatcagtggttgactgagaaacttaatgtgtcttcaagtcgattgaagaaaataattttttgaaccaattacaatttctcaagttctgccgaaataaagttgtgcagcctatatgttcttcatttgatgctaaaattagtgaaatttgttttgttgggaagtaagaggaagtttatattcccacaaaaattaatctcactcaaaaagttcatggaatattgggagatatggatacaaaactgtaagagatataaaaaaaaggaaactttgatcgaatatttctcttagggttgttaaggaattctaagatgacttttagactaaattaccatctaaaatttaagtttaaaatgtttaatatgcctctttactatgccaaaattctttaataatttgcatacttgtcctatacttgtgaaaattaaactaggaatcaattgacaaccaagtttcactaccctagctaatatagcaaactctcattttgggattttctaatactatatttgctaatgtcaaatgaactcatttctaactatttgttattttttctttcacatttgtccaatataatagtgtctactttatacttgtagcatttacatcttagtttcccagcatttactcctcttactacatgcttcctgccatcgagataaagtattccatctattttggaaactattagataaccaactcacctaaaagcttgagctattaggattttggcccgtaatgtatatcatactcttcaacacccttcctcacatgcaccctcatacttggtcatggagagacacacaaacctatcaacaaacagattattgtggaaatccggaaggtactgctgtaccgccagctgtaccactagctgtactgccagctgtaccgccagttgtaccatacaattgtactacatacaattgtttcctattttaattttatttcctgattttatgagagactttctctgaaaatcaaggattaaatttcttttttcctaaggcaaatgaccttagtcattcatgcataaatatcaatgcaagaatcaatttgtaagtaaagtgaaaaataagagaatattttttttttccctcaaatttcttcatggtattagagttaattctgaaccattcaatccgtccatgaccaaatacagaatggccaccaagaaggactcctcaacctcagaagtcacctccactcaagaagctcctattctgagcaacaatggaggatcggatagtgctgctcttcttgttactagagacaaactaaatgggcaaaaccatcttcaatggtctcatgcagtcatgatgttcatatgcggtagaggaaaggatgactacctcatcgatgtagtggcttgacctacgaaagaagacccgaaattcaaaggatggaaggctgagaataagatggtcatatcttggttaattaactcgatgaacaatggcatagaggaaaatattgtactttatgaaacggtgcaagaaatctgggaagttgtaagggagacttatttagatttagaagacacaatggaggcatttgaaatagatgggatcctccatgatttacaccaaggtgattcgtttgtcactcaatatttcagtcttctaactcgttattggtagcaactagacatgaattgtgttcaatttgacagttggagcaaaggtttcttggtagtcaattccgtaggattgcgtaaatccctttgcaactagtccaactttgtagctatcaacattcccattttcttggtacttgactgtgaagatctatttactcctaaccagattctttccttttggaagttcagtaagctcccatgtcccattcttttcaagagttcgaatatcttcctcaatggttgttttccatttaggtatttgaagggattcttggatatcgttgggaatccgaatatctgtaagattggtaacaaatgcccgataacctggtgacaaactcttataggagataaagctataaattggttgatttctacaagatcttactcttttcctgatgacaattgacaaatcgagttcatcatcttccaactcattaggattagaattagcattacttgggtgtgtttcttttgggaccaaattcggttcagtttaatgtactagcttaggatgtgttcattgctctatatcttcttgagacttctttttcattgagtaaataatgaactcactgttattgacagtttaagattggtttaggtaaagaagagtactcgactcagtgtttacaaatttagtagtttggagcaggagacttggagtaggagagataggattcaggttgtgaactataacagacttatgtgtttgagattcaatcatggtttctatttctcaaaacaggtgttcttgagttctattctccccatgaatatcagttttggagtaataggactgattttcaaagaatgttatatccatggagctgtagaacctttttgtgacgggagagtaacacttatagcccttccagtttggagagtatcctatgaaaatacacttaatagccttgggatcaagctcacttcgatgttgttggggaatgtgaacaaaagttgagcaaacaaacacttctgatgggatggaagagatgagccgagtcctaagatatgatttgagaaagattttgcatggtgtttagaaactcaagatacaggaagacattctattgatgagataagttgcagtaagtacaacttctccccacaaattctttaggacataggaggagaacataactgcccttgcaacttctaacaagtgtttaatctttctcttagatatcccattttgttgaggagtatcaatgtaagaactttgatgaactataccttctcttaataagaattcccctatgatagaattgaaataatctctagcattattagttttcaacacttgtattttggcatggaactgggtttggatcatattataaatttttttgaaacttaagcccacttttgatttgtctttcattaagaatatccaataaattctagtatgatcatctacaaaggacacaaaccatctagtccctgttatgttttttatcttagatgtcccccaagcatcactatgtatcatgaaaaaatgatgagatgatttgaatggttgaattggataggacacaagacatgcttggataattaacaaatttcacactaaaaaacatcccaacttttaatgaataatgatggaaagagttttttgagatacaagaaactaagatgtcctagacaatagtgccatgatataatatgactatctttattaaaactaaaaatagagagataccgtttttcgccaactatctattcaggttgtttttcaatacaattagtcactttgaaaatataatgtcctgatcacacctcaacattgccaattgtcttcctcgaattcaaatcttgaaaaacacaatggtttgggaaaaatttagtaacacgattctcttcttgagtgagtttactaatggacaacaaattgcaatccaagttcaaaaccaaaagaacagagtcaagagttaggtccttatagatgacaacataacttgtaccaaccacctttgagagagaaccattagatatacaaatcgtataattcctagaacaaggtgtataattttaaaaaaatgtggcatctccaatcatgtgattagaagctcttgagtaaacaatccaaggactcagaatttttattttttttgggcaataagaaaattacctttttgagctaaggatccaaacccaattagagagttggaggaatttggcccctattgggattggttgaacaatttttgcaatagttccaattgctcctttctgaatggattggaattaggtggtgttgggttgtcttcaatgctgacatggtgtcgtcaaccttctctatcattttgaggacatgacaactttcaatttgctggttttccatggattttccaatacttgtacttggtgtgacttggttttcagtagtgatcacaccaaggtctcccttttcttggttggttgtcattggaaggataaggagtatctcgagccgctatggctgaaccctcagtgataggttggttatgaccctcacatgactttctttctactttcttcttggtacacttctgaggcaacttctcaaatgttgggtaaaggtttagttcctaatattctaccttgaacttcatccaaattttttctcaaccttaataaaaatttgtaggtccgtttattctcaacaatctttttgtatttgattgcatccattgggtagtcccatttggtggtttcaaacatgtcaagtttctgccaatagcgagttagaagactgaaatattgagtgacagacaaatcaccttggtgtaaatcatggaggatcccttctatttcaaaatatctttgttgtgtcttttatatctgaacaagtctcccttgttgcttccaaaatttcttgcaccgtttgatatagtataaaattttcccctacgtcattgttcaacgagttaattaaccaagacataaccatattattctcaatcttccatcctttgagtttcgaaccttcttttgtaggtcaaggcattgcaccggtgaggtagccatccttccctctaccgcatatgaacatcatgactatgtgagaccattgaagatagttttgcccattcaatttaatgagaagagcaacactatccgatcctccattgttgctcggaataggagcttcttgagtggaggtggcatctgagattgacgagtccatggtggccattccatatttggtcatggatggattaaatggttcaaaatcaaccctaataccattaagaaatttgagggagaaaaaaaatagttatttatttttctcttattttcaaactgattattgtatcgatatttatacttgaatggctgaggtcatccgccttagaaacgaaatctaatccttgattttaggagagaaagtctctaaaaaaattagggaataaagttagaataggaaatacaactttatcacaactatgatagcactagcatagctataaaaaaactgtgacacaaccgtagttgtaccatagttgtgcacacaactatactttcctgatttccacattattttttgttgcaaatctagaatgacctctactttagttagatgtaaaaaatgcatttctacttagtgaattagaggaagaagtgtatatggaccccccacctaggttttaagagatgtatgggaacatccctctatggccttaagcaattacccagagcctggtttgaaaaatccacactatctcttctcaaatatgggtactgtcaaattcaagatgaccacactacgttttttaaacattcttaagaatggaaagatatctattcttatagtgtatctagatgatatcatcttgataggcaacaatatgcatgagatgaaaattttgaagcaacttatgactaaaaagtttgaaattaaggatcttggggtattaaggtattttttgggaattgaggttgcaaggtcatgaagagggatatttttatcacaaaggaagtatgtgttagaccttctaaaagaggttggcatgacgggatgcaaacccaatgatacttgaattgagccaaaccataggctaggagcttgtgttgagagtaacaaaccaattgacaacggctgatctcaaagattagttaggaaactaatttatttatctcataccaagcctaacatagcttttgtggttagtgtagttagccaatatatgcactcaccgagtaaggctcatatggaagtagtttttaagattctgagaaacttaaaggtcacacttgggaaggatcttttgttttccaagactgatcacttacaagtagaggcttacacaaatgcaaactaagctagatccattgatgataggagatctactttagggtattgcactctaattggatgtaatctagtgatttggagggaaaaaaaaaaaaacaagtcgttatagctaggtcaagtgttgaagctgaatttagagcaatgacacaaggaatttgtgagttactatggttgagacttattctaacaaaattgaggatggaaaaaaattcctatgaggctatatcatgacaatagggtagctattaatattgttcataagcatcataacccggttcaacatgataggaccaaacatgttgaaactgatagacacttcatcaaggaaaagttagaaagtggtttaatttgtattctatttgtgacaacaccaaagcaattagtagatgttctcacaaaaagcttgtcaaaataagtgtttcactctttagtaagcaagttgggtatgatatacatctttgaacgagcttgagggggagtatggaaagtcaacctttagatttttttaatttcttacttgatctacttccttgattctaggctgattgattgactatatccagataggttccttgttggtcttttctttttgttattgttttgtacaaatttttcttcttaatttctgattgtaatttaggaatattataaatgtaaatgttccttccttatgttgttcccattgtatataagtgacctattgtacaattttgagaagatataaaattatattcagaatttgctcatattgattagcattaacccaggtaagtggttatattatgtaggcaagtacgtcaggcagaacgctataattgggctg

SEQ ID NO: 10850 - DNA, 6806 bp, Vitis vinifera
  Intron number 6 from transcript GSVIVT01005757001 (locus G SVIVG01005757001) derived from phytozome v7.0 (chr-ID chrU n; pos 21872491 to 21879296 reverse strand)
gcaggtaagacttcatatagttcctagttttatgattcatgcaagttttcttgtcccaaacttgtatttgccttactgagaactgtttatgcatatcctcaattagaaatgaatcaaactatgggaaatattaggcataaccaacagagatgagatcagagaccaggtggtttgtttatgtgtctaaactggttctattagcaatgatacttgaaatggatgcactgtgggaaagcatggataataacaattaaggaaaagatgagaaaaagttggaatagatgctttagttgtgtgttatgtctaatgacgttctattagaagtgtagttcaagttgaaggcattacactgatgatcaggaggcaaaaagagaataggcagaggtttagtgaaaacatgatgtcttatgacattagagaagatattgaatttgataaggtggagtggaaacctgtaagatattgagtttgataaggtggaatggagaaacaggttccttataaaaattagtggaccctaataatttagaatcagggacaaggctgtaaggatgatcaagataaaaataccattttatcaatttatatatacttatatagtaatattgtttttgctttattaattactatatgtcttgagatggttttaagatgactattttactagttgatgaaactagagattattttatcttattttgtctctattatttgtggattactctttgataagagaatattttaattttcttttctgaattagcagaaatactgtaattgatttataataatggacaaagtgttagagactctttaggatagtttattattttgaatattgtgtaaatattttatatcatctgtttaggaatcagtttattattcttgtaaagtagccaccataattataggaagtgatattagagagtcaattgtgtcaagatctagacatttcttcgtatcaatgaaaaattaagagagagaaacctttttcaaaccttgcattcaacaacccaatttctacacaaagatcaattatttcttttaacatggtagcagcgcaggcctcaaacctaaggctgctccaagcctccaaccaccatgccaaagccactgttcctaatctctctatacacagagccttaaaccttcatcacctagccatcagtttctaaattctctgtcctttatcggtggtatctttcttttatgactatgacatctatggtctcttctggagctggcatttctattatagtagttaaacttaatataaccaattatattttatggtcaaaagctgttgagatctatgtgatagtacagggcaaggagaaatatttcagtaagttattattgtctaaagatttaaaggagtttactttttggtgaaaagaaaacacgatggtgatgacttgcctctggaatattatggagtctcatataacatctactgctatattcatcaacagaacaaggcaaatatgggatgcactaagacaagcaaggtcaggctcagaatatttccaaaatttatgatatattctgcacgctttgcttgtcaatagggtgataaatctgagtgaacactatgggatcctagaaggattgtgtaaagaactcaatgttttcctagctgtctttcattctcttatcaataatcttgagatattttgtaaatgtagagaagagttcagagcagcaaaatttttgtccaatctaattctagtatatgaaagttccaaaatagcatccttacagaagcagagttgtcatcatttaatgatgcatatgctcgtcttaaagaacagggttatcctcctttgttttcttagcctgtgagacaatctctcaaaaaggctctacactcttcttttacggtggtcttggaagaggaaacttctgacatggtcaaggatttggtggaggccgatttctttgcaattactatgggtgtagtaatcacccacttgagaagtattaggtgaaattttgtgagccagattggactaatcagacttattataatattgggaacggtccatctatattagtgactcctgcatatgagagtactggaactgtctttgtgctctcctatggagattcaaatcaatctcttactcaaggtaaccagctagtcaatccatcccccattgcttctcttggtactaggaccatattatttttctccttgtgattctatgacatccttaattgatcttggagccttctcatatatgactggatctttgttggaggaagatgattggtggagagtgtgagaagaatgtagcacatgtttagtttggtatcatatccacaatatgtaatatctttagcagtatccctaactcggtggcactatagatttggacatcctcctctctattatttatgatagaatgacatttattttttgtaatatgtaattcttcttttctctttcagctttctgatcatatttccttttaaattaggagaatattctatttttctctttattaaaaaaattattgtccttttcctgaactaagagaattattcagcaacaatgtacatgatttagcataataaatgaaaattagttctttctttcagtggtaacacctcttcatgacaacaggagcaccaaaatactgtcatagtgttgttacatgaccacctattttactattaccaattcttgcataatatcaaggtgccggaatactccatgatttttttctcagtggtctttacccatttatgagcaatttcagagtttctcaataacatcatttttggttccaaaattttgttgacattgtggttgtatggaaaagagggggtataaattctttttaatggtttgaatcatggtaaatcaagaatcagaagttcccatcctttcttcaaaatgtctcaactatgcaagaattattcattttcttctgtttcaattgaatgacttatggtaaccatacaaagcccctatcaatcatatagaccatgctatccttgcttcacttttatctactgagtttttagtagctaatcttggtcgaatgtgtgtctatatatacatcccttaatcttacttcgaagtttgggaaacacttaaaacaagttggtccatcatttaatcctgtctggattgctctataataaaatctctataatcaagatgtttattatctcttaagcacattgcgatggaagtgtttagagctattttgaccaaagacttagcaacttcttagatcattcctagatgtataaaattataatctttcttatgtctttctataaatctgctattcaaaagttttatactttgattttgttctaaacttatggtttgttcaattgtcttaattatctaatcagagaaaaacttggacgatccttatatttttcttggttagaaatcttaggtagtttccaatcatctaaatccttttggaggtgagaaaagtttaccttttcatcattaacaatggtatcttggggatctatggatctcctagacatagatttgaatattgaactcatttcaaaacttaatctaaagcctattcatggatttacaagcctaattgagtaatcaccagaaatcctaccctcaaacaccttttccttcgtctaaaacaagctcctttggatcgcctttaggcaaaccattactcttaggatagatgaaatcctaaagcaaacttaataaccatttccatggatctgataccctcaagcacccaagacaatgtggtacatagtgaatgtggctaaaagatctttaaagaactttaaagaaaatgaaaacaagattcaaaacttgaatagaaaaacatcttaatatatcataaaataacaaacttacatggagaaataacttacactcacacacatagaacttttctagaccaaaaactcctttgattacatttaagggagatggagaaagaaatggggatagggaaaaagaaagaaggggggaagaattgttgatgggcttttctaacccttacaagagtcttaaatacaaatcttaaagatcacatgtgagtgaatagtgaagattcttttgagatgaatggtatgcatgtgaatgaatagtgaaaattcttttgacatgaatagtacacatgtgagtgaacaattaagattcttttgacatgaatagtgcatcctcgaaatgaataatgtcttatttatccaaatgattgagtcacatcttactttcgactaaaagggtgaggcgaatcttcttccttttttgattttgtagtttgtaagatattccttcaaagtcttagtgactacaagttggacttgggtttgcggcttcttaataaggaattgagacatggcttccaatcttggaacctgagggtgagactgaaaatacttctagactattggtattgaagcatcattttttagatcatcccaccatttggtctgaaaagttcttcttaggaaagggagcactactaaagcttcttcaatgatagcataatcccattggattatctaggctaaatcaaattcattggaaaaaaaaaaatctaaggaaacactgagagttccttgggaggaacaaaattttcttgaaaggctttaaaatctcgaaggatgggtttcggaagaatcttagtggttggaccaaaatagcaccaccaactgttgaaccaatatggcaggtttagcttaaatttggattgaaaatagaccatccatgaatgacaaaggttcttgttttgaatgaagaaagcattatatcaggctctttggtaatctcagtaattataaaatctaggcttatatggttgagaaaattctcttagggtgttagaatttggtccccactgagagattgtaaggatcttaaggacatgacaagtggagtatccaaacttcgaattatcaaatttatatgggtgatgattattctcgacaaagtcaatatcaattaagataagttcataaaattgctaagttttaaagagatcattggagcgataatgaaaatttttacaaaaggttttcttagcaatctctcttggatctttgtttaaaaattctctctcaataaccataataggctgcttaaaatccttatgccaaaaatgagatttttggaaaattggggtggggttgggaaccactgcaacttgattcttaaaacttgataaactctaagctacttccttttgagacttcaggaagttgcttttctttttcttctttttgctcaacttgaagactctaagggagttttttggtgcttaaaccagaaaaggtttccttaggttgctctaaagagatcagaactttcttagaagattggggagttaatttagatgacttggttgcttttttagggtttagtctcatgaatccttcaaaagttcataggttaggaaattaggctctgagttgttttctcctttaatatattcaatttgaaaataaaaagatacttaaaatcgttaaaataaaaagatatttaaaatcgtttgtcatatagcaaaaatatgtttaaaagttatatttttaacatctttttacaaaattgattttgttgatttgtagtcaacatggattaaaaacttttggttagaaagatcatcttgaaattttgagatgcataaaacaatgcttaaaatttcctttttgactgtattgtagttgagttgggcttggttgcatgttcctgaagtaaaccttactaacctttccttatctccatccttttgcttaaggattccaccataccgtatttctaaagcatctgtttcaaaaaccttaaaagcttttgggttggctatgtttaggcaaggtgaagtcttaactatagtcttgataagtttaataattctagtatgctttgtggtccatggaagagaatccttttaagtctttgtcttaacagggcacatatcttgcttaggacttcgataaaatccgatacataattaagacttcctaagaaatgttgtacttttttcttatccttaatctcgttaggaaacttatcagcaaaccaaattgctctttggattggggttatggttccttgttaaatttgatgtcctaaaaatctaatcttagtctggaaaagattgatcttggaagccaacaaacttaagtcattatccttgactgtttgaataaacctgttaaggtgcttcaaatgttcttctattgatgaggaaaaaaccaaaatatcatcaatataaacaatgaggaagttggaataagggttaaaattttcattcattatattctgcaatttagagggttcattattaagcccaaagggcattacattccattcataatgtccacagggttcattaaaggctttttgagtgcagaagtgtagttttcctttactacatgcttaaataattgcatacaggtggaatgttttgatcaatcttccagaaattagtcttatgtgctacgctttatgagattttagaatctcatcttcttggcttgttgcttgaataaataaccaagttttggatagtctaaccacatctgtactctttagttttctttcaagatatagaaaccacttgctctaggaaatcatgctgcatctgattgtttattatatatgatatattgtggaggaaagaacatgtctttgtttgatgttttgaaataccatgtcatctattttttttttccttttgtttctttttgtaagttttaaaactttcaaatgttctcttgctgtgccttctggtattttccctttttgtcatttttcttgtataggtaccagaagaaagcagcaaaattaatccaagagt

SEQ ID NO: 10851 - DNA, 2024 bp, Vitis vinifera
  Intron number 6 from transcript GSVIVT01025317001 (locus G SVIVG01025317001) derived from phytozome v7.0 (chr-ID chr6 ; pos 2096376 to 2098399 reverse strand)
tagttcgttggaaccttgctaaccaagacgaggttggattcgcttccattttgtttttccctatcttaagataattactgtacacacaaatttcgtggtcctgcaaaattagcaaaactatgggaaaaataatgcgaataaaaatttgtatgaaagtgattaattgtggggtacaatctttgtggttatattctctacaaaagaatatttcctctaattcaatcactttgatcacaattcaaagcacaacaacgaaagtgttttcttggagttgaagatcaattgagggcatagagtggttttttcctgaatgaatttgttgaatggcgaagaacatgtatgtagtacttttgccatttctcatacttgcagagagattttgtgaagacttttcctctttgtgaaacttcttttctcacatgaattcgttttgctgatccttttcattgacggaagtcactattatttataagtgaaattagataattaaatttggaacccacaagatttagttacttaattcaaagaatttgattatttgattttagtaacttgtttcattccttaagggaattttccaatgagagaatatttatttttaattctcttttgacttcaatggaaagatttgtttcctttggaaatttgccaacaagagaatatttatttctaattctcttttgacttcaattgtttgatttgattttatttacaagacttaattttgtagccttccaaattttgccacatgtcacattttgaatacatgtcatctgtccaatgtgtttgatccatcacttgtcaagcctaaattttgttgaactaaatagtcacaattttgatgatcaatttagtggtaatttaatcccctaaaatttttgatgtctacaattgcttagaataatttctctgacatatgttgctctaatttcaatatgtgcttgccatcagtagttgtggaggattttggcctcaaagttccatttttatgaaccataaagtcttgaaactgtattttgtcacttttattgtttgagtggattagcccttacttgaccaagaaatggattctctttgaaatttcacataaataggttaatatatgttaaattttttgtaattgttagaatggtagtaaaaaattggcaaattgaaatcggaatgctttccttctaactatcaacaactccctgagctagcaatttcttatttgtgggttagcaattataagattctgctcttctataattctcaatctctatccttatcaaagattcaagtgtctctcttattgcatttcttattatctagcttcttaaattgaaatgttttgagaagttaacatagagaagtttgcgacaaagttggctggccttgtttttgacacttttaaccttctttgatccttgagttttacaaacatgttttaattataaagagatatatgttatacctgtatatcatcagagaggttttccattacaacactagtttcttattgagagttttcttctcttttcatttatttttcattcaggtcaccctttagtgtgggcatgtttaatccaaagtcgcatctgataacagccatctgcattggcttggcgaaaagattcctggtctataattgcctcacatccacctatattatttatttctctctgcaaaaagctgacatttctcccctaaacttttattaaggatgtgaagggtactcccttctgtcatcatgccttaggatgaaactttcaatgtagcagatggaatgttggaccattacaaaacctggataacaataattgagtttgttgcatccagcagtttctataaagtgaaacatggagatgcacttgggcatttttaatctttgctgacgcttctagtttggaatcctttacttatgtgtttgaatacatgttctggttgatttcatatattttgatgtgcttggtgttttaacatcttaatcagatctgggtaatgtattgtttctttctttacttcttcaggttgcgtgcacatct

SEQ ID NO: 10852 - DNA, 1259 bp, Vitis vinifera
  Intron number 1 from transcript GSVIVT01018513001 (locus G SVIVG01018513001) derived from phytozome v7.0 (chr-ID chr1 6; pos 14016104 to 14017362 reverse strand)
aaacaaaaaaccaaaaaaaaaaaaaaaaaaaaaaagttttctatttgggattctagatatggtctatattgtgtatgacttttgtcctaattagacaaagattgtgttcttctttcttcatatctccttcataatttggttggcaaaagtcaaaagatacaaaagtcaaaaaattagaaatagttgctctccaagaaaacaacaattccatccaaatttcaagccaaataaatatgtacacatgggttttttcttataaattaggtgtgaaaaaaattaagtttttaaaaaatgaaagtttcttttttggcaatgtgaataaataaatctacccaaaaaaaatagtaagactaagaataagattgagaaaaattattattaattttaatttttaaaaatatggaaaaatccagaaggaatgaatctagggtttggacctgtgggagaaaaacacagactgcataactgcaactggaagtagcagttatggtgtcacatgtcagcctctccatagtggcagcaacagtaaattatttgaaaagggaggggatttaaacttgtatagtcaactttaatttacctgaaaagacaaaaaaacaggtcagtggttgataaaatacaattgctttacagctttaaataaataaatgcgaattttaaattaaaaagcaattttcttttcccaaattttcttatttttttattctaatttactatctttgccatttattaaatcatttgtcttaattttccaagacggacgtgaaccattttataaaccagaatttatactttgaattttgtaatttaaaatattaattattaattaaattccccaatatttaattctattttaattttattttaattttattttaattttttactttatttccttcttcttttcctgcaaaaccctaatttcacaatccttgtagaatttctgaaatcacatcaaatttttgattttttgctggaaaaaaaatctaagtgtcaccattgaagctctgtgtatctctgcaacagtggtgattacatagaatagtgtctgttacagagtgtaagtctgactgtcttaggttgtaaggaatgaaggtttgatctttggagtttgaagaaaactggttggagtttttgggttcttcgagtttcaagtgggggttaaatttttttttttttcccatttttctctggttttttattttttatttttttttatttttcaaggttgagtttattgagagtttgcgttgaaaaaa

SEQ ID NO: 10853 - DNA, 6477 bp, Vitis vinifera
  Intron number 1 from transcript GSVIVT01026787001 (locus G SVIVG01026787001) derived from phytozome v7.0 (chr-ID chr1 5; pos 7161616 to 7168092 reverse strand)
catttatcctctattaaaaggtgatatggcacaacttaccaaacaatatgaacttaagccatcggactaggattgatccaagctacgattggccaaaaattgatttagtaccaaagcaaggggtgtagctataggaaattgctcaattagctatttaacctacactaaaaaggggccttgggatcttggtttagtaggaattctctcttgatttttaaaggggaaaccatattgaatttcatagagaaagggagaaggaaagcttatgggtttgaaggcttggtttgaaagaagatttgaattgttagaaagctagtgttcacttgtgtggagaatccttagtaagctcacttccatttcattttctccttcttattcttagttcatcttcatctcctcttgattcttgagttgatttgtatattgagcatggatattggaggtcacacacttgattgttagttatttgtttatgatctatggttattcttcttcttttcgtcccttgattcatcttatttgcttaaaggattgtctaatccttaatttgacttgttgcatagtggttttgagactttgattaatttgattttgatatgttttgggtatttttatccacttatcaattcatgaaatgaagctttatgtgaatttgaaatccttgtcttccttttgatttctcttttgaggatttctcttttcccatccattttaatgattttgaaagcctttttgactaattttcaaataaattttaataaccacaaagtgttttcatatttaccaaagaggttttccattatatatatatatatatatatatatatataaagaaaaggtctttaaagcctctttctacccttttgggttttcttttcaaatctatttgtaaacttctttttcaaacccaaccatttttagcttatttttaagcatctcttaatggccattttcatagcccaaggtcaaggctctctccatagttttttatcttacttttacgcttgagaaaatttataattgctctcatggtttttatgatttttaaattttttttttttcaaactgatttttaatggaccattctctgccccgaatcccttttcatggtcaattagggtttaagactatggtcatttcatgatcattaatatttttcatgttctttggcaaataatgcatgatttcacaagagaatatccttatctatggtatttctttgtgcattttagcccatttttcataagtgagtgttaatttggcccttcatgctttttatgagcttaaactcatactcatatgatggtagagaagtaaatgccctgtggattgattcataccttatttctttaatctacatcactcatttttcaaacttatgattttcagattttcttgattttggaaaaatggattaatcttgcaaatctaaatttaattggattattttcaaatctcatgagcttttttcctcattaaaaggttgaggatgtggattaatctatcaaaattaatttaaacattaataaggctcacattttttggttttcaaatctatcttgcttgctaacctatttttaactctcaaagtgtttttgttaatatagaacttttagcttatttctaagtgtctagtttttaccttattttttacccccaaaatatttttacaaatcaatcttagctcataggttttcaatttttttgatattttttttggtgtactaaacttcttaaataaggttttgagcttttatttcattcaaaaatcattttccaaactttttaattaattccatttttccttacttgttgtgttgacctaaatctactattgtggtttattctttaaaatatgaaataattggtacatatttgagcatcatagaaattttttatgtattttaggcactttaaatatgttttttgattttatattacaccaatgcttgtcaaataattcaatctttgcatgacttgttttgtcctatttttgagcaataaaacatttggttaaatctaagattattggtgcatgtttagaaactttgagctttttatttgtattctagggatctgaaacatgttgtataattttattttatttttatatcatctctaactattttatttggatttattttgtaactagttgatttttgtccaacttttgtatatcttacataaactcgttgatttagcctcttttagcatgttttttgtcttttttttattcttactttgtatcatagacatcttgtccatgttaaacaagtcttcccttgtatcatgatcaccattttaatattttatttgaatttattttgtgattgcatgtttgttctctagttctgatccctatgcatgactagtgtatatcagttcatcttgatgttagtttaaccatctttgactcttgattttgattgtgtatatgttgtatatattgggtggctcatactttgatttgtataactcctttaatatacatgctatactattatttgttatcgccattgcctttgttatatattcttgttgttgtctcttagtatccattggtctattagtaaattgtcttagttccttctacttgtttagtagagacctctttaagaaaagggtgttatcctatggtaccttcctaataagtaacctaacactcgaatctagactcgattttcttaaactttgctttttctttaaaaaggagttactctagtattttatttcttattttttcgcttaaaaaatgaacaaaataaatggtgactccaactttttccaaaatcaaatttttcacaaaaaagtgagtctcactttgagtggggacacacatgaaaaatacgagtccataacaagaagtaacacgtattatcaaaggtatatgatatgaagacaaaatggagggtctacaacttctaagaccctttcctccccttgaaggcttatgaaatgataacaatagaatatcactaccaatataaattccctaacccacattgtttcacttggcactctctttgtttggtgcatatgtgtttcaatactgttttttatttctactcaaatgtgtgcactattaggcatcatatatcttagctagtgatctctttagttcttggtcttatttgtaaggaacttaggttggaaaactaaaaagatgtgttctaatttcttcccaatctccaattttcttttggtttttatatcgaatgattatttagagttttataatgttttcaaaacttttccaacaaaataattttttttttgggtacttatatttgatactctatttgagttcattctactttgttgtttatttcctataatagccctcatcttgacctttttgtgactgattaagggtcaataacctgagcctaaaaactagcctaggataaggccccaaaggatgatggtggaattacactccaatcagtgcagaaccttagttaacaaaagttcaatggagcctaatctagcttcaatctttcaagatcataggggatctaccaagggttgtgatcatcattcaatcataggcatgggatcaacaaaatagagcatctctatctattaattcattacccaacaaccactacagttgtgatgcaaagatgtcttctagaatctgcatgtcacaaaaaagcttcacatcaaaggctgattatcctcttatgtgttttccttctcaattttaggttttatcaattaattgaattatccgcgtgtaggtgaactggtaatcttggcacttaagtaaaggagtaatttactagtttcagtcattcaatctagctgactttaacttgagacctcctaatcagagctacctcttataatataagaaacaagaacaaaacctttattaggatcctatccaacaactctataagaagatcctaatcagagctacctcttataatataagaaatccaaatgccatggaatgaataactctataagaagatcctaatgaattgataaccccttctatgggcactctaaggttctagggccgactattatgacacacattactaagtaacaattaattttagaatgcaatagtgtgaactttactgcaatgaaattcaaaatcatttaaaagggtcatgcaaatcaatgatatcaaaggaaacatccaaggtagaagaacaaatagtagttccatgaacaactcaaatgtgatgtatataaaaccctttcaatataagagtaaattgaaattatgagctagtcaagtggtctaaactaagaagagatgtaggtggtgtttttttttttacttaattataaatagaaccttaatgcttaatagggttaaatattatattgtttttttttttttttgcagtattatatttctattaagtattaaaaagtaaaaaaaatcaatatgttgttttttctatttagaaaaaactatatattttggttttttctatttagtaaaaagtttataataagtcataaaaaaatagaaaacaaacaacctaaattctgaaaacaaattgcttttagcaaaaaaccaaaaaaacaaacaccatcatagtgtacatgaaaggtgttttgcataaagtatgtttcacattctatctaaattttccatggaagcggtcgacataaagtatgtttcctgtctttaataaaattttaatcaacccaattgaattcttcaaacatgcaaatatctttacaaaaggccctaaattccaatgttgtttttatttccaatcgagtgtcatttggtattagaaaacaatctcgtccaatcacctgaatatcccactggtggcccgccccactgataccacgttcatagactctgtttttgaactcatttcgtgtaagcataatcatgaagaaaattttctcattttccctcccaatagataagagaaacgaataagatctcaactatttaagataaggatgaatcaaaaggaaaggaaccaaacaccaacaaatgtttctcaatgttttcatacaagatacacaaagtacttatgcattacatattcaaagatacaaaatagaaccaaaacataactaggaatttttcatggggcaaccaaggaaaaataccaacaaactaagatggagagatcttacatgtacattaacaacacctggttgactcaacaatcttcaacttaaaactatgaccaaggagcaagggttccattactacattgaacctgactaattttaataggttgtagtaagaaaaaattttcaaaccttaattgttttcttaggtctaaaataaaaattgccttcaaattgttatgcctataatcagatctaaagacaactataacaacaaagcaaagacaataagattgaaaaggcatcaccaaatcatagggcatgaaatcagaacataccttaaggattgaaatattattaacctattttaaataaaatgttattaaccattaatattttttcaaatatgactagttattttaaataaaaatataatttataactttattaaaatattataattcctttaaaattattacctggtatatttttaaaattatcaatgttactatctaggaaatttattttaaatattattatctataattttatatttatttcttataatttaatatttactttaaattagattaaaatttttgtggattctaaaaatattataatgtattattacagtttttaaaaagatattgtgcatttttttacccaaaaatatcaatttaagattttaataacttgagaatccttttatttaaaaaaataaaagaataattgggtacatttaacaaagttgatgcatttatacaatgatacttcaattattaaaggtaagcaattatttaaaagtctatatataatattattttttaaaattatttaattaaaaaaaaaccattaaaaatccaattttgaaaatcaaaccagccgttctctttttaccatattttaacaaaaatgtcattatcattttattataaaaataatttttccctttaaaacctacatgtaactacttaaaatataattaaggatatttatgttaaaaatatgttactcttcaaataaaatcgtggaagaggttaaattcacaaatatgataattatttcatccatttcaatcaattaattttttaaaatattgaaaatatgtaaaagtgaaaaattagttcactatttgtctactacctttttaaaaggaagcttgtaaaacaaagggaaatgttttgaaaatcattcttgaaaatatttatttttaaaaaataatttttggtgagaatttgttttggaaacatatttttttcaaaaacggtttgtttccgatgatatttttaaacgcagccaaacagcccctagttttccacacaaattcatcagacggtttgttaaaactcagtgaccggataagacctgagcagacactaaaccctaacagagccaaggtttttcttttctgtgaag

SEQ ID NO: 10854 - DNA, 3976 bp, Vitis vinifera
  Intron number 2 from transcript GSVIVT01032445001 (locus G SVIVG01032445001) derived from phytozome v7.0 (chr-ID chr1 4; pos 27487202 to 27491177 reverse strand)
aggtttgggatcagacggtttggttttacagtgaggtgagcttgcttttgttattgagctgattctgtttgttcattatttgaaatattggttcttgtctgtatcgttgttcttctttttaactgaagctgtttcttgttgtttggtttctgagaaagctaacagaaggaaaggaaaatgaatttttgacaaatttttcctcttctttgtggttctggttttacggataatgggaagtccgagatttcggaattttgatttcttttctgttcgtgcatttcgtccttgaccaaactggggtttggagtctctttgttgtgtcatagtagttctgttggtgatgttttgtggttgtttcatttatgtttctcatcatttaaacagggtttagggtttttatttatttatttaatattttaaggtttttctggatttgatatgttgaagttagagtctaatggtcttcagaggggctgaattttctcagaataataaggctgaaggactgtgttgaaatataaccattgatcggacagtatctaattaggttgaaatttttggtgcttggagccaagaaagaaaaagggaggttagttttctgatcaagaaaacttttggatcacaatgtggctcctacctggtttcaattttgaattaaaacaccaacaatttcttttttgtgctggcctaaatggtcttcaaagaaggttcataatcaatgaaggagatgaaatgtgtgagtaagctttatcaatcatcagggcagatctccactatggaccaaattaagtttgaagtggatggtcatgagaacttgtgtaaaatggtgaaatgccagtctcattggctgtaataatctctagatgagaaaactgtgtactttttttgtttgcttgaatttggttcagattttttttttttttttttttttctgaattcatgtttggacagtaaaaacaacactagatgtttgaattttctactaaatgttttgccaaataaattaaaatcaaccctagaaaagaagatcatgtaaaggttgatggaggttagtgcactcaagaggtgagagaaaccattgttgtggcaatttggaaagaaattaggattgggtgaaaattgttcggcctgagagcttcgatttttgttattctagtcagataaaaggtggagaagagacccttgaaaaagatcttaaccatgttgtttagcctggcagtttccagaggtattggagtagcaggtttctgaaagttagaggcaaatggtggccgttggccctttcatttttctagccacttctacactgggaaatggaggaaatgggctagtttttgagcttacaaatattgtgatagttcaaggagcagtggagcattctttacataggaaagaggaaagtaaagggttattccatgtgaaatccttttattcttccttatgtaatgaggagaggattctgtttcctgttcaatgagtgtggggttttggtgccccattgagaacatgttttttttttttgcctgggaggcagtattggggaaaatcttcatattgatatgctcatgacaagaggatacatgcaggttaacaggtgtaatctttgtaaaactggtgaagaattggcctatcatatcttaatgcattgcaatagatccaaacaattatgggatatgttgcttgcattgttcagtgcaatggtttttcctttctcagttaaagatcttttgttgggaggtctgataagcagtgaaagaaggtttggatgttgactcctatatacttgttttggtgcatttgaagagagtgaaatgattgaattttttacagtgaaaaacatttagatcaaaagctaaaatagatattcattaaattcctttggaaatggtctagagtttaactggatatggattgttgtacattattggggttcattgataatctaaactgaagatagctaatttagctctgctggcctttttttaggtgggcagtttggtgctcctttattgtgtacctcttgtatatcccctatttacatatattgtgtccctcttgtatatcccctatttacatagagtgtaccctttttggaaggtgcttttctatcgtagtttgtgtttgcctatatatattgcaactaagcaataatctctagaatttagtcatagatatctataaaatttatagtcctagaatgaatggggaaacagttataatcttaatcaaaacatgaagacaaatatgagaataaagaggaaatgtaaaaggataaaaaatctaaataaataaaaacataaagttaaacaccaagtgtgataatttctccgttagttccctccatgactccttaaaccagagaggtagagagcctttcccagcaagcatagtatggtgctcatgggttcctatgaaggcaggcttcttttcttgggaaatggcatgaggcagaattttgacagttgatcaactcaaaaggagaggctagtttttgctgaatagatgtttcttatgcaaaagcaaggaagagtcggaggattaattgcttcttcattgtcccaaagcaagaatgctataatggttgatcctctctactttaggagtggtttgggtcatgcactcgtcagttaaatggaatttgttgagttgacatggttcatttgttggcaaaaagtggaaaacaactttgagtgctggtgtttatattggactctatggaaagaaagaaacaggaggacatttaatgatgacacgcagttggattatctataaaaaaaatgatgtgcagtcgaaccaaaaaatcaaatatgattttatgtctgtatttttgtgttggattaagatgtacatagagtagcaagaccattctttagctatgattgattttgtataacggttgacattcaagtattgagagagattctttttttcatttgttggaaagaaatgggaaaaagctttgggcaccacccccttgtgtttattttggactctatggaaagaaagaaacagaaggacatttaatgatgccgagaagtcagcccaagcaaccaaatctgattttatgttgagttaagatgtacatattagcagaaccattctttggctatgattgattttgtagtgcggttgagcttcaaggaagaagagagattcctttttgcattttttttccttgattagcctaagcggctattgtatacattgtatgtaccttggtacacctccttttagatgtctttaaatatatactctttattgcctatcataaaaaaaaaacaccaaaaacatagcaatcctatatattaggaagagtaaaaatgaaaaaggaaaatatctagcagtaggcaacttagtccaaattagcctaggatttctaatgccacaaaaacttttcactacactgcatcagggatcctgggtggtctttctagtctcctccaccctgcacttgcctgaatttaaggatagcagcctccttaacaccgtataacaaggttgaaatttctattttattagcattggcatcaacatagcccacaggcttagagcaagaaataaaaatatttctatcatgttcttaaaacatgccacctactccaacctgacctgggtttccaagataggaagtattctagttcaactttgcttccatgtttttgggaaaagattctgctgtctatggaaactaactaatgtcctgtgttctggaataatctgaatatcctggtatctttttctcttttttttttttttctttttttctaattagaatatcctagtgtcatacctcttcagtttcttgctaaaagccattagttgttggatccctctttttctaggaagcatatggggtgtttaaagtttaacaaatgcccttgatgttcttccttacttttatggtttaactttgtgtagttcttcatgtttctcttggacagattggaaccttaactttggccaaactgatagctga

SEQ ID NO: 10855 - DNA, 4010 bp, Vitis vinifera
  Intron number 22 from transcript GSVIVT01008813001 (locus GSVIVG01008813001) derived from phytozome v7.0 (chr-ID chr 18; pos 2390275 to 2394284 reverse strand)
aatctcgaaggattgataaccaggtgagaatgcactgacaagttcagacgtagcaataacctaaaactaagtagaagtgcaaagttactgctaatgttacattctgggccttccatggtttgaaatctcacattggaatcactttcttctcctgaaccatttgatgcatgtagtgaagagatttaggtcatttattatctaaggcatgtatatgtgtaagaatcagtggtataatacttcagatctgataagcatgatatgagttctaattgcaatgcaaaatccatatgcactgcagagtgtgtaaaatctgtatctgtagctcattatggatctattagattggtacctcttttttcacaaacatcgttcgtagctataagagaactttgtcaatactttaatttgcacgcataaaagcacagagcctgtcattttggttgtcattatcatcacatcaatgataatgacagcaaaaaaatatttatcatattctaagcttatctagctagttttttatctcctaaatttcctttttgaagcgcaccgttgtcttggtcatattttgtttcaaaatgtatattaaatacagaagccttatgtatttaatagttggttccagaattttcaatgccaaagagcttcccttttaacttatgtgtatcttggaagtctgactctctactgtatgattacaaatcttgtaaacactgagtcctgaaaatttttggttagatatgtctctatgtagtcatgaatggtcaaaatggattcttgtgatgaatggtgaaaaaagattcatgcaattgaacctatgtaattgatcccatatacatatgtgaaccggctttttaggaagggagttcttttgcagagtatgtttttacttatgctgggaatcattgttctttgaaattatgtacctcttatacatacatacacgcatgcgcgcgcacacacacacacacatacatatatatcctgtaatttgttacctcacctcttatctatatatatatatttttcctgtaatttttgacgtcaaaccatcaactttaagccttaagagatttatagcttcttgtttgaaccttgtgcttaagtttcatgtttgtttaaaagtgtgggattgagaaaatttgtgcacacctttaataaattaaatggtcatgagaatcataagaaaaaggagcacataaaaatgggttgattctatgccctagtattttttacaaaaccttttctttaaatcaaggagttaagggatattttctcatcctttttcctcctgtcttccgtttttaattgttatccagtgtggtagtttttttttttttttcattttatctgtcctgctaatatatctacaagtttcttacagttaggggaatgccatcttgaatttcatatatggtcagaattctaatggcattatacctcttttcaagtttgaaatatcatttgaaatattgttttgagttttaattgtttttgtatccttctctctctaaaaccttgatcttataattattctagatctttttcactcttcctaggacattatgtagttagatcttggattatgaacatcatcaactcatttaaaagcttctgcattttcaattgtattggtgttttaagtaaattgtgagaacatgtttccaaagcctgcaaagaacatcaatttattgtttcagggaaacatcttttttttttttaattattttattttattttattgctaatgttttctggcagcaattttccaaaaataaataacccaaaatttctattgggtgttttcttttttttgactgttttaaacatgctctaattatctgtatttacacctcatgaaatgcatgagtatgaagaggtgaaaggaaaatttgagagacttgatatttgagggccttttaaatataccatttgagtgatgacatattcaatatttcaagtagacaatccgagtaaaaggtcattgtagatcactagattgcctttgctaataagagagctttcctatgaaacaataataactcctcttgagggaaaacttgtttcacagcactgcctaaattgactccttatgttaaaactactgtcttagtgaaaggctatgacagaacattcttagctggggatggttggaggacagggctccccatcaatcttacttttgacctttcttttcccagaaatggggatctctcatgactcttaaaaggccttgttgtgaagaacaatgcgggtggtatctacaactcagtcaaccaagatgacttttcttacatgggaacctccttatccaaagtgacaaactcaaggctaatgtctcaatagagtgaaattgaggcagagcagcatcagggtgctctttgagtgataaccaagggatctaacatatccaactttgggagcgttatcatattctgaaccagagatatccaatggttgggaaagaaaccttttatagaggattttatagttgaatgagacttaagttcatcacggacgccgccttcggtagatcaatcccttctttgaagttcaggcctaatcaggatttgtatgtgctgttaggttcctttaggtttgttttagtgaagcatgtctactgaaggcaatcgtgtcatattttttagctgacttgtcaatacatcaattggtttgatgtggagatcatgttttccctgctactaagcattttgctgaatctgtcagaggtgtttccattcattggtgctcctgtttctagatagatatacctttttggatgttttcttagtattttgaagaaaaattgtttggtacaacttcctgcaatgcattgtttacaatttctcgttgcccagtgccatattaatagaaaatgctgaagggttgattctcattatataataatatacaagtagataaatgaaggaatatgtggaatggcatctcttgagtattaccccttgaagatttgattcttagtaatttgttttaattaatctctgctgcttctcattttcacatattgcctttatttttgggtgcgactcaacctgtttagatttgattcatagcaggtttctatgattaatttgtgctgcttttcattttcacatatcatcttcagtatttgatgcaactcaacctgtttagacgtgattctttgtaatttgctttgattgatttgtgctgcttctcattttcacatattgcctttattattgggtgcgactcaacctgtttagatttgattcatagtaggtttctatgattaatttgtgctgcttttcattttcacatatcatcttcagtatttgatgcaactcaacctgtttagacgtgattctttttaatttgctttgattaatttgtgccgcttctcattttcacatattggctttgttatttgaagcaactcaacacctatcaaagaaaaaaaaaaaaaattatttgaagcaacacaacctgtttatagagttggttgttagtaatttgctatggctaatttgtgctgcttctctttttcacatattgccttcattatttgatgcaacccaacctattttgtccctaatcccttcataaaaccagccagaatcatcaaagagatcattaaaaacaagaatcctgaatttttcttttcttccttggaagttaagatactcaaaaagtataaccataagatagaatggtatggtgaaataacatacgtgcagcctcccccaaatggttgacataatgctaccttgaggaggctaatataatcttcatttgcctattggaaaaaaaaaaaaaaaaaaaacagaaaaaaaaaactcttccttgagtcagcactcatggaggttgttgctttcatcagtaaagatgatgtgtcaacttataaccatgttagtccggttgatctaagacttgagttttttggtaatcattgatcaattctgtatgcttttatccctaagttataatgcttttttgcagcttcgtggtagagcaggcagacaaggggatcctgg

SEQ ID NO: 10856 - DNA, 9267 bp, Vitis vinifera
  Intron number 2 from transcript GSVIVT01033620001 (locus G SVIVG01033620001) derived from phytozome v7.0 (chr-ID chr8 ; pos 19217998 to 19227264 reverse strand)
gcctaaactggtgatagttttgtcaatttctcgttgtcgaataggacagaatttttttatttttttttaaatgatggccacctagaattctccgtcccataaccatttggttgtgcgaaagatttttatttctatttttattttttattttttttgtgtaagccctaaaagaatagagggaaatcaaataatcaactcctacacaaattctcatggccgaaatcggccttttaatacaatattttaaaatttatcccgacaattgagtgacttaaagaaattatttcacgttatgtttgcttccgaaaaatgtgataaaaatataagaaaaaaaaagagaaagaaaataaagaggaaagtaaaaagaaaatttagatttaaaatcaataaaatatttttatatatttctttaaatttaaatcacttattattatagatcatataaatattaaataatattaaaatgtatatattcctaactaattataattatacttgatttttctttcctatattttttatagtgaaacaaaatatgaaaaaactatttatctaatttttttctttaataattttctaaaaccaaacatataatctcctatattttgtttaaatgatagactttctaatgttaataattttcaattatgaaaataagggttaaatatgtgttatttgcgttcatgtgatgacgtacccacgtgcatacggataacaacagggtaggtttgggacggatcattctcatctcaatcttgtctcatttattcaaaataacccatcatagttgttccattaaaaaaattcaacgagtggaaaagggacgagatgggtatgcaaattttccacactcatcttgccttgttcaatttttttttttgaattattttatttttattattaaatacattaaaataaatacattttataaataattaaaatatcataattttatgacttattttattgaaaagcacgttgttgttgttgttgttattattatattattaataataaaaaataaattaatttattttattttttaaaattaactttatatgtaatcaaggtgggatacaacgggataagacaataccaaaacccaacctaacatgtcccaagttttaaaaaaaaattcaaacttctaatttgtttatttaaattttaaactcgtcccatcaaggggagtatttattttatgcaaggttggggattttgttgtgtttggtttaagaagtttagaaagaaaatgcaatgaaaattaataagaaaggaaaaacaataaaaaaaattagaagatattaatatatttacttactatatatttatttatttagttagttactatattataattatttttttctttttaaaagtaagggtaaattagtctttatttccttcattaaatctatttaaatttcaatgatgtattttctatttttctctttgattttttttggattttagcatggtatcagagcttggttcaaccggaggttgtggatttgagccacatttttgcatctttaatgagattttttatttatgatctaaaaagagattaatctcatacaacgctttcgtttctatttgattatgaaattcttttttatcatgtttgattatgggatatcatagtgggtgactatatcattctttttttgtttaatctcattatttgattttatattcgttttttttcttcttcatatctactttcttttgtttggtaactacctttcaatctattggtgtgatattggatggaaaaatttattcctattaaagttatgtgataaataatttaataaatggcaaaaatatataaggttatattattggtactctatgcaaacttataaatgaaaagataaaatatatgtagaagagttagatgtttggaaaacaagaaatttgaaaattattatttggatcaacagctctattaataattcgatagatatatagttgatgaagtataaactaccaaaaagatctgaaaacatttggaaaaattgtacatgcaatctaatttagtatttcctctatttgtttgttagatatgaatctaaattttgtttgttggatatgaatccaaattttatctgtttttgtttgttggatatgaattcaaatttttcagtttttatttgttgaatatgaatccaaattttgtttatctctcttacttctatgatttcatgtctttttttgcctttttttcttgatagtttcatatcaacttttatctttgatagtttagttttgtgtcgacttctttttttttcttgatagttttagtcttatgtcttctactacttctttgaacatatacctttcctattcctactagttttataatgtctctaagtttgaacttgtccgcattgaaccttttttggatgatgcaagtggtttttatgcaagtggtttttatgcaaaaattgaaattttggtttttgattctcttgcttatttttctcattttatgactactttaacatcttatgagattgtggattcttattgaagcccaatcataggagctattctttagctgttagttttctattgtaacatattatttctgatgtattcaaatgtttgttttcattgtaactgacttgaccacgttttgtgggatattttttgtaaccgtttgggatgtttatgatatataaacctcattcaacgtgtttaatcaacacatatcaataattcaacaattactcctcttaatatctttcatggtatcagagcagtaaagactctaacgagttttttttttcttgattcaaaacctctctttgcaaatatcctgcaccatggccgaaaacacaaccaacagaaccaatgtatgattcatctcttctacttcttgctttgatggaattatctccatgaatgcaaatgcctaactacccatcaaattgaatagcaacaactttccctattggaaagcacaatttgacaccctattatatggttatgacctcatgggatttcttgatgggactaagacatgcccatccaaggaaattattgctaaaaatggaacaactgttccaaatccaaattttgctatttggactaggcaagacaaattgctccttcacacaatctttgcatctcttttagaaggagttgtgcctttgattgctgctgctacttcttctcgtgatgcttgggtaaagcttcacaagctttatgctaacaaatccagatcacgagtaatgaatctcaaggagaagcttaccaacatcacttgcaatactcattctgttgcagagtatcttcaaaccatcaaaggaattactgatgagctagatctcattgacactcatttaagtgatgatgatctgactatttttgctctcaatggccttggtagtggctttaaggatatttctactgcaataagagctcgagacactcctgttcatttgaagaacttcatgacaagttggtagaacatgaagctttcttgaaaagagaagagtcgcgtggtggttcaaatgtcattgtgaataagactcgcacaagtcttggcaacacccaacctcgatatggcaatgaacaaagttataatgggaagagattctttaaaaaccgtaatcaccaaggaagaaagttcaacaacaatggtaaccataacaagtaaaaagaacatcaatttcctcttgcctcaaatacttcgcctacagatcttgaccaagttgtctccacttggtcttcgtgttctccagctcttgctgctatccaaccttcttttttgtggttcccactccctccaaatctttcccgcaccaaagaccttcttccactaccacacggcctaatcaggagctgctctcatcacgttctcctgctagttccagtccacctactacgacttcatcttctctctcggtgtgtgatgctactccaaggtatgatctcttcctttcctctccatctttgtccttgtcaccacctgtctaaacctaagggtccaatcctccgcccgagccatctcatcgaattgtaacccattctcaaaataatattcgttgtcccaaacagtttcctagctttaagacaagttttcatgtcaccaaacatcctcttcctgcgtcccttgagcctaccactgcctctcaagctcttcgagatcccaattggtgtgctgccatggatgatgagcttgatgctcttgctcgcaaccgtacacgagttcttgtacctcctccttccaaccataacattgtggggtgtaaatgggtgtttcgtgtcaaacgaaatccggatggttctatttcttgatacgaagtttgtttggttgccaaaggattccatcaatgccctggggttgattatcatgacacttttagcccagttgttaggccaaccaccattcgagttgttctatccattgccttgagtaacggttggcctatttcacagcttgatgttaataatgttttttttcatggaaatttaactgaggatgtttacatggctcaaccacttgggtatgttgatcaggataatcctactcatgtttgccgcttgcaaaaggctttttatggtttgaaacaaacctctcgagcttggtacacagagttaaagacatttctcttcaactttgggtttgtcaattctaaatctaatacttcattattcatctatcaatgttggtcagtcacaatttattttctagtatatgtggatgatttacttgtaacaggaaattgttctcagtccatttggaagttcgttgatgctcttgctcatcgtttttccctaaaggatcttggtcctttgagctactttttgggagttgaggtcatttccacttctgatggcatgtttttatctcaacataaatatgtttgtgacttgttggcaaagtttcatttggaaggcataaaggattcttccaccccaatgtcttcaattggccatctaactctcaatgatggttctcctctagctaatgctactcaatttcggagcttggttggtggacttcaatatctccagttcactcgtcctgatattgctttcgccgtcaacaaacttgcccaattcatgcatgccccaactcaaactcattggactacatctaagaggttgctccgttacctcaaacatacaatacatcttggtctcactttccgacgaaaacaacatctccatcttcaagcttattcagatgtcactccacctcttgatcttcgagcttattccgatgtcgattgggctggcaaccaagattcttacaagtctaccactgtttttgttctttttcttggtggcaatccaatctcttggtgttcaaagaaacagaagacggtagctcattcttcaacagaggccgagtatcgggccgtcgcttctatcgctgctaaagtcacttgggtttctcatcttcgttctgagcttggtatcactcttcaacaatttcctactatttattgtgataatttaattgccacatatttgtgtgtaaattcgctattccacagtcgaatgaagcacatcgcgttggattaccattttgttcgggaaaaagttgttgatggttctcttaaagttgctcatattaacactcactcccagttggctgatgtccttactaaacctttctccaaaggtcggttcctttttcttcgctccaagattggcatttcagatggaattgccatcttgcgggggcgtattcaaacccaatcataggagctattctttagctattagttttttgttgtaacatattatttctaatgtattcaaatatttgttttcattgtaactaacttgaccacgttttgtgggatattttttgtaatcgtttgggatgtttatgatatataaaccccattcaatgtgtttaatcaacacatatcaataattcaacaattactcctcttaatatctttcaattctcgtctcctacgttcttctcgacatattccaagcaataattgagaaattttcaactttgcataaaactgagacttagtatttggtatttcgattaaatagtacaaaacttgattacttgctaagaaattttcttaacaatatgattgtagagttgtttactaagtcatacctacttccacgttttcgatttttggttgacaaactcttgatgcttcttgtgttatttatttagttactatatttcttatttatttagttactatattaattttttttaagaagtaagggtaaattaatatttatttccctttattagatttatttaaattccaatgatgttgtactttttttaaaaataattcataataagaaatcatagattattttattttattttatttttatcttttgttctctttgaatcttttttggatttcaacaaaaattaattgtatttggattttcatattataatttttagttaaatttaattgtatttgattttttttagaataaattaaataaaagtaaatattttttaaaaagtattctcgggacccaaatataggggataggcttaagatgtgtggtgatttaggcactagtattttgtaaagctatagaaaatcacaaggcagcaaagactctaggcgtgatcaatgatcgaaacaaagggaacaactcttacaagaaaatttcctattggaatatttaacatataaaatggttaaaaatattgaaatttaaggtagggaatttttatttttattttttaaaatcatattgctttttgaaacaagaaaaataatgatattgaaaaaaaaaaaatattatttgggagttgagatttataggttgtaccttacaattgggagatggtaaccatttttcttttgcatgaagaaactagaggcgcagagagttaagggtccaaaaagacaacacaaaatagtagtcattattaagggggaatgaatcatattgattaagaagactagattgagatacaagggaaattgagttgttataaattgaaatgacatcatcggtttttggagggaccttttggattattagggaatgtaatttttttaggaggagctttttaggtagaaaatgttttaaagaggttatggttttgtctataatatagataaacaagtctcaattatttgaataaaaaaaattatttttccaattttgaaaataaaaaaatagggttatatccaaaattctagtagttgatccacaaaagttttaaaatattaacatggtccaaggtttgaaatttcaagaatatcatacaatattttaataaaatttcaagttttgagccatgccaacattgaaacataagtgaaatttggactagtcataatcaccaatatgttatgattttttagtgtgatgattttctttccatttgatcatcatcgtcaatatttggatgattttatggatgacttctcttgagtaagatgagtgctttgcattattaaattaagttttatttatatattattatgtgtacctacacctttgttcattaagacgaacgcttcaaaagatttcaaaagatttccaagtccacaatatcattatcattaaaacaacttaaccatatttacctaaataatccttagaataaatcaatatggatctcatatcttcaactcttaacttaaaagttttaagtatgtaaggtcgaattcaataatatttagaaaaaaaaattcaacttaaactaatcagtttaatatcgtaacacattagaataaaattatcgacttaaactaattagtttaatactgtaacacattaaacaacgactcttaaagaagcagtcgaaaataattaagaccatctacaaaatgctatagttctttttacgaaggttgggtaaactaatcaatttcatcatatcataaggttgatgaaacatatttatatttaaaaaaaatggaaataatatgaatctaaattctattagtctttattttttgaatctaaatctaagttttgtctatctgtcttatttctatgatttcgtgtccttttttatctctctttcttgatagttttatatcaacttttatccttgatggtttagttttgtgttgtcttctctcttttcttgatagttgtagtttttcatcttctactacttctttgaacatgtacctttcctatttctactagtttcataatatctcttagtttgaacttgtctgcattgatcattttttggatgatgcaagtagtttttatgcaaaaattgaaactttggtttttgattctcttgctcatttttctccttttatggctactttaacatcttatgagattgtgaattctcatctcctacgttcttcttgacgtcttccaagcaatgattgagaaattttcaactttgtataaaattgatacttggtatttgatatttcgattaaacggtacaaaactcaattaattgctaatggattttcctaacaatatgattgcatagttgttttgaaaatttgaaatttaaggtagggaatttttatttttttattttaaatcatattgcttttttaaaacaagaaaaataatgatattgaaaaaaattaatacgatttgggagttgagaatttataggtttgtaccttacaaatgggagatggaaaccatttttctcttgcatgaagaaactagagatacagaaatttaagggtccaaaaagacaacacaaaatagtaatcattattaagggggaatgaatcatattaattaagaagacatgattgagatacaagggaaattgagttgttataaattgaaatgacatcatcggtttttggagggactttttggtttgttagggaatgtaaatattttaggaggagctttttaggtagaaaatgttttaaagaggttatagttttgtctatgatatagataaacaagtctcaattatttgtataaaaaaatatatattttttcaattttgaaaaaaaaaaaaatagggatatatccaaaattctagtagttgatccacaaaagttataaaatattaacatggtccaaggtttgaaatttcaagaatatcatacaatattttaataaaatttcaaattttgagccatgccaacattgaaacataagtgaaatttggactagtcataatcaccaatatgttatgattttttagtgtgatgattttctttccatgttatcatcatcgtcaatatttggatgattttatggatgacttcctttgaataattttatggatgacttcccttgaataagatgagtgctttgcattattaagttaagttttatttatatattatt

SEQ ID NO: 10857 - DNA, 7101 bp, Vitis vinifera
  Intron number 6 from transcript GSVIVT01012038001 (locus G SVIVG01012038001) derived from phytozome v7.0 (chr-ID chr1 ; pos 1938643 to 1945743)
gttgggccttctattgatattgaagctgataacaggtcatggcctttcctttatttgttctatttgtgcttgtcatgctagctttcttatgattcctatgaggctaggaataactattcttaaaatggtaatcttattgtttgccattagcttatcattcctatgacattggaaattgctattcttaagatagtattcttgttgagttgacgtcacatacatacataaatattaagtagcaccatagagggggcacatcctatgtatacaagcagtacacaccaacaaaaatcatttacaaggatggcctacaagaacaagctaagctatccacaaggaagagcatccaagagatataaattagaggggctctccatttctaatgaagcataagagcacttcaatagtgatttaatgacgaattccttcaatctctgatctaggaactcttcataaaaaatcttgcagttctactcttttgtatagaccaaaattagcaaatcggagccatacaccaaacaattcttctcatctgatctaacccctaaatttccacttgaggagggggtttcttgctgaaaccggaaacacccatttctagctaaagagccatacgccaaacaattcttctcatctgatctaacccttaaatttccacttgaggaggggtttcttgctgaaaccggaaacacccatttcaagccaaagacttctaagaggaaaggtccataacaatcgtcttatcacaatgaatcaagatatgataagttgattcttcattgtctttacaaaggctacatctattgaccatggaccatttcatcttcattaacatatctatagttgacaagttttagggtcttagaaatataaaggtcatcactttccataaaactacacaacaatgcaataactgagtaagttaggatttccttatgcatcgtttggacagtttggaaggaaaggaacatgattgcttttgaaaatgaggagcttttccattgaagtttgaaatacttttttgtttgtagtctgcgtttatggactaagttgcttattgatgacggtcctttatctttaataagctttattgattggttggttcttgttgagggtaggtgttgttttttgtagtccctctttgctctttgttttgccttttagcgatcagtgtatacttcttatgtactttaggacgctcaattaacgtttcctttttatatacacacttttattttacctatccaaaaaaataaaaacaaatgatgtttgtcttagatgaggtttgtggatgaaattagtgggttggatccagtcatccttcgtatatatatatatatatatattttattttttttaataaaaaactatatttgtattttattagataaagcaaagatttagaaaatagtgctttacaaaggtctttatagataaaaaaatatttggcttccaagacttaaggaatttgtccacaaaaactcaaaagggcatcaaattttaaggaattcaaatagagaagagcctcattgtgaggccaacttattagcttcgtgatttgttgatgtagatttccatgagaaaaagctaaccaatcctttgatccacgatcctatgcacccaatggtcatacctctatgaacaaagtaacaattttgttcattctttgaaaatttttagaactagaaaacacttgttcttaaattttctaatcttgtttttgagctatcattggggagaaccaaaaaggttggttggtttccattccccaattcattaggaaaaaatgatctttttgcatcgtatcactcgtcaagtctccttcaagggaattttttttggaggattgggccaaggttttgcatagaaaggaaatatgatctttttttgagtactatttctaaaccattttttttttttttacttttgtggaaattctgtttttgataattgaaaaccattataggagcatttaacatgcattttttgattcaaatcctttaaattctgggaccatttgggaaaatattggagtaaacttgcttccaatttttgagacctttaagtaaaacgagtattttggttatgctaaatttgacttcctttgagaaagcctggataatccctcccttgcaatcttatatgagtttgccaacactcagttggccaaaattatgtaaggaaacattagtcaaaattgagttttaaataagataggcgaaagagcccatcacaccagtatattgatcacttctttatggtaaggcaaatggatcttcatgtctataaagaatggtaaacaaaactaccataactatttggctactaaaatccattgaaatgttaaaactagatatttttccatagtttgtgcactcatttttcttatattaaggatcttgacattcatctccaataaataactagcaagctagctaaggtaaccctttagatttttactaaaaccttaagaaggatataaccaacatattagagacacctcaaggagctacctaggctaacctactattgaaaatagtctttgccataaagagtttttatttattgttaataggttgcttatttttctttttattcttttttctctaagaaaattttaggagaattagatagtgggtttcactttcccttgttttttcataattgtaatggaagcctttgatggttgattatctaattggaggaggacaagtaaatggaaggcaagaaaggttttaggcaagactagagcaggaataggaatgtcatatttgcatatctgggggttgtgggagctaggggtataattggatgtgtggtagtgttatgggataacatggtgttggagcttgttagaatggaggtggggatgttttcaattttgtgttggtttaggtcttgtaaagatgagtttgtttgggtatttacttgggtgtatgggccaactaggggaagggagggagggtttttgggctgagttaggggctattgaggagttgtgggatgatatgtggtgtgttagagggattttaacatagtctatttttcgagagagcgtaatagaggggagaggttgactatggccattagaagattcttagatgctatggagaagctagagttacgtgatctccacttataagggggtctttttacttggtgtggtgggacaaacaactagtttaagtcaaggttggatcggtttttggtgtcaaaagggcaggaaagtcaagcgggctaatgcattttatgttgctgaggtctgtgtcgaacactcttcaattctattacatgggggaaggatgaggggaggaagcattccttccaagtttaaaaacatgtggttgaagatagatggtttcaaaaaaacgtgggtaagaggtgatggatgggatatcatttccatgggttgtgtagtttgattttggcctctaagttgaaagctttgaaatcaattttgaaggtggggaatagagagggttttgataatgtatcagtagagaaggagatggcttttaatcaaatggaattttgtgactccaagaagatagtatcaattttttctcaagaggaggttgtacctataagggtagcaagagaagagtattgtgagtgtcattggaagaagtttctagaggcaaaaatctagagagatttggttgaaaaagggtgacaaaaacactattttttttgctcatagaaaaagaaactaaattttgaaaacaatgttttttgctttgtgctcacctaattgactaattactagccactagagtgtaataatcaatatttggtctcttgttagacttggactttgtctaattagcatctaaaaaactactaagaacattcatggtttgacttttttttttttttgttgataactggactctcggtggggacccaaacctcgagcccaagcccgcaacaatcagcaccgaataaattagggtatcactagtggcaagattcaaacttgggaccatgtgccttttactgggaccacacctcccaacattcgccttgaccaattgggctaccctgatgggctattcaaggtttgatatttttttttataacacctacaccaattgtctatatgagatagctagggacttcataagttacttctagtggtttcaatgcttgaaaaataccttttcacttcctttatgccttttacatcactgctagaaggaatcatatcatctacataaaaataaggatgaatcctagaatgtgctttatgaaggtcaaatgattagagcaaagaaactttgctagaagtaagcaagatgtggtctctcaagtttgaaagccaagtacaccaagaacttcattcaacttatcaaactaggctctagatgattatttcaaaacataaattgctttctcctttttgctagccttgctcgactcttcttgagtagcaaagcttataggttgctctataaagatttcttcttgcaaatcttcatgtaaaaaaacattcttaaaatgaagttgatgaaatgacaatcataaaaacaaccaaggatataaggattcaaatagaattaagcttgacaattggagaaaatgtcttaaagtaatccactccatatgcttttgtgtgtgtgtgtgtgtgtgtgtttatttatttactacaaaaataagatgtattaattatagataaaaaagtacatgagaagaatgatgagtcctccccacaatcacaaacaccttattaaaaaaactgaacacctctatacaaggaggtccatacaaaaaggttaagtccacataagaaaatacatggatgtcatcttttgaattcttaactaagctcttcttattgttgtcttgtccctttttatctatacattgaatgccaattgaggttaataacattgggaggaatgccttttaaaagaattggtataagagggtaaaaagaaggataaaagtgaagaagatcccacgacgtctatgatgacctccacttatcctcaaagattttagtatttctctcttactgcataatctaaagcaaagtgagacaaacgattttccatagagccttacttgtaattgatctacccaaacccctatacgaaatgatcattatgtcatgtatattccttggtagaacccaatccatcccaatttatctgaatagattgtgcacaatgccaaaggtccaaagtgagtagacaatgaagaaagagatggtgaatcatctctccatttcctatggataaacaataccaattaggactaaggattcaaaagatcttttcaattgtagcatgttgatatttaccttcttgtgtgctactagtcaaataaagatcttgaccttagatggggttttagattttcatataaatttggctagagagaaagggattggatttgatatattggacaatgccataaaggatgatttgactaggaataagcctgaataggtcaatgactaggttttagcatctaggatagatggagataagtgcataggtgtgagatatgacatgggtctttctaggccctagaacttcctgtcaatgaggttgtgatagaaattaagattctaagaaaaggaagaagagttgccaagaattgcgaatatggtaagatttttaactctagcaactttataaaacttgaaaaatgtgaatgcaatggttgatccccccaccagaaatcttcctaaaaacaaattcttatcctatcatccgctacaaagggagagggtctagggaaggtttggaacacttgtgcaatggccttctaggggcattgatgtgactatatgactagaatgttggagttacatccattaggatgtattcataaatgcttataataaactgatgtggaaggtagaactttccctggggaacctccaaaccacctacctaaaagagcacaattccttagagaaatcctctaaaagtgtaaaccactccttagttccatacactaggtcctaactaataagatgatcttttttaccctccccagatgccaccaaagaaaattcattagaaaattctcaatctttgatgttattgatgttggaatcttaaaaagagataagaaatagctagggatgtgggattagaggtgaagttggaatgtctttgaaatagaatctgtaataaacggaatgagaatagaatggatatctacctgctggttactctgttgtttaattctctttcaaacatatacttggagtggttgaagaggttattattatgtgggttagaattaaggagtgagtaactcaagatcaggattaactgcttaatatatggagttattctcctaagttctaattcaagaaaaggataataaaatattctattaacaaaaagaaaatattgtgctacctcaaaaggaaaatataattagaaagtttaaaaggaaagaagaatcacaaaacaattctagccagcagttcagtgatacaattctaattttataatcattaaaaattgaattgctggagattgttttatcctgttctgcagttctctttctctctctctctctctctctctctctctctctctctctatatatatatatatatatatatatatatatatatatatttattacatttttgcatggtgcatgtgggttttggaggcttacaatttttcctctcagagactccatttagaacacttcattttgattttaagttgacaattcattcatgctatttgatcctatacttacattctctatgaaaattttcagtctttggtgattctaaatttctgctcttttggaggttgcttaactttgaattaggattatcctttgtttgtgtgtgacaaacttgagtttttgtgtacgtgtttaggatctggaatttgaatggcattacatatgagtttttagaagtttaacctacttctggaaataagatagctggaacttaaaaattttgacaggggatgagtgtgttgctgggggattcctattcatggtgtaactcttaaaaacctttagcattaactgatgtccggcaagctataagtttgctcctcccttatattgacatatataatggcgtcacagggtcattttggggaagataccaac

SEQ ID NO: 10858 - DNA, 4001 bp, Vitis vinifera
  Intron number 2 from transcript GSVIVT01023615001 (locus G SVIVG01023615001) derived from phytozome v7.0 (chr-ID chr1 1; pos 8061615 to 8065615 reverse strand)
attctttgaaggtgagatcaggattgactctctagtgactgtatgagcaatggtttaggtgccggtgaaactgcagttattaactagagttggcatgatattgggttcttaaattatatgttagtcatgtgaaatcaagctgtgttaagtgcattatattcccccttatatagtattgataaaagaaactgaggaagtgttatactcagaaatgaaagtttgatgtttgctccattatcaaagttcattcatgaaaaagagatcagcatgagttaccttataacattagcatctgaagtgtttaatgagttgcccttgtataatatgggtacaagatagtcacttgtataaatgggaaatggtctcttccctttgtgcttaaatgtagtcgtcaccaattaggtggctggaatttgattctgataggtgctctcttgggactggattgaattggtcttatgagttatctttaaagaccactttggtgaagccaagttagctttctcttggtcagctggtcatgggatgactatagatgcatgttcttgctcttcttgaaggccctagagaacctaagggagtaggttggatgtaatgtaaggttgaagaacttgtctgctattagtaagtgggttcttagaggataatccattcaatagaggaaacttaaaaaaaatggaaattgagtttagttggattctttgttctcctgatgagaggaccttgacttttgaggagttcagatggaatattaccttccttgatgtaaagtctgtctgggttttagtctttgtgcttttccccccttttgtccccttcttttatattagtgcactgcttttatccttccttatgttccttccttgtgtaataaatgtttatattgtattaaccccctgatacagatctagtattgtttatttcttcctttagcctaagcttataaaatataactccatccccttattattttttctcaaccttctctcttttgcaggaagcaatggcatcgtatttttttagtttaatctttcacagccatcttgtttcaattataaattggaatttattgttgttgcctcttttaacgacatatatttacatactgtttgttatgatatatttgactatttgtccaagtttcttattcttttatagattgttatcttcagtggcagaggagtgataagcccagagggggcaagtgcccccctgaaaattaggacaataaatgccagaaatccctttgccaaaggaaattaaattctaaagatatttaaaaaaaatgccccctattacttataacaaaaaaatgctttaaaagtgtctccaaacgccctcaacagaagccacccaaaaacaattctccaaagttaaccaatatatatttatacataaaatatacttgcctaaactataaaaactcacttgagaattctcattcagttgcttttatatttttaatctattttatcttttccttgaaaaccttaaaaacttttcaatgaaattttcttttccgaagaattattttaaaatattttgaagtttttccttattctattatttaaattattaaaactaataggaattgtatttataatttttattattgaaatcaataattttttaataaaacttgcaattgatatttttaaaactttttgaatgttttttcttattctattttttttaattataaaactaataatacatatttgtaatttttgtttttgaaattaatgtattttttaataaaaattatttttctttttttcaaaattacctaaattaatagattttttttctaattttttttttctcctaggatttttgaaaaaaattagaatttttttattgaaaaattgggatatttatttatttgcaatttatatggcacaaaatatgtataattttataatttttacctttttttattttttttccactaatattttactataataatttatgttatagataatttatccatttaatatgtttaacctttcataacaatatttaatgaaatcataatatgaattttttagtttaaattttttatttgatttatatcattaaacctgccaattcttgattcacttctgggctccgctactggctaagctgccactgaagtggtgggtagagaagtatacaatcaagtgattagcagggatacttctgatacattgcctatcatttataacattttcttattgctgacccgtaattattcactttgacatgtggtcactcatcccagctgtttgtgtttgcaaaacaaattctaacttttttagtgtttcattaaagttaattaacttccctcaactaaaaaaattcgtaacttttttagtgtctctctaggttccttctttttttcttatgggtacataatgtcacagacgatggattggctccacttaatttatgtttgctggagtttttggtcctttatgaacattttagaagtttcaatgttgactctgaggagtgaggcacttataggaaaaaactaatcttagagaaaggaaaaggtgtccatacacaatttgtgccaatagactttatactgttttttcttttaaagataaaaatatgcattatacataaacatataacctaaagagcaagaattagctgtaatgctctctgccttccttttgaagattgcagtagtacacattcttctaaggcacagttctgtttccttcttctttttttcttcaattatctctaatactaattaattagaagaggttagactcaaatctgtcccttctctggaacctgactctccctgattctcctcattccacatttcttgttctaaatttttgcaattataaattttgagttcaagcatgatatgttcttttaaatattctgaatctctaaaaatattgaatatcatggtctttcaatttgtaaattatgcatacctctttaagttatgtctataggcataaatcccatatccctttgatccagcctatcctgttgtcaatgtaagaaagtatacagtcactggttttatcctttcagttgtatgccatgtgcagttcttgacacgtgagagatttggagcatcactccaaggctactttatctagaggtaggtattgttgctgtgtcaagccaaacatcagttcgaataataaggggaatgcaatgcgcttatatgatgtgggacagcctcccaacaaaacagtttgaaggacgagtagaatgttcaatttgaagtgagacagcagtggggaaaagagacttccaattttcacttcctgtctcgttgaaatttgtagttatctggtggaagttgcatgaatcctaatacctgatggtggagctaaatgaaaaataactggcatagcaataatatactaggaattgaaccaattacttgctcttactcatgcagtcatcccatcttcttgtccctaaaaagaatatttgagcattattccctaggatgaaaaaaaggctattattcatttatctgatggatacttagcctgagtgatcttgcaagtgacctgccttgagttgtggctctaattgctgctgctcaacagtatgctctatgctgttgttgaaattgttttagctgcagctgccttgaccattagtcccattccccgggtctgctgcaatacaaagtgaattgtgttggtgtcgaaattgttttaactatcaacttcagatcctttgcttgttctttgaagacctgcattattacttaatctgtattggaaaatgttgctagatatgtgtaactctatgagatccttggaaaaatggagctttttaaaaaatttatgttgaactctgatcctttgcttgttctttaattttgaggaccaacattgagcacttatctctattggtgaatgttgtttgtgatgtgtaactctatgtgatccttgactaactgtagcttttaaaaaaatttatgttaaatgaatgatgtcctgaaatcattttttgtttgttgtagt

SEQ ID NO: 10859 - DNA, 1911 bp, Vitis vinifera
  Intron number 3 from transcript GSVIVT01027622001 (locus G SVIVG01027622001) derived from phytozome v7.0 (chr-ID chr1 5; pos 14981236 to 14983146)
tgtactaagagaatattctgcaaaggaagccagttgtgaagttcacccttcctagctcatctccaagctctttgatgacgcatctccatcaggaccagcctcacccgtccatgcattctttgtttttttggctaaacttggtaagattctcaaaataatttccctatcagcttggtagatatggtcaagaaaaacagcaatcagttgacaagtttactaatgtaactggggttctcttcttgatgcagaactctaggttttgcccctgtaatttttgtaatcatttttgttcctcaacatttgcccagttaaagagtaccaacaacctgtaggcttgagctttgtaaggagaactctacggctatgcaaaagtacttattgttacatgaaatgtaaagtgcttctgtctatttttggtttagcagttttcctcttctgcttacgcagttttgcatatgaaaagccattcaaaaaaatttgccccttttgctcccattgcctatgtacgcgcttttgtaaatggcattatgggcctattagagttcgtttgggcctacaatttgttaatccaatcttgggcccaattgcaaacatgcacgcccttaccaagttttaggctatggttggttcctagaatgtaccaagaaaaaaatgttaaggcaaatagttttctcttgttagatttcactatagaaaatataagaaaaaataaaatatgattaaaattaattaaaattttatatatttttaaattatttaatttttatataataaagggaaataagtaaaatgagttttaaaaaatatataaaaataatttattgaatttaaatatattttttattttcctttcatcttttttttttttcaaaaaccaagcatggtgttaaagtaagaaaaggaaatgaaggagaaggagaaggagaattagaatcataaggaaatggaatgtggattgaatagaaattaaaattaaaattttaattgatttttttttataaaattaacatgatgaaaatgatttttttttgtgttattaattaattataagaaatgataatgagttttctacatttatcatatcattcttctaaaaaaactatattattacttttaaattaatttttattttaatattatattaatatatagtaaatgatattaaatatgtaattatgaaaacatttattaaaaaaaatatttttaatattgaccattctttaagaaactaactagataggaaaatgcttaaagttataaattgtctacaaaagtttaaaattctaattagtgataaatttttcaatacgaaacaagaatggtaggtggtgttttttttttagttttttatattaagttaaaagtaacttgctaatatcgattaatataactaaatcaattatattaataacaagtttactttaattatgttattgatataatatgttttttttttaggtaaatataaaaagtcaaaatatgtagcattttttattttaaaaaaatacaaacaccattgtagtgaggagaaaagtttaaaggcattttttttttctaaaattcttgtataatcccaatcggaaatggtttttcaggtctacccgatcaaaccaaatttttgaaaacgattgaaaattacttctattgaattcattttaagatgaagaaaagagcccaataacaagataggattgttacatattttagaattatggtgtaaaagtaataactttgttataattgggattgaaaattcaaattgttaagagttttaagcaagggtttagaaataaaagtttgggttacaatataatttaattccaaataactaagcataattaaaaataactcaaatataaatgtataacctaattttgaatttcactagggtttaaaaaaaggaataaataa

SEQ ID NO: 10860 - DNA, 7285 bp, Vitis vinifera
  Intron number 1 from transcript GSVIVT01019236001 (locus G SVIVG01019236001) derived from phytozome v7.0 (chr-ID chr1 5; pos 2952208 to 2959492 reverse strand)
ccttcggaacaccaaacatacgatcgccagttgttgttcttgttattcaattttgatctccattatcaccaacaatagaaactgaacatatatacatatatatcaatcctgaaaacatgtcatgatcaccagatagggaatgaacgaacatgagtccattttgcttttgttttaaacaagatatggatcttctaaggctgtggagggcaccacctctttctgaattctctctgacgatgggagcaggagagaaacgggtctattcttatttcaaaatgatgtaatgaaactaaacagacacttagtctttggatttataccctcctgccttagggaccataccctttggctattgggtctcacaaatcttaggtcccacaaatcttaggtccatcatctaaggctcgtgatggctttgggctctacacataaggtggcccatactgtggaaaatcgatacaaaacaaatatcaaaaggcgaatagcttagtcatgtaccattgttaaatatgtgtgaatccatatcttaacaatctcccacttggaccacacatattacaaaacaatgttcatgatagtactttattgagctcatcttgctattttatcttaatatccttaaataatcctgtctactagttatgctaatataggatcaaagcggccttcgttaatcataattataactagacccatcaatgatcacaatattaacaaaattagcaacatggatcaagtatggatgtgtagcatggaaattacatagaatatgatctctaatatgtctatttccgattggtcccactttatgactaaaaaaatagtcaaattccattttcaacacttgatgttaaactgcttctgaaagtcatcatttcaattcagagtattcaaacacaatagtcttttaaaatcaaagtttgtacagataacataacataatatcacatcaagaaaacaaacacaaagtctaaatacaaactcccactatactagcacatcatcaatgtgtacaacacccatatgtgtgacatgctcatgatatactttgggtggcaaatccttagtgagcagatccacaatcatggagtttgtgcttatgtgttcaatcgatactcgaagactctgaactctttctttcacaaccaagaacttgatgtcaatgtgtttagactttgacgaacttcggttattcttagaatacaattctacggctttattatcacagttgattctcaatggtttctcaatcccatcaacaattcacaactgagtgataaaattcagcagccatatcccatggtttgatgcctcgtagcaagctatgaattctacctccatggtggaagaaataataagtgtttgtttaacacttttccatgaaactgctcctccagctaacatgaagatgtaacttgaagtggatctcctgctgtcaagtcatcccacgaaatcggagtctgaatatcccatgatctctaaatgactggatctacgatatgtgagcatatagtctttagttctttgtaaataccgcataacccgttttgcctttttccagtgatccattcccgagttacttaaatatctacctagcattccaacaatgtacacaatatccggacgcgtacaaacttgcgcatacatgagacttcctattgccgaggcatagggaaacttctccatatccttcttctcaagttcatttttcgaacattggtgcaaactaaatttgtcgccttttgccacaggcgtgtctcctggtgcacaattggtcatgccaaatctactcaaaactttatcgatgtaggccttttatgatagcccaagtatacctcttgaacgatccctatagatctgtataccagcataaaagatgcatcaccaagatccttcatatcaaatttactagacagaaatcgcttggtttcatgcaaaagtcccacatcacaacttacaagtagaatatcattaacatataaccccaagataatgaatttgctcccactgaacttgaggtatatgcattgatcaacgatgttctccttaaaaccaaatgaagtaatcacttgatcaaacttccagtaccattgtcgggatgcttgctttaaactatatatggacctttttaatttgcatacaagttgctttgaatcattagactcaaagttctccggtcgcaccatgtatattacttcatcaatgttaccattaagaaacgcagttttaacgtccatttgatgcagttttaaatcataatgagctacaagtgccatgatgattctaaaagagtcctttaacgaaaccggtgaaaaggcctccttataatcaatgccttccttttgagtgaaaccttttgcgactaagcgtgccttatacctaacaatgttgccttttgaatcccgcttggtcttaaaaatccatttacaaccaatcggttttacaccttcaggcaactctattaggtccccaacaccattgtctttcattgatttcatctcatccttcagggcttctatccattttttagagtcagaactttgtttgacttgactaactgaaattggatcgtcttccagacccatgtcaaactcatgttcttagagatatacaacataatcatctgaaattgtacttctcctttctctagtggatctccttagtggcacttgtacttgaggttcttgaggttcttgagttacctcttcatgaacttgaatcggttccataactagagtaagaggaatctcatgtgtgtcttgaatttttgttatcgactgtacattctgaatagtgtcatcaaatataatatgaccatgtccagtcgtaataataggaatactaacagattcctcttcaaagaccacctttcttaacggttctctcccacttaactcaacatcctcaatgaacttagcattgctcgtttcaaagaagaatctagttgaggggtcataaaatttgaagcctctcggcctttcagaataccctacaaagtagtagctcactgttttggagtccaatttcttttcatttggcttgtacggcctagcttcaactgaacaaccccaaacatgcaagtgcctaatactaggtttcttgctagtccataactcatatggggtttgggctactgctttgcttggtactctattcaaaatgtaaactgcagttttgatggctttgccccaaagtgattccgataaggtgaaatgactaatcatgcttcttaccatatccttaagagtatgatttcgcctctcagctacaccattttggctcggagtccctggcatggtgtactgaggaacgataccacactccatcaaatatttggcaaatggccctggacattgttcaccgaatccgtcatatctaccataatattcacctctacggtcagatctgacaacctttattttcttgcttagttggttctcaactttaactttgaaattcttaaacacatctaatgactgagacttctcatgaatcaaataaagatagtcatagcgtgagtaatcgtcaatgaaagtgataaaatattgttgtccattccaagaaggtgtaggaaatggaccacaaatgttcatatgtatcaattccaagacgtcactgcacctattggcatcatttttcctcatatttgtttgtttacccttaatgcactctatacagacttgaaagtctgagaaatcaagtgggtcaagaattctttctgacacaagcctttgaattcgttgatttgaaatgtgacccaaatgtctgtgccataacattgatgaattctcatttattaattttcgcttaatgccataattacttgaatgcaaggtttcatttccattagtggcttttatgttcaatttgtataatttttatgttagactacctgtaccaataacgtttgaatttagataaagactaaccattccatttctaaatgaacaacaatatccaaatttgtccagacatgaaacataaattaaattccgtctaaatgacggtactacaaaagtctcttccaaatccaaagtacatccagagtctaactgtaatctaaaaagactaatagccttgactacagccttgttgccatttcccacatagatgtatctttcaccatcagttggcattcggcttcttaggcaactctgcatcgtgacacttatgtgagtagttgcactcgtatctatccaccaagtgtcaataggcactacagctaaattaatttctgaacaaacaaagttgagaagtgcacctttcttttcaagccaagcagcgtatttggtacatgtcttcttcatatgaccaacctttttgcaaaagaaacaagtaatctccttattttgtttcttctgcaccttctgctttgatgtcccagaaactgcagtttgttttcctttattgtccctctttcttttcttgttggtaccaaatccatgagatgtggaagccaagtgagcactttctatcttctcttgtttcaatctctcttccttttgtacacactgagcaataagctcattcaaagtccatttttccttttgtgtgttgtaactgattttgaatggactaaattgtgtaagcagagagatcaagaccaagtgcatgagtatgtcttccgacaactctaactttagtgccttgagtctagtcacaagattagacatttccataatgtgctcccttatattctctttccatttataccgcatagagacaagcttactaagaatagtgtttgtctcaaccttttcgtttgcagcgaatcggtttgctatctggtccaagaatgccttggctcgggtttccttaggtattgcaccccttatagcttctggaattgagtgcttcattatcattaatagactcatgcgattggatcgctcccatttttccataatagacctttgctcaacaatgctggcactagtaagatctgaagggcgatcctctcttaatgcatagtctaaatctatgcacccgagcacaattataacgtgctccttccatttcttgaagtttgtgccattaagcacaggaatgttattgacatttgcaaatatagaagatgttgaattcataataataaagctcataatcaatcatataatcatcacacatacatgaataaataaaatttaacatatatatgcatgtggacatataacaatatacctagcacaaacatcaatattcagtctttggatggaaatattaacttgttattggtatcattttcaaaattaattcataaatattgacaaaaatcaaagcaatatgtcggtctttggactgacatatagaatgcaagataattttatatcacatatttatgactactttatttattattatataaaataatcttcctttaggccgattattttatataataataacatgcttacttatttcaaaataaataaaattacgtaacacatgttactttggcaacaaatatacataacctattcattttaaaatgttaaacacaaacgtaacaagaaataatgaattccaaaaaaaaaaatacaaaaattcatcagaattataattttattggtataaaatcatcaataagcataagagttatgtagcttagttggttgagtgcaaggctctcaaccttgtggtcatgggttcgagctcctttcagtccgcccttcctctttttacagaattgtacaatttaattggcttgcccatcatatggacgtggcttatgcagtggttcacttcccatatttaagcctaatagggtggctcattttggcctcattttggccaaaagaattcaggccatatttaagcacttaaccttcatgggccattattccaattaattttcttttttatcttatcttatatagcctcgtttgcagccgcctcacccttggaacagtaccaaaggtgtcttcgaacgacaccggcggtgaaacgccgccgccatcaccggaacagtgatttcccatcgccaggtgccattgtagcggcgcctgaacgacgtcgtcaactaggaacgacgccaaaacagcatctttttttatcgcctaaaatggcgccagaatggtgctcttccaggcggtgttagtggcgcaaggcagatgaggcctgcaacgccttctctaaccaccgatctgcaaaaataacaacgctacagcgaggccaaaatggtgcaacagtggcaccaaaatgacgctcctccgatcgcctaaaatggtgctgctaatggcgcctgaacgactcttccaatgatgtctgaataacgcctccaatggcgcttcctatggcgcctgaacggtgctgcaaatggggcctccaatggtgcttcctatggcgcctaaacggcgctgcaaatgacgcctccaatggcgctgcaaatggcgcctccaatggcgcttcctatggcacctgaacggtgctgcaaatggtgcctcgaacgacgcctaaaaatggcgtttccaaaggcgcctgaatggcgccagaatggtggctgaggcacacgttgaatggcgcctgaacaatgcctagtatggcgcctaaaacggtgcctaaagtgcacttgaagtgcgcctgaaacggcgcccctcaccgacattggatggcccttgaacggcctctgaacgcctataagaagacctacaacattgccttcaatacctttttttattattttattggcccaaattctttattgtttccctgacctttcgtttgtgtttttaaagattgtttttggtgaaaatggaatcagaacctcgctctgataccaattgttattcaattttgatctccattatcaccaacaatagaaactgaacatatatacatatatatcaatcctaaaaacatgccatgatcaccagatagggaatgaacgaacctaagtccattttgcttttgctttgaacaagatatggatcttctaaggctatggagggcaccacctctttctgaattctctctaacgatgggagcgggaaagaaacgggtctgttcttatttcaaaagaatgtgatgaaactaaacaaatacttagtctttggatttataccctcctaccttagggaccataccctttggctattgggcctcacgagtcttaggcccatcatctaaggctcatgatggcattgggctctacacataaggtggcccatactatggaaaacagatacaaaaaaaatatcaaaaggcgaatagcttagtcatgtaccattgttaaatatgtgtgagtccatatcttaacagttctcacaagtccaacatcaaaaagggc

SEQ ID NO: 10861 - DNA, 1910 bp, Vitis vinifera
  Intron number 3 from transcript GSVIVT01026120001 (locus G SVIVG01026120001) derived from phytozome v7.0 (chr-ID chr1 8; pos 24340573 to 24342482)
tgcttcctctttttgctagtaagtcaaaatttatactttcatctttcactaattgattatttaattttgttttccatttgttctcaacacagtgtttttaaagaatgcgcgagattgttatatgtgcatatcttagtgtgttccgtggtttaatatgcaattgtgtttccaccttagcttttttgctcccatttttttgtgattatgtagtcatgggttcttttgctaaaacccagaatgtgattgtgtcttatacatagtttggatgctagaatgttctgtttatatttatcgtgtcttgctacacaaattatttcataccaaattaatgatttcctgtataaatgattgtgccaagtctattatccattttttgcgaaatactagtggaatttatattgtgttaatactacatttttttgaattttttttttctttttttttggttaaatattcattgtaaagcaccaatccactcttaaggggtaacttaagtagtttctcttaccatacattataagttttaaaaggagttgcaaaagtatcttgtaagtatcattgtgttgctaacttgctaaaaattgttcttatcaaaaagtggcttatatgttaaggacttaggaaaaggtgtcttgtaaaaatatcatatgagaagaatgacaagagtaatgttcatcttctttaaaaaaataataataagtattaactagtttacctctattaattttctttcatttgtatcttagttgggtgataactgataaggaagttctcaattttatagacttgtataagaaattgacgttaggaaaattttcttatgagtacaatgagaaacctattgtgagatccatgtgggacacatgaaagtaggtggtgaaaccttggtttagtaatcatgttttctcatgaaaaaaaatgttattttcccatatttcacttgccacttctccaccagtttcttttgatattatctacctatgcacatttatatatcatcattcacacctattaagaaaaaaaaaaaaaaaaaaaatctttactatctttcatcttcttttcctgaacttctaaaaactttgtggcttctctcttattattatttttaatttcatgttgttccatgtgatcatctttttattagcttcttgggcattcaaaggaaaatttgtcatcttatcttaccatttcttcaaatgaagggctgatttggtttgacttattataaaatcgctatcgtatcccttattcttttccaatgtgttatggaatttagaggaagctatgaaaagctccctgagttgctcccttcctttgtgctagttttgtgagattgagtcactactatatattttgatactcaagttgaaattatattacacccatcatgtctttccggcttgttcctgagtctatttagtttcaaatcactgtgatttgaaactagatagccgtcgatgtcttgaaaatataggtttagaaaaaaaggtattaccttgattgattgaattgaaagagactccccggtccgggagacaagttgaatttgaaaattgtaaacaaatattttagtgaatttgttgactggattagaaattctagcccaattttaagggtattaaatgcacactattgatttgtggtatttgtttctttccagctttctgaagtattgggggacaattcattctttaagtacatgagacttaacttagtaggttaaagtcattttttttctgtttatttaacttaatattgaagttgtcagaatcatgatttatatattagttgttttagttatagtttgaaaagtatttatctcaccaaatggagacttcttatttgatgaaatattttttttcatcatattctcagaaaccgggagcatattaagtggacttttaaggtat

SEQ ID NO: 10862 - DNA, 3928 bp, Vitis vinifera
  Intron number 3 from transcript GSVIVT01029830001 (locus G SVIVG01029830001) derived from phytozome v7.0 (chr-ID chr8 ; pos 249008 to 252935 reverse strand)
ccaatccaaaaattctgaaaatatattcaacacaggtctttctgtaatttcttaccttttttttatgttttttattttttctgaatagagttgaatgcattttctaaccatctatttcatccaaagttaatcaatgaattttatagagaagggtattaggagaaccgctgcctccaagctcctgcatgctccctttgaaattgaattttatggcttatattccagtacatgctccacatcttggcataggagcatatttagttgaaagtgtgaagtgcttacaatcttaaacagatggggatatgtttcaaatagtgataaggcagtgagggtgccttcatgataggtttgccattgtgaattttcatcttgttggctatgttgaatgtttaaatctttttgatgtttgtaaacttctataagatcttgtaatttttactaccaatttagtgtatgtgtgtgcctcattatgcatattggttgcaatttcccactcatacacatataaactcatgcattcttatgtataatcaacaatctagctcatgcttattcagttccctgtagagaatgtttgtgcttagttccctaaactcatgaactgtcacagttctggaaatgaagcagcaaagaaggaaaataagaaaaggaaatgcacaaatgaattctaaaaaacaattagtttagtgagggaaaaaataatttccttaagaactctatgtatctattattattattttgtaagtaaataaagttatttgttactgtttaccaaaaaataacacgagttctaaaatctgtagtaattcacaaagatttttcctaaaaatagatcttttgtagttatgatgaaaaattttaaatccttgaacaaaagtttccaactttttcttatccgaaatatggaatgctttattttatccggttttcatgatgattaggttttggtttgactctcaaatctagtgcatcatgtttagaacctgaaattttagatttcgaaataaatatcagaaatttcttcaaagtttgtggttttgagggaatatctaacggttgatggtttgtgttggtggatcctgttcgtgtcatatcaaaacttaagagctatactaaataggtaaagctgaatatgacatgaataataattgggttaaaagtatgaaccaaaatacgacctaattattgaaaaggtaacatgtcttgtaacccatttaatgaacaaatcctattttttttttatgaataaagagaaatatattaataaaaagaggcacttcaaggaagcaccccaacgtatacaggaggtatacaaagaaaaaacatttacccatggcctaaccaatcaacaaaatctacaacgaaagtgggaccagaaacaaaaaaacccctagtccacgcccacagattacaaagtaaaaccgatttacaccccagaatcgaatgctctacattttcaaaagccctactgtttctttccttccaaacaatccaaaaaaggcacaagggtgctgaacgccacactttcctcctttcctttcccacacaaggccctaaccaccccaataacgcctctcttaatgaacaaatcctattgtttaagtcaatatgattaacctttcaacctgacatgttaatgactcaattgacctatttattcaaggaacttgaacttgttttgtcctttcttatctatgtgtgcttgtcaccattcccatctggatgcaagggttgttcttgacttataccttttctctatgaaaatttgttcatcaactttatctacatttgaattccaccttttttctttttgtgtgtttcatttggaattttgaaacccatcaaagattgaggcctttgcattgattgtggccaattagaaggtcaatactaatgatttgctcagttgggaagtctttgcaaacctttttgtttgggtccttgtgttatgtgtttgcaaagtggtgaattgattgatcatcattttttgccctgcttaatgtcattgaggctttggtaataggttgttcagacttgttaagatggattggttccttctagtagtgtgactaatattattgttagggctagggctcaaataagcttgatatattttgttagcttactacctaacggtttaagcttttaagtcagttgatagtttaacatgatattaaagccttgtttaatgggaggtcatgagtttgaacctcacggtatgcttatttcctgcaattatggagcccatgtgcaagcccaaataaggttgcccttaaggtggggtgttaaggctcaagcctaaatgagcttgacatatattgttggatcactaacatacaacttaagattttgagtcaattgatagtttaacaattatgtttatccctttgggggctttgggtattttcttgcactcagggtactttgtcatttggcttgtgtcattttgtcatgtttagttatgagggacagattattagaattttttaggataatagaagattgaggattctattggagttggaaaaattcttttcctctctctaggcttctatatgtgcaacttctaaggctattctgttgagtgttttatggcttgattggaacaacgtttgtaggccaaagagggtaggtagggagttgcttctaatatgaatccagtcttaaatgggttcaattaagttaaactttgatatgtctactttagctaacctagtttagctaggaattggagatgtgattagagatcattgtggaatatggtaattggcattttcgaacatggaaacatctaatacagtctccaaccagcttattggggattctgtttttgataattgacatcattataagtgcatttaacatatatttctatattccaattctttaaatccttgcagtactctggaaattgaaatcataacatatggctggtgtttttacctattatcagtgaatgctatatactatatttttgccaaatggattggatcagtcattgaaacagagattttagttcttttgaagggcttgttgcagccagaactttagcctacccaatttatggtgtaaggaattctgccattgtgatctcatggttggagagagctcctgggaattttagatattgctagtaacctgagctgctatttttattggactcttcatttagccaatcatattgcagatttgttagggcaacaaggagccaaatggagggtttctcttgttggggttcttttaccccttaagttatgtggaatttctttggctggtgcatgtttttgtcatttcctttgtctgtatatctgttttgatgttctttttaagtagttctttcttttttttgtttttactagtttttgtacttctagaaggatgctaattctatgattttttttttttattaggaacaaaaatgttttcattaacagaataaaattgagaaggatgaaaaatccttcccttattacaaacttgatcaaaacaaaggaaaagaaaaataaactagaagacatcaaaatgtctcaacattattattttgactcttttgaactacatatcaaaaatacaattgcgttgaataaagttgagaggaatgcccctgaaagctgtggttgtagatgctcaaaatgatgaatagaaacaaatcaggtcccataacattttggatgtcctccaatcgtcctcaaagagccttgcatttctttcccgccatgctatccaaatcaaagtaagacaaacgatttgcaatagatctttgcccctatttgtggtccctaaccccctaaaagatatactcctttctgataaataaaatgctttctgggttgactctcatgctacagatgggatgttttcttaataatcagcacaagaatattctatatacaggtggttattttgacatgtgagtatgttttcagtt

SEQ ID NO: 10863 - DNA, 3525 bp, Vitis vinifera
  Intron number 4 from transcript GSVIVT01027847001 (locus G SVIVG01027847001) derived from phytozome v7.0 (chr-ID chr5 ; pos 8597221 to 8600745)
tgtgcaaactcatattacctgttataggtgtgttttcttagttttttttctttcttgcttagttctgtttgtttgtttgtttgttttcttttctttcttttttttgtggtgaattgcatcttgaataaaaaaatttccagtaatttttcattcttattgttgctaaggatgtgaatccatccttggatgtttcttaccttgtggtgcatcttatttcttttttatattcctaaaaaatccatttctacaaaatttctttagggatttgagagcaagtcttcactcagctgttgcaagttcagtctttgcattttatgcacctttcctcattccattgcccaaacaaccaacctgcttgtcaatctaaaattgaaaagggtttttaaatccatggcttcacacatggacttaaatttattaaaacactaggaacatcaaagattagacttttcgttttattgtcatttgggtgagagggaaactatggttgctatgagaactctgatttcctgtatcaacatggatcattgctatagtcaaatacaaaaagctgctgaaaaaatgctcacatgatgatatttatgttaatgtgacaacctgaaatgtgccatggcatctcaatcttttcaagtaactactcctgcactcttagctttgtttaaataatctgacaaatgactttgggttaagcctccatttagttctttttttctagataaagaattgctaccccttttactaagatgaattagtgccacatatcagaaagctctaggtggcattatgtgattacacattttagacaactgacatttagaaaagactctagttggattacatctgaaatgcttccacccagtttttgacatgaccagtgattctctttctcatcttatacctcatattggaaagcatccgtattaaaagtagagctctctgtctcaagagtgtaaattgatgggcttctgttgtgaatgttcgatgatgaacctgtttgtgggatgcaacactgtacatattagatgatgctagatgcaaatatggtaactttattatttcttaaaagcctaatgcaggctttgttcaaatattaacaaaacggaatctccccttctgatgcctgttattggatccatttctctcctagatgtctgaatgttgctgaattcttttctttctttctttttctcatggcatcaaagtttatacttctttaacttcaccatgtaagtgatgtagcacaaccctaggatggttgtctaccataggtggagtaggacttcaatcttatgggatttaaggagaggaacaagaataaaattgtagcaatgagaaaaaaaaaatattagaaaagggaggtagagaagaaatatagaaaaccttaaagtttcactaaggccatttaggagtctcgccattgaaaattgcaaggcatgtaaaaacttatattattttttttataggcaaaaaaatgatgggatttttgtgcatatctggcaatataccttgcatatcggtctttgttaagattttgaacttacttatacatagggctaattgatataaaacaaggttaacaaatgattgatgattaatgatacaagttttttcaaaatcttgcccaagaccaatacgaattagtaaagtcgtatctgcctcggccactcctagtactagactgatagccaagttccatatttttttgatttgtgaaatggctccattggtttagagatgaatcaatagccttaatgcaatctacgtgatgactctaacaccatttttagaccatgtcaagattaagctatttgggtgacgaagaacacaatgatgttggaatgaaaaaccatgagaagtggagtagatcaaaagccttgaaaatgatagaagattgggaggggagtaagtttgggaccacccttgattgcaacttcatcctttagttcggacttgagcttttgcattttcatatatggtcagctcgtctttaatatagagcacaaacctcaaagaagaaatggagagtctttgattgaaagatgaaataagtatttgtgttgggaatgggaatgggcatttgttagggtatttgggcttgaatggtaatgagtgttctacaggaatttggattatggataataggtatttgtgtttaaatggataatgagtgttggatgggtatttttgtttaaatagataatgagaatttgatgaaaattgggattatatgaagtggataatggatatttaggtttgtatgaaataaataggacatggatattgatagaaaaattggtaactaatgaataaaggtataaaaagcatatttattttttaaatatgcttgttcaaataaaaataaaactaataaaaattatacatattttttataattgtttcattttgaatacagttgataagaaaaataatgtttttcttttaaagatgattcatgattttaaaatggttgtaatttttaattgttgaaaatatatttttaaattttcaaaatacttattttaaacaaattcattataaaaaataaaaaaaataaaaaaaaattcctttttattattttcattttttttatttcttgaaaatgaaaagaattagtaagggatgattaaataaaaaagttttaaattcttaatattgttgttgatcactctagaggcatgcttttgtcacgattaattttttagtctatatatgtgtatttatttttttgataattttcataatacttttagaattttttgagcttttaaattagggtattttgtgtatcactagatcctaattcgaaatgctgagattgatgtgccttgggacctccttagtccatgattaatattgcaactctagaccatgtttataagttttagaaaccctaaaacctaaataaactatgaaaaagtaaatgtaacccatgtaataatttaatagtgttcttgttcttatcctaaaactattaaatcttgtagaaaaattaaggaaaaaaatacagacattctgtttataggtagaaaaactttttgtaataagagtttttaggaaagaagacttttagattctaaatacttgaaaagaaacttttaagaaaagaggttaatttagaaaatagaaagtttagaaacgggtctgagagagaattctaaaacctctcaagctctaaataaaacttaattattaactactaactattaattatgaaattagagaacctaaaaaactgaaaaattatctaaatactcttgatagggtaatttagtaattttttatttcctttaattccttttttgagtagatcttggagattcatccttatcggtgagatgtgcattccctattctttgtagtataatgttatgttgtgcaattagtctttgatgtggttgtagacacattcattatgttcatttctacctgtgctctatatacaatttgagttcttatttgagtcctagcgtgttaatgggttgatttttcaattatatttttatggcagataagtttggagctgct

SEQ ID NO: 10864 - DNA, 6960 bp, Vitis vinifera
  Intron number 3 from transcript GSVIVT01013249001 (locus G SVIVG01013249001) derived from phytozome v7.0 (chr-ID chr2 ; pos 6251876 to 6258835 reverse strand)
gacccgagttcaggttgtcaaatcttagtccttttcaaatatttttatttttatttttttgctgaaggatgaaactttcatttctttgtgagacatgttaatgttggtataaagatatatcctttttgcctatctgcttcctgaagtatttccatctcatctatgtgtttatttgtttatgtttttctcatgatgcctatgtggaaaatgtttgctctagagttgtgcaatctgtataatatgggaaataaaaattgcagcttgttagtaattgtttttgtgggcagctgttgcctatattcagggcatgtttctgtttcttcttcttaaacacttgtttaaaattactaaagcatgtcaactgagtatttgtttctcttgttcaaagtccttgcatttgaatctcttgtgagagatctcatactaaattattttatagatctccttaggaactgttacagctttattctaagtatgtttgatatacattgttaacttattatgtagttgagcttttgaatcaaattggtagcttaacatgatatcaaagccttggctttaaagaggtcatgagtttaaatctcacacttgacatagagtgtgcaagcgagaagaggtcacgtgtgaggtgaggtgttagggatttatccctagtcggcttaatatacattgctggcacaccacctgatagatgctgtattttttggggaggacccctcatccttctcctgtacttttgtcataattaatatatctttttttcttataaagagaaaaaaagaaagaactaactccttaggttccttggtatatttcaggttttgattccaggatgtcatcatgatattactttttccaggcagaaaataattttgatagcaagtatttaatcatcatgttgaacttttgatttatccttctttatgaattcacaacttgtccttctttgacaaccaatttgttggttgaaaagaatttccaattagattagtgttgcatttcgttgcatcagaaagccaagggaaataaaacaaaataaaattcccaattgcttattttttgttgctttggtttctctaacatgaaatttcttattaaccaaggaaaatggttcatgaggcacaattaggcaaaaaaaatattttttaggtctcaaacaaagaataatctgagattcaaaacctaaatttattttcatttcttggaccaaccaattggagggtaagattaattttagttgaacatttttattcttgctttcttacataaaaacattagtggtagaagtggatgatggattttattgtttttaagcatttggaatgcactataggtgggagaaatgggagtttattggatgcctgggtgaagaaatatgcatgaaatggtagttggattgatttgaaaacctttgacctagtcaaggttgaaggtgacgccaaatacggtttaagtttgaactgatgattgttgagagaggtagaatttactcctaagggttggtcaaatgacttaatggccctataaaatggtttatcaaatggtttctaggaatggaggtagtaaattttaatggtgctttgcatataccaatttgaacggtttccacacatgttaattgggcttccttgctcgctcgcaactcttgaaaaaatgagatttggataaaaatggattggatggattaaatgatgcatatccactaaaaagatttcaatatttgtaaatggtacccctttttggtttttattttaagagctttaggggtttgagataaggggatcttttcttgccttatctatttgtgttggcagtggaggtgttgagttgtcttttggagagggctagggagggtggttattggtcggggtttagtttgagggggaagaacggtgagggagtgtaggtgtttcatctattgtttatagatgatatgttggtcttttgtgaggatactaaaaatcaaaaggtacatttaagtgggcttctcatgtagtttgaagcaatctgtgggctgaaaataaacctagaaaaaaatgaaatgattctaatgtggaggagttggtgatagagttgggttgtgaggtgggagagctttcgtctacttacttaggtctacccttaggtgttcctttcatattagtatcggtattgggatggggtgaaagagaggtttcgtagaaaattgtccatggggaaaagacaatgtgctcacgttgatttgaagcacattatctagtttgtctatctactatgtgttcttgtttgccatccctagaaagctcaagttgagactaaagaagatttaaagagattttctatggggagatgggactttgcagaaaaagccacatttaatgaaatgattgattgtttgcatggataggagtaaggcgggattgggcattagaagggttttatttcttaatcttgctcctttaggaaagtgaagttggagatttgcttctaaagggtgagtttttttggaaataggtcatatagggaagtatgagaaggaagaaggggttggcattcttgcgaaatgagaaatgtgtacaaggttggagtatggaaaactattaggaagggttgggacctcttcaataatgaggcatcttttgaagtaggtagtagaaagagggtgaaattttggaaagctaaatggagtaggaaggaacccttgtgtgtgtcatttccttcattgtatgttttagtagtatctaaggaggtttgggtggcggattaatgggatgagaggggtgtggtcattggaattcgtgcttctatagacacttaaacgattgagagttggggaggttttttcgttagattgcatgataagtcgatgaagagggaagaaaacaatggggtgatttggaaggattcaaaaaacaaagggttttttttccccatcaaatccctctattcagtttcggagttgggaggtcaatgccctttctaatgtgcattatttggaattcacaagtcctgtctaacgtgaactttttttcttgggaatccagttggagaaaactattgatgttagatcagcttcatagaagaaggtggttgttggcacatagattatttatttaatttttttggtaaaaatgatgaagaagcaattgatcacatttttcttcactgtgccaaaacaagggttttatggtagttgttatccttatttggcattgtttgagtgctcccttccatggttagagaaactcttttaagctagcatgactcattttttggaaagaaacagcagaaaatatagagaattactcctctgtgcatttttgaacaatttggaaagaaaaaagttgaagatccttcgaaaatgaagagcagttggatccaaaagttgaaatgttcttcttaagtaaccttttagcatgtatccctgtttaagattcccgtttcagtggctgcaaaaattgagagattgcaaagggatttcttttggtcaggggttgggaaaggtaaaagagatcatcttattagttgggacgtagtgtgtaagccgaaggtaaaagggggattggggcttgggaagatttctttaaagaatctcactcttttagggaagtggttgtggaggtatcctagggagagtacaactcagtggcatcaggtcattctaagcatttatgggacacattcaaatggttgggatgccaacattttagtcagatggtcacattgttgtccttggaagactattgcacaagtctttcaggatttttcaaagtatactcggtttgtggtaggagatggggaaaaaatttgcttttgggaagatttgtggtggggggaccagcctttgagatcccaatatccaagactatttagagtagtcacggataaaaatatccctatttcttcaattctcagttctgctggccctttctcttggaactttaatttctgtcgtaatctttctgatttagagatagaagatctagaatgtctcatgcaatttcttgattgtatgcatttatccacttcggcttcagatgcgagatcctggtctttatcttcttcaggattgttcacagtcaagtctttctttatagccttgtcccaaatactttccctactaaatttgtatggaattcttaagtccctttcaaagtcaagtcctttgtctagttagtggcacacaagaaggtaaatactaatgacttgctacaattgagaagaccctacaaagttcttagtcctgacatttgtaagttgcgcatgaagtaaggagaatcaacagatcgtcttttcctacattgttatttgacaatggggttgtggtacagattatttcaactagccaagatggattgggttcctccgagaagcatttcagacatgatgtccatcaattataaaggttttggcactttcaagagagggatagttttgtggcaaaatgcgtgcattgctttaatttgggttgtgtggtgggaaagaaatgctaggatatttgaggacataactaggatttaagagaatctatgggattccattcacttccttacttctctttgggctttttgttccgtggtttttaagggcattccccttaacttgttacaactagattggctagcaatatgtggttccaacgggatggtctagccaagagagcttgttcgtagttttcatagtgtagtttcttgttcttttattgtgttgtttagttttatctttggagggaggattcctcatccttcttttgtacttctttatctataaatatatataattgttgtttcctataaaaaaaaaaaagtaaccttttagcatgggttaggttacacataaaaaaaggttaatgtctttgattgattttgtagattggttggggtcgtgttgagagagtgagctatcttttgtgctctctcttttatggtattaccatttggtgcccattgtatatggtgtactgttttcttttctgtatatatagaacttttattgcccattaaaaaaagaaaaagaaatcagagggtaacaagctagaactttttagtgaatcatcatttttagcccaattccatgtgcaggttccattaattgcttgattagctaatctaggcttccaatagaaagaaatttccatgtcttttgataaatcaaacgtctctatcatctaatgattgtagctctagaagccatgtctcttggtattgggcacaggaaatgaccatggaagaatatctttcaaaagggaaaatatcatcccccaggaaagggcctctttcaagccttcaagaaaggtcaaaatttcagccttggtagtaaaccaaaactagtcagcttaaagttctttattatctcttggctagaggttttgctagtcccttggatgccagcttgcatcagattacccaaatagtatccatcaaaactaaacttgtattggcatttgataatctatttactccatgttctacatataaccacatctattgaaataatgttaaaaggagttccaccaaactccttggtaatgacacttttaaccaagtaaaaagttgaattctacccatcttgcaaacagttttgccatgattatcatcaagaaacttgtgttccttttaacaaaatcactcagattgtggctaaaatagaacagtgccaattccttttttgccagaattttcacctaatgaatccttgctgagaaaacactctatgcaaaagcttttaacaaacaattctttgctgcccatttcatttggagacccaaaacccactaaaggtaatgacctttttttcctgtttagtgcctaatatgaagctgcatggcaatcatatactgttagtggccactagccagtgtgaaggttcttgccaatcatatgctacggatgagaagtccttatagggctttcagttcagatcattgtgttttatgcatgggcagtggcgaaccaactgaccatctctttttccattgcttgtttatctgagtgctttggccaggttgctcagattttctaggatgggttcccctagaagttgacattcatgctgatagtctcttttaggcatcgtaggggtttctagaggtagggttctgttgtaaagtttcactttgatctggatgatctgaaggagaaaagctctaggcttatatgtgtgtgtgtgtgtgtataggtctaaggtgcctgttgaggacttgtttgatttcttttcttgtctatggggttccatcattgaagcttttatggacactctgatttttattatgctagattgaaccttccttttaataggtgaaggaggtttgttgaggatatatatatttaaagtaggacctgttccccatagttctgaatagttaaactttgatggatgatccttgggtaaagaaatacaaggtagagattttagctctttcagaaagtatgggcaacggctttgagactccaatctctgggtggagggagattctacaattatcattttgtgggtgtctgaggaaagtggtctgtggaagtatgacatgtggctttgccaaattgtagatgttgctagtcatttagatggctctttctcttggatttagtgcttagcaaagtcatgctgtaggtcattagccaagaaagtagctaggcagcagggccctttgcaggtcatattgtaggtcatttagccaagtcatgctgtaggttgttcagccaagggaaggagctagccaagtatggtatgttagagttgattgtaattttctattttctctgttctttcaagttgttttccaactgttcaagatgctatctgtgcgtcttgattcattttttatttgtagaaaatgataaagtaatagcaactattagaggcaatttacctttttgtatttattctgattttaatccctcttaaggatagtttttaatgttccattgattttttggttgtaaaggtgagaggtcaaattaaactactctgtgggggcag

SEQ ID NO: 10865 - DNA, 8115 bp, Vitis vinifera
  Intron number 2 from transcript GSVIVT01034925001 (locus G SVIVG01034925001) derived from phytozome v7.0 (chr-ID chr5 ; pos 154117 to 162231 reverse strand)
ctccattcgcgtgccgaggtattcgtctcccctttggttgctcggaaactgcaagaaaatgaaggaatgttaaaagattatgaatcttcgatttttgatgcttcagattcacttaatctgattggtgcatattcctttcacactgtgtgatcgtgttttgatttcgtgtcaatctattttttatgtttgctatgacaatttactcattccttccgttaatttgtatgttcgaaccttcctcctccgtttggttgctgagaaaatggaggaaagtaaaattttggatgtatatattccatatttttaagttttccattgtacggaaagctaattaattaagctgcttgtgttgatcatagcagcgtggaggtttagtttgctcgccccaaatattgagaattctaaggttcggaagttcatttttcttattccttttaaaggaatttcctggaaccacaccatgccaccaagtagccaacagcatgtcagttgtgctagttggtcccttgtaaatgtggttatttcattttgttaacattgatattccagtgcttctctgtggtgttcgatatgaaataagagctatttaggtttacttcagaattctattttagtatagtggcccatttcctccaaaattctacaacttggcacatttctacagttagaatcatacttcaatctggattttcagtcctatggagagtcctaatggatggcagcacagaggtactattaggttgcatctaatcaaagaacagatgattcccaatccatgactaaccgatccctggaaagttaaagttgatttagacacataggctgcactatgccagctaatgaataatttttttattctcatcctgggcaatttatcctgagaatttaaacaacttatgcaaagtcagtggtagattgaagatagcataattcctgaaaatggttctgctgtactagcttttcttaagatgctaaattgacaaccaatttgattgggaaaagagttaccccacctgtgtatattttccaccaaacattatgaaccttgtttttggtagtttgttgtaggctgcccttgctttggataagagcatagaaggtgaagggaagtgtgctgtgacagattttacttagaaatttttgcactcccatgaaagtgtaaaattctgcggcccctttccccccctgcatcttcccccaaattacttccagtaaattgaagaatgaagttttaacttttccaaggcttgaatggtacttttttattttttgatggataagcacaaatatattaaggggcaaaaagtcacaaagcatacagggagtatacatagcagcccaaaacaaaaacacaaaaaagaacaacctcaccaacccttaagtggccgctagccactccaaaaagcctaagagcgaagaagactcctctctaatgtacaccctagcccaactccacaaattacaaacaaaagaatttttgagtttctgtatagttaaagaacccctcttaaaagctaatctattcatttccttccataccgtccaaaaaatacacaacgggatggaattcctgatctttttcctttttttccccacaaaagagcccctccaactaaataacacctctttaaccgactctgggaacacccactgaaccctaaagaggccaaggacgatctcccatagtaccctaaccactatacagtgtaaaagaatatgatttatattttcctcatcacaaccacacaaaaaacagcgattagggagctgccacccccgtttttgaagcctatctaaagtgagaatcttccctcatgtggctttccaagcaaaaaaagcgactttggttggaaccttatccacccaaatgcaattaatcgggaaggcgcagtcattggggacaaccaacagattataagcatccttaaccctgaaacaaccatgaccccctcctttccataacactgagtcctcctctgaagatgtcctgaagtcccttagcatattaagcaagtctcttatcaagtctagctctcaatcattaaagtctcttgaaaatctgagattccaacctccttgaccaaggcttgaatctcacacttcattgacagttgcattcttatgaaccgccaaggcaaataactgggggaaattttgggacagcgccacattactacatcactgatcagtccataatttaactctagtccccttccccaccttaaactttatgctatgccaacaccaatttgcctccgccataatctccttccacacccccactccaaacgtctcgctagcttccccccactccaaacgtctcgctagcttccttagtcctccacccaaatacttcttgaccatatttcaccccgatcaccctcttccaaagattgtccttttcataggcaaatctccagatccatttatccagcaaggctttgttcaagggatcaatcttccgaatgcctaaaccacccttctccttttgagtgcacaccacctcccaattaattaagtggactttcctctcaaagcttccccctccccaaagaaagtctctttgtaatttttcaagcctttttgcaacaatcttgggcattcgaaagagggacataaggtaaataggcatgctggccagtgtgctcttaatgagggtgatacgcccgtccttagatatatattgccttttccactgggctaatcttctcctcattctctcttccaccccattccacataaaaatagctttgtgatggactccaaggggcagcctcaagtaaacagtgggcagagaccccactctacaccctagctccactgccaattcctcaatctcttcaacctcaccaaccgggattaaaacgctcttagctaagttaattcttagataggaagacgcctcaaaccaagccaaaatccagcttaaagcgattagttgttctttcctagctttgcagaaaatgattgtatcaccaacaaaaagaagatgggagacactcatctccactccccctctcccccgaagtctgcagccagacaagaaggccccatcaacaacccttcttattagagtacttaacacttccatacccaagacgaagagataaggagaaagaggatctccttgccgcaaccccttggagttcgagaagaagcctgcaggcaccccattgaccattacagaaaatttggcagttgagatgcaccaccaaatccactccgtccaccgagacccaaagcccattttaagcaaaaccttcattagaaaattccagttgatgctgtcatagcctttttcgatgtccaatttgcaaatcagctatttctcttttcgtttatgccagaagtcaatcacctcattagctacaagcgaagcatccaaaatctatttgcccctcacgaaggcattttgatctacagaaaccacattttctaaaaccttcttcagcgtattcgccagcaccttagccaaaagcttgtacaaaccccctaataggctgattggccggaaatcccccaggtcttcagcaccacctttcttagggatgaggaccaagaaggtggtattaaggcttttggtaaaagatctttgatcataaaactccttaaacaaatccataatctcctctttcacaaaatcccaaccagcttgccaaaagaccactgtgaacccatctgggtttggagctttatcaccattcatttccattaaggcagagtgaatttcctcctcaatgaaaggcaactccaacactttagcttcactggagttaaggcgattgaggtgcaacccctcaatattagctctcgaacctggctcttctgagagcaaatgctggaaagcattcacaatcccctccctcacctcttgctcctcagtcatccacaccccattaatcttaactatatccagggaattattttttcggcgggcatttgccatccggtgaaagaagcccgtgttcctatccccttcctttagccacaactcccttgacaattgtctccaatggatttcatccattaaaacccactttttaaaggattccttggcttcttttttcaactctgtttctcctttagaaaggctcctctcactttccaccccaccccagtactcaacttgttggagagttgagtttttattaacttccagcctaccaaacacctccctattccaaactttgattttttgcttcaactccttcattttagtggctagtctgaaactagccctccctctcacctcagacccctgccaccatccccgaagaaggtccttaaaaccatcaactttaagccacatattttcaaatctaaacggggaagggcccttccttaacccaccacccatcagcaagatgggaaagtgatctgaggtaggtctgggcaacctgctttggacgaccccactaaaatgatcaatccagttctgggtcactaggatcctatccagtctagcctaaacctaattattcctacccccactccaggtaagtgcgcccccttgcaaaggaagatcaagaagctctaactcgtcaacgatctgggtgaaccttctcattgcaccagttagtcttcgctgactactcctttccctctgggagagaatgacattgaagtcaccccctaaacaccaaggatcatcccaaatgcctctgatcgcccctagttcctcccacatacaatccctatcctctttagagaacggctcgtacacaccagtaaaaacccaaactaatccatcttccacattcctgagcctataggaaattgagaagtttcctatctccatctcaagcacctccagggtccttttatcccaacaaatcaataaacctcccactgagccatgggcatccagggtaccccagtcaagaaacctactagtgcccaagcttctcaccaacccctttgacattgcctgaattttggtctcttggagatagaacaaatccaccctctgacttctaatcacgaccttaatcacctttcttttggaactgttgttagctccatgtacattccaactcaaaagtcttagcttcatttaacttccatgacctgacacctcttccttgcaatccacctttctgttcccccccccccatagttaatggagcactctaatcttttcaattccctttcgaacttagatttctccagaagagttttgatgtggactctttcccttctcttctggattttaaccaaaaaatccaaaatgtctttctccaatccttctgtcagaaaccccaagaacttactgaacctggccagatcactttccttccaactaacctcctcccaaccctttacttctcttggcaaagtttgaactaagcacaattcctttccacagtcttcattgttgccattgttagcctccatcagttcccaacgattggcagtctcatcttctataggccttggagcaatgagcatgcgtaacggggtttccccctggaatgtctccctaccgtccccataatagtcataatactcccccaatggagtccaattggaaaaaaaagaaggagaagaggaaaactcagaagccaacaatccacaagggttaggatcactcccatacctcgacgcttcctcaattagggcaagatcagtcttcgatctctccttagattgaagctcttcctcaatttgcttccgcatgccgtccttcacctagaaatgtgagattttagcgtttggaccccttaaaagacttgggccagaccacacctcgggaagggccacaccaatgtgggctctgttcccctccaaggaatgggatgggcctcggcaaacgtccaacctagccggcctaaacgccacgaaggcctccaaagccttgacccttttagggccctccaaagatgttggcccaaaagaagtcgacccaacctcaaaagaagaggataagattggatctatcccaacgggcccagagcccagattagagcaccttgggttcttagaaaggccttgcttaaggggcccacccaaaagctgaaagcctccatggggcccaaccgacgacccatcaaggccccgatatcgaaccaaagggcgccccgacccactcgtctgcccctgcgtcccattagcagactgcaactgggtctcgagtcttgtgtcgtcatcctcctccaacacgcgcttgcccacacgtgcaaagacctcaccctcaccctcaacctctctttctgctccacttttcttcccacttttttctgtcggcactaatctcattacctgcctaacctcccaccatagggttaacgaatagcacaccccttcgacccaaatttccatcatgttaggcatctcctcgccgtttagcttcaccagaatcctggcccactgcaactcctccagtttctccgtttgagaatcgatagctaagaaacccccacactcctcccctacccttctgaggatggcccgatcccatagagagactggtaagcccatgattctcacccatgcctccctccttttctctccttccatcagacaccctgtctcaggactccatttttccagtcgcagaaagaaccccccaaccaaaattcttccaagttttagagctttctcagcttcaatcaacaactcaaattccagcaacaccttacccctttccaacttagccaaacctaagttacccttcaacccccaaatttttgccatttgggtcccccaacttctcaaatcatcccccctcactgatttggggtcccaagatccaaccagacattgagccaacctgtttaaatttcggcttaggtcttttttgctgacttccacgggtttgtctttactccttggcagcttaaccacctccgcaaaggttttccccaaaatgggctttgacgacatcgcatcgtccttttgactctccttcctttcagtaacaccgaagtgtctccgccattgaagctcaacccccttttacacctcttcctttagggataaagatgctaaaccttttcttttcctaatccacaacgcccagacagaggaagcatccccccttgttttcatcgcgcaccagcgaataaaacctccctctttccttccaatttatttcccatttttcagttcgcgtgtccttaatgcagagaaccagacattccacaaagatccttaggctctttggtcctagcttaatccacgaagaaacccctcttttcctctccacaatagtgacttgcactttgcccttcttcttttctacctcgatctcgaaggtcttcgactccactccgaagctgctcttccttaagcttatccgagactccgagtggacattgctaactacaccctcgctcgcacacagattcacttgctctcctccatcgcacttgctctctctctctggccctctctctctcgctctcctccatcgcacagtttattattgcaacagagcagtatataatattctctccgcttgaatggttctttgttttatgcttttcattttgttcaagtttgttatctcagtaagtaaatgatgaaggtatgctcattttggttcctcgctacatgctgaaacgggaccttctttagtacattcataggctttgggtcattttgtgcctgagcccatgggaaactacttgttaattttgcggttgatgagctgcatagttttcacctctatggaatgttgactctttattgtctcaaaattgaaattaagatgaatagagacattggctgaatcaaggaatattcaatttgtgcatctagaaagtgatattacaccaggggctaactagaaccatcttagttttctgaagatcggtcatttccttaactttttttgaatgagtcttcaagtcaaacgtaccttgatagccaatacccatgatgcctccatctatcaacaaaatcatggaatgtttcttctacgttcaatagaagtctcggctttttttttcccttttcttcaaaatattgttacattcagtgttggaattttaattaggtaatgaatcattgttgatattgctattattttaacgagggtgtctggtttaaatgtctaatcatgtatataagtgtcatacaggttccattccaggtcccagtcaaagtaaacatagt

SEQ ID NO: 10866 - DNA, 3224 bp, Vitis vinifera
  Intron number 1 from transcript GSVIVT01025527001 (locus G SVIVG01025527001) derived from phytozome v7.0 (chr-ID chr8 ; pos 14294766 to 14297989 reverse strand)
ttcaaccgtcacatcaccaaagctcttcgtcagcggtacgtttcgattcttctttgttattctctgtttggtcggtgagaaaacggaggtggaaaaaaaaagatgcagaaaagaaagtttttagttttatgttatgaaccagataatcgtagtaggttcagtgagccgagtcctttttttttttttgtgctctcagagcgttaaaaataatgaaaaatctaggattcgaatcgtttatttcttcttctctttccgacattttctcagcaatcaaacggagcattagggtttttattttgctatgcattgatatattttgcaatcgtatatagtaggattaagtaattagatgcctattctgacgccataaaccgttgtttaatttttttggtggttctttttttttttaattataatttttttgttatgcattttttgggaatgaatctgggaaattgcttttagcttggttggtttgagcatggatgttggaaaatgaattaccaattaccaatttttatttttcttagtatgataataaattatgaaatttatcatatcctactcaacttgataaaagcatactctaagacagcagttgttacttctgcaacaactactacaaacattgctatgtaaccgccgctacccaaccaccactgccacggctttgttagataatagcaagaaaccagtcaccatcatcgcccctattcctaccaccaccaaccttactgtgattttcactactactttcaagtttcaatacagtcatccagactgcatcattgccaccatttgccatcagattcattgctgttgtggcagctgctgcacaatttgccactgccaccatcaccattgttatcatagcacaatattaccatcatcctattaaaaaaaaaaaaaaaaaagctcaatattaccatcaccactgccacaccatgacatagttatgagtatggtatttgtgttggatatgaatgcaatacacatgtttctacaaaagaaagagagggggcattccttttttcttagaagtttggaagcttaactttttatatatttttatgctacatgagaaatttccacaccggcacacttagttgcatgagcttaatatttcaccttgggccctataagggtcaaggtggcatgtactaaatcctggaaaaatttatgtggaaagggaaagttcttgattgtattatttctaatttatggaacttttgccagtgcatgctcaccaaagaaatgacttctctggagaagttgaattctttattcatctgtcgattctgtcctattaagcttgttagtgttgaggttataatcatgtaattatcctaccttagagggtgatgaaagtcatttgaaatcctgtctattttggctccagtagtagcggaaaattattgtgtaccatatagggtgccctttccctttatttatgtgcttgaggaggtaagtcctgcccatggtattttgaattttttgttttttcttgtttttattatgataggaataaacatagtattttcaatgaatcacccttcttatctatcagctaagaaagatgccatttgcattagtcactgaatttagaggaggaaaatctaggtggataaagttatggatgttggacatagtcaaaattgtgggttagaccaagcatggagaatatcagtgagatgactggacaaaagatcttagatcagaatgtggctgtgggtctgaccgttcattgccacaagaaatgctgaaaaccgtaaatatcatatagtagaaaggatagaactcctttcagccactcaccagttgcctcgctgtttttcttttgcctcttcaccttacctacaagtctgaccaggttccttggcccaggatttatcttcctagtcctccctgatagatccccttgtcaaaagcttatataaacagtagcttttttttaatgggtgaaaaagaattgtattaaaagctccccacccaaagggtgcacaaaagatgagagaaagtaggcttgaggatttaccttgccaagcaagaaaagacgtgagaaaggaaatgtcagtagtcccctgaagttcctctgaccacttaagtaagatctttggagcctctttagctatggctgatccaattttaccgaagtgttaggaggaactttggttgccatctgactttgattatcatgacaagacgttcacttgtagtggcctcctgctatgaaacttttcatttatattctggttactaattttggtgattttaatcactagcactccatgttactgttaaattaatccaaatataaagaatatgtaaggttcctatggagttcctctgatcccatagatttctttatagcctctttacggggaatcgcggttgctgtctggcatccattagaatggcatgatgttcaattacgttgacctcatgttatgagaactttataatcatatttttgccatttcagttgccgagtttttgcaatttcaagttgtttctctcttggctgcagtatcataatggtatacgcctgcttccgttatgaaaattttcaattatattttggttactagatttggcaatttgaattactagtgctcttacattaatgataatgtaaccatggcaagaggatctcttacatgtgacgtggtgttcctctgatctcttagggtccttcagagcctttttagaaaaagagtaattgcctgtgcagtgtttggggtgattaccattgaagttaattatgttgacctcattttgtgttatggtgatttatgattacattttgccattttggtgacttattttggaaatttcaaatatcagagatttgaacttgttaccgctgtcattgtgctattgtggtgtcaggtaccaggtcaatacttccccaggtaggtctagcatcactgatcactaatagaaagaatgctttcttttttatctgccgtgtactttatggtggagggtggatttctcaagttgttgtgttgctaagattttatcacacacccacaaatatgttggatcttatagaattcccagtgaagctttaggaatgcaatgcattcatcattgacgaaataataggtggcaacaactaactatttgattatttgcattatacatgaacagacctcttttaaagaattgactgacccttgtcttgatgtaatgagatgtaggcctttcgagattaacaacag

SEQ ID NO: 10867 - DNA, 10791 bp, Vitis vinifera
  Intron number 1 from transcript GSVIVT01038321001 (locus G SVIVG01038321001) derived from phytozome v7.0 (chr-ID chr7 ; pos 12819364 to 12830154)
aagaaaattcgagcttaggctttagtgattgtcaggctatatgcaggtatgactattcttgtactacttgcaatactatatacaccaacagaaatggatgttggtttggagtacaaaatttacacaagctcacgtaagtgatgcaaatcagtaggaactctatgtttatcctcatcacaagttatgggtacaagtctctctttatttcgtattcctgaaagtaaccaaagcaaagtagttgatgaatccaacatttttaccgaatttacaaccctaataggtgataaaaaaaaaagttcaaaataccattcgaggagctatatcaagaccataaaagacccttgatctttctatttctctttcactatgttctgctctaagcctctaaccaaaaaatttatcaacttctatttatatagggaacaattggtggatatgggtcattattgcaggagtggtccttatggtctttttacttatgggctccttatactatttaaggagaaaatatagaggtactattttttttaaaactttttttatgatagtaatgccatttgttagtgggttggataattgaactcgtgatttgtggtatagcgagggagagagaaatggaggaagctatgctgcatgaattgacaacttcaaacaactttagtgattcaaaatatgttgaacatgatggaaagaggagggctcatgatctcaaaccgttcaattttgattctattgtggctaccacaaataacttttcgtcttaaaataaacttggaaatagtggttttggtccagtttatatggtaattataatttcattaagccatggcatgtaataggaatagggcattcttttttttaagtgcctcaattaaagcttccttgtggattatggcttagtttttgcatgggaaattacccgaggagcaagaaatagcagtgaagagaatttcaaggggctcaagacaaggattggtggagttaaaaaatgagattagactgattgccaaactccaacacatgaatcttgttagacttttgggtagctacatcaagggagaagaaagatgttaatctattgattcgttaaatccagtcgagtgttttaataaaaaaatatttgtaaatcctatgacctcatactagcgtagcaaagctactataatatagcagctctagagtcgaactctgggatgggttttcattctaccagtgatatactcaagattagaaattaagtttgatgatttcctttgtcaaaaacttaaagtttaaaagaaaataaaatttgttttgaaagtggtgtttgaaactaaaataatatagaaatagataaaaatggaagaaaaaaagtttcccagagctaaaagttgctaggatcaagttcaaaatgcaaagtgggaaattccagatttttcttctcgtattggggacaacaacataaaggatggttgtttcctgaaccggtataggtttagcaatgaagatttaatccataaaaagtcaatagaaatggtagtcaagttccattaatggctttagacactatgagtcttcaccttgagccactttccaatggctcatacatgataactaatggactgatgtggatatagtaataagtatccacaaagacctaaagcttatcatgtattggccattcaaagtgattctaagggatttaaagcaaaactttagatttaaaagccatttatgaactccaactacctgtatttaatgcacgagagttttccacttttgcatctggacttttcacctagcttccttcactccaagaaaccaaaagtttagcctctcatcctctgggaaaacatcctcagaggttgtttggcttccaagaaaaaataaaatagtagagagaaaaggaaagcaacaagagccctgtattttactaagtgtaaaatatacaatatgttagttttctcgagagataatttccatccctcttatagtctttacaaaagcaaagcctgtgattagctaattacagggataagaaaggaatttacatcaaaaaaatacaaaagaaaagatctcatgtggagtcggcaaaacagaggagattttgcaccaaagacacatgggctggtgcgaatttcgcacaaggagaaggtgttgtgcgaatttcgcacaagcttggagcagttgtcttccgaaggtcatatcttcctcatttcagctccaaatcatacacggtttaaagcgttggattcttgacttcctgatatttgaaatggtatatagaatgtagaaaatggacttcgggaagtgctccaaaagtgcaaaggaagactgcagctgctgtcatctattctcttcactctgttttcctctttgcttctctcctttacttggcttgtcttaatgatccaaaaatctgtcaatacactcaaactagccacaaatatgattagaagtcattgctaggtccttaacattccaattggaataaagatggataactactacacaaaagtgcttaaaacataatgaattaaaggcgcaaaaaagcactttttgggtagtaatcatctatgagctcatgcccaacaaaatcttggacttcttcctctttggtttgaataattacctttttttcttcctttcatgtgcataactttttctcatgttcttatccttttctgcttgaaacaatattctagttgagttgtgttcacccaaattttcagatattgttagaagaacgatattggactagaaaagacatcacaatatcattgaggggattgcgcaaggacttttttacttgcataaatattaaagactaagaattatccatagagatctaaaagtaagtaacatcctacttgatcatgacttgaaccctaaaatttatgattttggcatggctagaatttttgggaaaaatgcatcaaaagcaaatacaaataagattgttggaacatagtaagcatgactcttctttatctatctactttctttttcaatctaatgttctgaaccttctattgtggatgcagtggttacatgccactcgagtataccatggaaggaattttctcagtgagaccatatgtttatagctttagggtcctactattggtgtaacaccccaaaattaactttaagggcaaaacaataatttacaaattaattaattaaactcataaagggtaaaagagtcattttacaatcaataatcttaagtataaattaaattttcctctagtctttttttattcagaaaaccctattaaccaaaaatcaaataattgaagaatgttgggctaaaggtttgaaggtctagggtttgaagttcaaaattttctaggtaagattataaccctagattaatatattgaattcattacttagttttgaacacattagatattctttgaaaaattttaatttagattagggcttgtttattttaatttttttttaagatcaaaatattggaaacttaagattataggttgatttattgttggaaattgggaaattttaagtttttagatgaaaaagagagagagagaatcgtgacttctaaaggatggaggtgtgttataatttatacacatataaaggttttgatgcactgtatgttggggcgtcgatttgtaagggaaaaaaaagaataaataaatgaaatgaaactattttgcaagaaactggttaaagtggaattgtttggctggagtaatagtgttgaatttttgtagttggtgggttacagggtattgaaaagaatatatatgtatgttgataataataataataatacgtttgtagttcttatactcaataatggctagaaaatgtagggtttacagatttatggaagtgtaaaagaaagtaacagtaaaaaatgaatgcatagaaaaaaaaaattgaaagtgcaaattgtgcatgtacgtgtaggtgtgttaggctaaagaaataataataataataataataataataataaagtaggacgcgtgtccactggatggatggaaaaaaggcattggaaatcaagataatatatatatcaatgtagaaattttacttaggattgtcaaacctataattacaaatatatagtaatagttatttctttatgttatgttaggtgaagagtagattttccagaattatttttcctccaaggtttttgaggaattcttttgaggtaagagaaattcatgcaaattttgtaaaagaaaataattttctttttatattgtattttgaaatgcgtaaaaatattatttttattttttttcatgcatggatcaaatataggttttgcataaaaaaaaatatatttgagcaatttctttgtttatgaaaaatgaaaattgtggagatatgatattttgcttttgtaagttgaataaataaaacaaagaatttgactctagtttccttggcccttgtcaatgggatataatagttgacttttcaggctttgtcaataggatataatagttgacctttacatcttcgtggtggggaatgtgattgatttggaccccaacctctaggggtttagttagagattactaatactagcagtgtttggttctgtccatcttaaaaggaacaattgaggttagccacccatttgtaaagtcccacttaattgggcactatttgttatttaataaccaaagttaaaaaaattgaaacatatttgatttgaaatggatatgaaatgattttgatatatatgaaaatgtttggttgaacagtttaaatgtattagcatgtttaactcaaaagttttataaaaattatatatgttatatttcctgtttgtaagtataattgaaaatatttgatccatgaaactgtgttaatgttccttattaggttttgaccttacccccctttgttgataattttctgcgtaccctcaattcaggcgagaagtgatggttaggaaggaaaattggcttgttagaacatttgttaaaactctctttattttggacactgtttagatgttaaaatttatttcctttttaaattatttgaggttggagttatttggacaataacacttgggttgatgtgttagtttttataaattgatatctggagattttacaatttatttatcttactactctgaacagcaatttggtaattgaaaatttctagttataagatgaaagtttgtgtcaattccactttgagccttcgagtttgaggtgtgaaatgatcgtcatgccctttgagtgggttttggggtatgacaattggagatggtgattggccggaagaacaaaagcttttatcataatcacggtgcctttaccataaaacctggtaggatatgtaagtctgctatatctcatatttgtctctacattattatcaacaacacacggtgtaaccttccaaaattttcacaccaaccttgtaagtaaatcaaccctaaaatgaactggaaacaggcttgggggttatggaaaaaaggtactagtttggagctagtgaatcaaatgctagaagattcctactcaacgatctaaatgttgagatgcattcatattgttgtcttgtgtgtataggagagtgcaacaaataggcctacaatgtcagttgttatctccatgctcaccaacgaaactgtgcccctaccaaacccaaatttgatcgtattttccactcatcataaagtgttagagctagattgacacaaagacaggccagagagttgttctagaagtgtaactatttcaaatatggaattggtcaataaagaagagaattttagaggggaaagggaacctagagaacaacagtttttgtcttaacctatctacaatttgtctagattgatttgttttgacatcatatattttttagatacataatcagctaggtttcctttaatctattttaaaaaggtttttggaatttatcagagtacaacagaagccgatttggtataatttgaaacatagtttgaacctatagtctgcaactctatttgcctttttttcctctataacatattgcaatagattgtatatgtttatcttagccatggtaggtcatttatgttcaattattcattttcattatttggaagggcataggatggactatgtcatatgttggcatcaaactgatgatcaaagctatgttctatgccataagcaaagaaaaacactttagacgaccaaagtagaaagtaggggtttttttagcttctactgcaacttcaaagaataattcttaaaaaatggtagttggaaaaatattgatagatttacaacactttttgccacgtggaaggtgtcttttgaaaagacacctttcacaaatttcaaattcttgatatgcatttaaaagaattgaatttaaactaaaagtgtcgcttcaagagaaatcttctacaattcctgaaaattagatttatactaaaggtatctcttgaaaagacactttccataattccacaaaatctaatatatattaaaggtgtcttttcaagagacaccttccacaatttgacaaatttgaatttatagtacaagtgtctcttaaatttgattttacattgaaggtgtctcttgaagagacaccttccacaatttgacaaatttgaatttatactacaagtgtctcttgaagagacatcttctataattccaaaaaaattggatttatagtaaaggtgtgttttgaagaaacactttccacaattccaaaaattctaatatatactaaatatgtcttttcaagagacgccttctacaatttaaaaaattttaatttatattacgtgtctcttaaatttgattttatattgatggtgtctcttcaaaacacaccttctacaattccaaaaaatttggatttttactaaaggtttgaagagacacattccccaattccacaaaatccaatatatgctaacatcttccaaaatttcacaaattttaatttatattggtcttttgaatttgattttatattgaaggtgtcttttcaaagacaccttctacaattccaaaaaaattggatttatactaaaggtttgaagaaataccttccccagttctacaaaatccaatatatattaaaggtgtcttttcaagagatactttccaaaatttcacaaattttaatttatacttgtctcttgaatattttatattgaaggtttatcttgaagagataccttctacaattcccaaaaatctatatttatactaaatgtgtcttttcaagagatactttccagaatttcacaaattttaatttatactacatgactcttaaatttgattttatattgaagatgtctcttgaagagacaccttctaaaattccaaattttttttatttatactgaaggtatctcttgaagagacaccttccacaattccacaaaatccaatatatactaaaggtgtctcttgaagagataccttccacaatttcacaaaatttaattgatattgattttatattgaaggtgtctcttgtcttcctttataattccaaagaaaatggatttataccgaaggtgaatgtgtctcttcaagagacaccttccacaattttcatacatagtgaaaattttttaatttatactaaaggtatctcttgaagagacaccttcgaaaaaataaattttatctcttaattagtataaccctatataaaaccatatgtttaaattttgtcacttgtatacattataatcaatattttgacatttcaatccaaaaccaatcaaaacaagtaaaccaaatgtcaattaaatcaacacatttcctaaatagtaacaaaactattttgtgtaaaataagtccaaaataggtagaatactatagaacttatgtttataaaaagttagtcaatccaaaatataacaagtataaatatacatcttgagtatttgtccaaaataatgatatgcaaactactaatagtatatacaagtcatgttgtagcatcctcaatgtgtaccacacgaaggagccttcctcttccgttgtggatgtccatgatatgcatgttccactatggctcaatggggctgacatgtaccccctcctccaatgagcttgacgaccatgtctcctaccacgtcctcaaccacgatcattcttttgtcctcgctaatcatcatttgttatatgaactaactcctcatcaaccaatgtagcctctatcggttgtggtgatgatgcaaaaagtggtactatagttagggtagatggcaactccataggtgtaataagagtcttctcaataggcggtaggctgatgttagtcaatggtgcatctctaagaatagatgtatacctagtccctctcctatgagcccctccccctttagtctgtactcatcccaatcgagcaatggatgatatgaactgctgatgaggtggtatactagtgtcagttgatggtcgcgctcgaacaacaactggtgtatgcctaatctctctcttacgaggcccttgtccaatgggtcgtacatctcctaattaaggctggagttgtgtagtagcatcaacactaaatagagcatttaagtgatccatctcatgtatggcctctaatgtagtagaacacagtttgtgaatgcacaaatcatctggggatgcaatatcatatatctgatggatgctggtagtctgtaagtcaattaggagataaattaaattcttataaaaataaaataaattttaataaaaagataagacatgagaattaccagtagctcatggaaggacctggtccaagtaagaaaccaaatagtaatggagagataccacatgatgtctggatcatgataccccaataaacctatagtcatctcgcctttagcaatatgcttatgcctagagcttcaacgtcgaatgtagtctccatgttgagtagtccaatcaacatcatgtttatctctcaaatcacatttatgtaagattgactcattatcacatggttaaggaatcccttgatgaaatccaaattgctgcaatactcgattaggtctatgccattcaactatgtggaaacatatcaaaggtgagatagtgcaccatatatctttcctaacaatacaataatgaggaagaccaacattcatgtcaacaatataaggttgcaatataatttgcactaaaaaaaggttaggtataatcaatgtctggaatttgtttaaagaaacaagtataagaaatgaatcccacttctatcacctgatatgctataagtcaatcaagattgtgcctatattgagctaagacgtgcatgctaatcgacgtagtacgaaactcatctccccaactataaaaataaaataacaaagcataaataaataaataatataatataatttaagtttatgcatgtatcctcataatagtaaaatttgtggtaatattataatatataccgaatggctaatggaggtggagacaactggtcatcatacccataactagagcaaaatcagtgggctaaatatatcatgtgtataaatctaagaggcttgacacaactgttgataaaaccaggctaaacatgcattaacccttcctaccaacaatctcaaaatcctctagaagctagtcttgtatgactccatagaggaaaagctagtctagaaattgagaatggatatggggatcaagttatttactagtcatgtataggagcgctcctctaagctatggtgttacttggtctttattagtgagctaagatgtgatctaaaatttgatttagtttacataatcttgcaaaattagttataaatttgattaccattaatacaaagaatctaacacaagttacaaaaatttgactcaattaattaaaaaaaaaatcattttctgattttagtaattaatataaaaaattagcatataaaccaaaaaatataatttaatttatttctttaaaaaattaataaataaagtatttttttgattttattaatgtcaatttacaaagaattaatatataaaaaaatttgtgccatataacctgaaaaaattaatttataaaataattttctcgttttattaatatacaaaaagaaataaaaaaaaatctaatttatttcacataatctcaccaaattaattttcaaagtgattttctgatttattttattttattttactaacattaatatagaaggaaaagttctaattttagatccattcaatcttacctaataaatttataaagtaatttttttttcaaatttactaacattaatatatggaaaagaattgatttagtatttatcaactttacaattaattggtaaaacaaattatgtcattatcaatatgaatttataaaagattaatatatcaaatacaaataaaataaataaataaatatttgatttaatatttaatagtttacaattaaaattcaaagtgaaatatttaaaattcaaattccactctcatttttaaaattgaaccgtcacaatggtcaaacgagttttgagttcatttaaactcaccataacatctactatttcaacagtgtctgtaatgagaacgagatctacttcagccattcagttcaagatggagctatttcaaagtgggtattgaactcaagagggggattttttgacacttacaacgaaactctattcgtgaaggaaggtatgtgtgatcgttatgacaaatatccagggtgcgcagtgcaagagcaacctgcttgcaggactagagactactaattcatgaagcaattggttcgcaattcaggatatcagttgtggtttagtgattgtcaggccat

SEQ ID NO: 10868 - DNA, 7049 bp, Vitis vinifera
  Intron number 4 from transcript GSVIVT01021009001 (locus G SVIVG01021009001) derived from phytozome v7.0 (chr-ID chr5 ; pos 15366480 to 15373528)
gctttatcaagagatctcttggaggacttcttcccgtgagtatcttcttcctctagatcgaatttatcatgtagctatgggcattaagtttcatctcttgctcatctctatattaactggtatctagtgtattttttttttctttccattgacagtaaatatgttaggtccagtgagttgcatatttttgcaggaattagtgacatgtaaacataaccatctatttggatggtgcatttttactctaaaatagaggatgatttcacagatcattggcgctcctaaaggaagctttcatccagacatccagattttagaccatctattgagctagcaataaaccaaaattgacgttaattaggtgatggtagtaatctaaataagataacataaaaatggtctggataagagtgtaccttagatagtttgtgatggcaactagggaagttccattgtagattttgtggagattggtgagaagcatgcgtcatttcggttcaaagatctgaagtagtaaagcctcgggtatgaatatgatgttccctgattattgcacttcaatgatttgatgtttttaaaaaatgaaattagattaaaaaaatggaaaaactccttgaaaggaagatcaatgattcatataaatcacttaatgggaaatatctcagacaatttgaactagtgtctaataatcctttacaggaaattgttatttcatgggcataagtattgtgtgtctttaccaaattatagatataggctttgagacttggattgctcctcttggactcctcacttaacaaatcatgttgcagatcgcttagccaagccaagagtcggctcattggtgtcttttgtagtgaacccttcactaccccctccaaagttgtggagtgtctctgtgcatttttgtcatgttgaaaagctgtatagcttgttttgcttttgtgttggagcatgtttctttttccccctttttttattgattagatcttacaagttttggaaggatttcttggtttttattataccctgtaattcatatccatgattttttttttttctaatatagaaaaaggtagctatcatacctttttctgaaaaatcaatgtcctatttcactgtccaatttcgttgtcaaatgaattatatctgatccttgtagagtagttgaggagagaggtgccatagttggtgacatttcagggagcacggggaacatgtgaatccctttagtgatattgtgggaaggggcacaatgcatatttttttaagaaaatattatcattgtctaaagccacctataaaaggatcccatgaaaagatctgctctctcagctggtttaggtcagggggaggaacagagggcctctccacatgatcttggaacaagcccttgatccagaattgacctaaattcttttggagcaactgtcaaatcaaagtcattttgcacttgaatggttgttgtcattttcttgtgtaatagggccttctggaattgtaaagagcaaaaagagaaacagtaaaacaaaataatatgtactgggacattagccaactctcttgtgaaagaggtctgttagagaatataaacaataactgtcccaaaagcaatgctttaaaaggctattaatgcgaggctgtatgaattagccttgaggctatagcttttgttgggctaattgaggcttacacctcaccttgttgaggcttacagctttgaggctatagcttcaaggttattgaggtttaagcctcaaatatccacagggtttttgacctttaagggtttttgacctttatgggtttttgatttatactttataagaggcttaagtctcaatattcaatgagttttaatgggttctatgacaatccatgtttttgtgtgcttttgatacaaatttcatgtgttttgtattgggtctcgacttacttgaactttttatgaatagttttagttgacttccaattaatcttttaaatggaaaggaaaaagagtgattgaaaaggaaaaatagaggaattgctgattgtcttagtgactgatttgatatataatcattatcttattattgatagataagaaaaagcaccactacaattgacggatcaagaagaagaatgggggtggctattaatactaatagggaggataatattgccattggatatgattatattccttggaggaacctacaagtgatagtgatagtaatgttgaaaattatgtcataaaaccatgagagagagctaaattttaaaagagaaaaaaggaccatattagaatctattaaaaatgaaaaataattaattttatcattacaaaatttatgcctttctaattattcaattttcttgtgactttgagtatttttatgttttttttttttgataatttattattatttattcatttaagttgaggcttatgcctctttttgcctcaaggcttaggcttcgcctcatttgggcaaaatgcctcaagatcgtctttagtcttctaaaacattgcccaaaagtgcttctattaaagaagtcctggacagcaaaatccttgaatttcttttaatccaaaggagccacattattataaagattctggtaaaaaaaaatcattatgaagattgcataggttccagtgttgtcaaaagcaaaaggtatctcaaggtgataaaactccttttagcataaggcgaaaggcataaaaaaaggcaatagtttgattataaattataataaggcaataaaaaatatacatatatttacctattcgatacttaaccaatataagtgttgtcttcaacaatcaatactatttatttttcatccttcatgatatcttataaaattaacaaaatagtaataattattcaaagtgttaaatattataccccacatcataagaaacatcatattgtttagaaaaattcatgttgtctaaatacatattctaattttctagacatttaaaaatcagaataaaaaacaaaataaaataataaacattctagagaagctttaagtttcatctttgaaattaaatctgtcatcacttccatcaaaactagattgatagccctccatctcattatctctttgattgataatataatatttcatcttatactttgtttaatccaatattagattgagtgaaattataatctaagtatgtttaatttgaacacatgggtcaaaggcgatcgcctctatgccttacaccttatcccaaggtgatcgcctaggtgttgcctctttgaagctgccttccctgaggttttaagaggcgattttcatctaccccgcctagcctgatggcctaggtgacataggtggtcgcctttaataacactaataggttcataggactccacccctctcttatctaccaagaactttgatagaaagaaatgcaattcttggggcactacctgacatgtcgccactcctacactaatcaaaactggagataagacatgacctattaacagatgaaagaatggtcaattgaacattacttttacacgtgatgcttctttaggaaaaatgcctaactaagcagaatgttggtgaaagtcaatttgttgtatgtcatcgacttaaaagttgatggacctgccatcaataaattgtttctagtaggcaagaataatttattgatatctctagatgaggtacaatgatgaggggacctttgaagagaagagaaaacaagaggaaagataaaatgcctgttacatgataagattgtgagcaaatgtagaagcagaaattccgtttaagcataaggttccctgttagttgcttgtctgcttctagatttgctaatcttgatctccatcattctctcttgagttttggattttccttgagtagatgggcaagctccatggttcactcatctagtagacgctcaagcagcaattggagaaaacccttctacaaagatgttgctaaaactaaattttagcactgtttcaaggcttttactggtgttcactgctcatatctcagccccaaaggcctaattatactagctagcttagaaaaagtctgagcacaactttatttatttatttattttttaataggcacaactttattatgatttttgaaggagcccttggattgctaagagaacatcaagtaggtttaaattggacgccacctagtgtagaaggagatcactagaagatggtaattctccttctgtggcacgatgaagccgtagtttccattccatggatatcatgctgaatagcatgtccatgaattctttccttacatgaggtcgtagagaagtcaagaattgagtcaagttccatggcccagtgattgggttctatcacttgttgactattcttctattcctctcaaatcaaatcacctacaatgtacctaacaaaaaacactgccggtaaaactcttcccttgggtaccatgcctagcttgtaagatttgtttctatgtatgtgggagagttaaggtgtgcactgagtgggaacattaccatattgggttactttaacttggatccttgccagtaaacctggataggaaaggattagtggagtgtaatatttggggatcatggggggcataggggttggagacttggagccttctctaagcttgacggctaggggctagctatagagtcgggaattctagtctttttagaaagctctgattcaagaaaattctctagatttcaacttatttttggaagggtactggccacatttatatcctaggtctcatagaagaagaagcaaggaccttggcaattggatgtttagcaacataagaccattgatctacctagagttttgagggcccttccacttggatctcttgattagataaccaggcaatggataagttgggaaagcatgttgtctcatagctagaggtttttaggacattccttacctcttcagttgtgtacttggctctgtggtgggctttgtggttactttgttgctggtttgtttaacttccttgtttttattttgttttatttaattttttggttcttttatttttgataatttcaaacacaaattcattagtaccgagtaagaagtacatgcgaaggataagaaacctttcccaaatatacaaactttaatgtcaagatctgatgtataatgtctcctatatatcactcacaattaaacaaaagaagtgaggttctgttctcctaagaagttaatgcatctacaaaaggagactgaagctttgcttcaagatttgttattttaaacctctaatacacatcaagttccaattccaactatgctgaataacactaagaggtgtgtccttgaaatcttaagttgttgaaacctaaaaggaggaatagaagcaaattatatcctactttgttgttttaaacctctaatacacatcaagttccaattgtgctgcataacactaagaggagtgtccctgaaatcttaagttgttgaggctaaaaggaggagatatcctatattgattctatacttttccacttatcccaaaaaaatccttgcatttctctcctgccattctatccaaatcaaagtggggtgagtaattttccaaagagttttccctctttctatactcccaaatggtcatcatattacttatgctcctaagaggaactcaatatagtctaattaggctgaataatctatgtcaaggcactatagttgtcgggcaatttaaaaagagatgatcaatcatctaaccactcgttatacagatagtgcaactgttagaactaagggctttgtggagtcttttgatctatagcaagtcattggtgttgaccttcttattgaccactagcctagtgaaagccttgaccttagatggggctttagattgtcatctgaattttgctggaagaaatgaacaagagctagtagattggacaaggttaaatggaaggattttactaaaaatatgcctgaagaagatgaagaccaacctctcttatctaggataaatagaatcaagtgcacacaagagagggagcagacattagtctttccaaatcctcttatgtccacatcaatgagattacaaaaaaagataaggttccaagaaaaaggaaaggaggtttcaagaacagttgagataaaggagtttctacttgttacaactctgaaataattcgaaattaagaatagataggttgatccccccaccacaggtcttcccaaagcgaatgcttacctcatcccttgccacaaaacaggtacggcctaagaaatctttcttgagggatatttcatcttccgcccaatattagaggaaatggttgggccatgaagatgaattatctttcttttttatggctcctttttttatactagaaggattattcatcttcttgtactttttttctatgaataaatttgacccaatattagaggaaaattgaagagatccattggaatttgaaaaaattttctgaggataaatttgacacaatgtcaaaggaaaattgaagagatccattggaagttggaaaattctaactgggatagaaaattgaaattgtctgtttggcctgaagatttttggaaatctgggtttcatgaaatacctaatttggccatggcttgaaaaattcagtaagaaattcttaaattcaaaaatatgaactgacatattttgataactgggagtcttttttggatgaggtgaagccttagaattactcttgactcttctttatcatttattctattgatatattttttttatctgtatctataagaaaccacacttggttagggatgctaagtatcctgtctttctgcccttggctattgtggaagattttttgcttttggatactgtgttggctgccatgttttctttttttacaaccttccaatcactctttttaaaatttttaccatttttattgtattttatccttgtgttgctttttgcttgtagacatatcattatttgcatctctaattctgtcgttttcttgaatctatgcagctttttgcagagagttgttggttctttggtctctc

SEQ ID NO: 10869 - DNA, 11948 bp, Vitis vinifera
  Intron number 4 from transcript GSVIVT01012779001 (locus G SVIVG01012779001) derived from phytozome v7.0 (chr-ID chr1 8; pos 23380273 to 23392220)
tttcatttaaatagtgtttggcgagactccaggtgaaagttgtttgatatttataggttctcttgtaaacactggcatgtttgtgatatttcccaatgtcatcatcaagggtgtgattattattaagcaataagttttcctaatgattcatgctaattccatgtgattctacttgtcatgccaatagctaattactgtcaagttgtgactgctgttgtacacaaatgtggtttgtttgaggtggggttaaataaaacaatgatttttgtttcttttgaagtgtcaaacagattttgttatactatagggtggttttggaactagagcacagacttagctgatgtctcagtataaaccagaaaggcaaatgccaaaatagatgttcatttggattgtttcctgcataggcagaagttgaatttcaatcaacaaagtttggttagactttgcagacaactttgaatttagtttaaaatatgctcacgctttgcaatttttcttctttctgctttattattctggtagtttgattcatttaaaaaataataattatctaaatgatgtagaattggctactgaatgtcaacatgtaatgaacttttgctgaaatgggctctgtacataagtattgcattgataacaagagaatttttactgattgtgttacaagattgggcaaaataactcctgatgtacaagaagctttcagtgtggcaagtcaaaagagtggccgaagttggaaggatcctcaatctgcaggtgtggaactctagatggttttggtctttggtgggtcaggcattagtgcccccatgaggacctctcctctgaggcacaagctgtgcactatgagcccaaggagattgggcctcctctagccttgtctaaggtcagaatcatggaaaatagttaagctttttggaggttcattggcattagaggttgagagccacttcgttaaaaggaaaaaaaatacgaaatttgtccacaaatagataatgctcatcaaggacaaacttcatcaaatttgaaaattggggaagtttggattgatagtgaggaagatcttgtttcaggagccaccaaggaagggcataggactgggctagaaaagataagactcctagtttggatgatggtgaagaagagttgaaagatatttaggcctattagctaggtaggaagtgtgtgaaaattgcttgtcaagattcttcctcatggaactgggaaggttattggtaaagtaacttcagaatccagaagtgtgttgtggaaagcagaaagttttagatatggcgttaatgtcagactaggttgttggtttgttgttgagaagtgactttctaggactagtttgctaattgcatcataaaaaaaagagtatgatcatgttaattgagatttccttttggacccattttcttgcgtatgtttggtgaaaggtaaattaattggatcaaggtctatatctcttaggcacaatactttaatattctgtatctttgatagctccaggtcattgtagtgaagattaaaaattctgtggaagcagtgttggttcaaggttttgtaatggagttgaggagttaggaagcgtgttgcatttctcatcttcctttttataatgactcttctgtggagcaaattagagttaacttaggtggtgtttgataaaataaaaattatgtgctgaaaaatcttagtgttgaattataagtaataaattaatagtaatgaaattttttggatattatcctagatttaagtgctgaatgtaatttaaccatttaatattaaaaatagctgaagtactgatggaaaaaaaaaaaaaattagctgaagtctaaatatgatttctttttacaaatttaatcttatacttatcatatgacattttagaaaatttaagcattgtgaatagtgcctcgtgaaagtaaaatatattgtttaagtaaaatgattaaatctttatttaataattaatataattacacatgttatggttaagattataaaaaatattgtaatattttattctacaaaaatttaatgactattttttaaccattatttatttttgataaatctttaaaaattttcttgatagttaccttttgccactacggaaaaaaattgatgttaaacctttattcaattctttgtcttaatttcaaaattttaattataagaataaagttaattaaattaaattcttatttgtaataatatttttattttatataatgttgaaataatgccaaagttaggactttaatttaggaataaaaaaggagagatcatttaggatatttccttatgatttagtttcctaattttaggagagaattaagctagattgattgtttcttattcagtcatttgtgtatatatatgtgtatggtgtgtaccgattcattatcaatataggagttcagaaattcttcatggtatcagagccagttttctgaaaccctaatcccttctggccacctcttattcaggccatcactcattccggccaaatctttctggccatatctcaatccgatcatctctctctctctctcattccggccatcagtccctgttctcagagccaagggagaaaacactttccagtcagtcgaatagtcgtcagaaaacactcaccgccggcaacttttccggcgaactttccggcgacagtttttttctacaccgcaaggagcacctggagtagatctccaatttgtcccaaagcaccggaaccagaaacccatccacgcgccgcccacgcgcgtttttccggccggcgactgcatctcacgcgccggcgcgtgagccactttccggcgacgcgcttcctcctccaggctcgcctgacgccgaccagccacccttcctacctgtttgtgcaatccgagccctgcacgtgcctcttttggggttcttttgcttccgcgggccctctgatcagattttccggcgtccttcggctatttttttctcaactccagtccctgcacgtgccttgaaaagtgttcttctacctttccggtccatgacaaaatacggaatggcatcatcacaagtatccagcgtcacgtcaccagaatcagggggcagatctgaaattccaaaccttggtggcaatgattcctctcctattctcatcacaggacacaaattaaatggccataactatttacagtggtcacaatctgtgttgctgttcatttgcggtaaaggaaaggatgagtacctcactggagaagcagtcatgccagaaactacagaaccgggtttcaggaagtggaagattgaaaacagcatgatcatgtcatggcttatcaattccatgaataatgacataggcgaaaatttcttgctgtttgggactgcaaaggacatatgggatgcagccaaagaaacttactcaagttctgaaaatacttcagaactgtttcaggttgaatcagctctacatgacttccgccaaggagagcagtcagttactcagtattacaacacactcacaaggtattggcagcaacttgacttatttgagactcactcatggaaatgttcggatgatgcagcaacatacaggcaaattgtggaacaaaagagactgttcaagttcttcctaggactaaacagggaattggatgatgttagaggccgaatcatgggcattaaacccctgccaagtctcagggaggctttttcagaggttagacgtgaagaaagtagaaagaaagtgatgatgggatcaaaagagcaacctgccccaacattggatgcctctgcccttgcggctcggtcatttaatagtagtggtggagatcgtcagaaacgggataggccttggtgtgattattgtaagaaaccaggccattataaggagacttgctggaagcttcatggcaaacctgctgattggaaaccaaagccacggtttgacagagatggcagagcacacgtggctgccaactctgagagcacctctgttcccgagccgagtccattcaacaaagagcagatggagatgctacagaaattattaagccaagttggcagtggcagtactaccggtgtagccttcactgctaatcgaggaggaatgaggccgtggatagtagacacaggtgcttctgatcacatgacaggagatgctgccattcttcaaaattacaagccaagtaatggtcattcatccgtccatattgctgatggttcaaagtcaaaaattgccgggacaggttctataaaacttactaaagacttatatcttgactctgttctccatgttccaaacttggattgcaatcttttgtccattagcaaattggctcatgatctccaatgtgttactaaattctatccaaacttgtgtgtttttcaggacttgaaatcggggaagatgattggcagtgctgaactgtgttccgggctctacctcctttcatgtggccaattctccaaccaagtctctcaagcaagttgcgtacagtctcagagtatgtcagagtctttcaattctgtgtcaaattctaaggtcaataaagatagtgagattataatgttacactatcgccttggtcatcctagctttgtttaccttgcaaaattgtttcccagattatttatcaataaaaatccagcatcttatcactgtgaaatttgtcagtttgcaaagcatactcgaacagtatatcctcaaatcccatacaaaccttcgactgttttctctctagtacatagtgatgtgtggggtccctcccggataaaaaatatttctggcactcgatggtttgtgacattcgttgatgatcatactcgggtaacatgggttttccttatgaaagaaaagtcagaggtcgggcacatttttcaaaccttcaatcgtatggttcaaaatcaattcaattccaaaatacaagtcctcaagtcagataatgcaaaggaatactttactagtagtctcagtacttatcttcaaaatcatggcattatccacataagttcttgcgttgacaccccacaacaaaatggggtggccgaacgcaagaatagacatctcttggaggttgcccggtgccttatgttttcctctaatgttccaaactatttttggggggaagctattctcacagctacctatttgattaaccgtatgccatccagagtgcttacctttcaatccccacgtcaacttttcttaaaacagtttcctcacacccatgccgcctcttctgatttaccactcaaagtatttggttgtacggcattcgttcatgtgtatcctcaaaatcgtagcaaatttgctcctcgagcaaataagtgcatttttctagggtattctccaacccaaaaagggtacaaatgctattctccaaccaacaaaagattttacaccaccatggacgtctctttctttgaacatgtcttcttctatcccaaatctcatgttcagggggagagcatgaatgaacatcaagtttgggagtcttttcttgatggtgtaccttcttttcactcagagtcaccaaatccttcccaattcgcgcccactgagttgtccacacccatgccgccatcagttcagccagcccagcacacaaatgttccttctcccgtgaccatccagtctcccatgcctattcaacctatagccccacaacttgctaatgagaacttacaagtttacatcaggaggaggaaaagacaggaattagagcacggatcacagtcaacatgtggccaatatattgactccaattcaagtcttcctgaagagaacataggtgaggatagggctggagaggtgttaattcccagcattgatgattctactttgccaattgcattgaggaagggtgttaggagatgtacagatcatccaattgggaattatgttacgtatgaagggttatcaccatcttacagagcatttgctacttctcttgatgatactcaggttcccaacacaatacaagaggcattaaaaatttcagaatggaagaaggcagtacaagatgagattgatgcacttgagaagaatgggacgtggactatcacagatttgccggttgggaagaggcctgtggggtgcaagtggattttcaccataaaatacaaagcagatggatcagtcgaaagattcaaggctcgtttggtagctagagggtttacacaatcctatgggatagactatcaggagacttttgctcctgttgcaaaactgaacactatcaggatccttctctcattggctgtcaatcaagattggtgcttgcaacaactggacataaaaaatgcgtttctaaatggggacctagaagaggaagtctacatggaaataccacctggtttcgaagaaagtatggcaaagaatcaggtttgcaaactccaaaaatcattgtacggccttaaacaatctcctcgagcctggtttgatagattcacaaaagcagtcctgaagctgggctacaaacaaggtcaggctgatcatactctatttgtcaagaaatctcatgccgggaaattggccatattgatagtctatgtcgatgatattattctatctggaaatgatatgggggagttacagaatttgaagaagtatttgtcagaagagtttgaagttaaagaccttggaaatttgaaatatttccttggtatggaagtggctagatcaaggaaaggaatcgtagtctctcaaagaaaatacatactcgatcttcttaaggagaccggtatgcttggatgcaaaccaattgatactcctatggatagtcagaagaaacttggtatcgagaaagaaagtacaccggtagacagggggagatatcagcggcttgtcgggcgcttgatttatctctcacacactcggccagatattggctttgcagtgagtgctgtaagtcaattcatgcacagccccactgaggaacacatggaagcagtctacaggattcttagatatttaaaaatgacaccagggaaaggcctattcttcagaaagacagagaaccgtgacactgaagtatactcagatgcggattgggcaggaaacatcattgacaggcggtccacttctggatattgttcttttgtctggggaaatcttgttacctggaggagtaagaagcaatcagttgtagccagaagtagtgcagaagctgagtacagagctcttgcacagggaatctgtgaagggatttggataaaaagggttcttagtgaactgggacaaacgagttcatctccaattctgatgatgtgtgataatcaggcagctataagcatagcaaagaaccccgtgcatcatgacaggaccaagcatgttgagattgacagacactttatcacagagaaggtgactagtgagacggtcaaattaaactatgttcctaccaagcaccaaaccgcagacatcctcaccaaagctttacctaggcctaacttcgaagacttaacttgcaagctgggattatatgatatatattctccagcttgagggggagtgttgaaataatgccaaagttaggactttaatttaggaataaaaaaggagagatcatttaggatatttccttatgatttagtttcctaattttaggagagaattaagctagattgattgtttcttattcagtcatttgtgtatatatatgtgtatggtgtgtaccgattcattatcaataaaggagttcagaaattcttcatataataaagactttatttttttaaaaaattaattttaatttcaaaaaaagatttagcatgcttctcataaatcaaccacttttgttactatgtttttattttttatcttaattaaattaattataaataatatatgaattatatatagatttataattaagcataatttaatgatactctataaatagtaaataataataaaaaagggtgaatcatttaatttgctttattataatattttttatttaataaaaagtattttgagtacattgagatctcaagaaatactaggaaaagggaaaaaatattaaggaaaatcattttcctaaaagaaatgagatagaaaaaaataagaaaaaaaatattatagaaaattttaaaatatgttcataaaaacaataaggaaagtttaagaaagtgcatttgttaacaatttaaatttatttctcaaaatttttatggataacaaaataacacaagtttattcatcattttctttgcttctattttttctttctatttattgtttcaattttttggtaactaaatatagaatttttgaagtaatatataataagattatgaataaaaataaattttagagtaaaaattgaaataaaaacagtgaattatttaatttgctttatcataatatatatatatatatatatatatgttaacaaaaaccatttagagtatgttgggatctcaagaaatggtaggaaaagggaattcaatatacttctcataaatcaaccacttttgttactatgtcttttttatcttaattaatttaattataaatagtaaatgaattatatgtagattaataattaagcataatttaactatgctctaaaaataactcataaataggaaatattaataaaaaacggtgaactatttaatttgctttattataatattttttctctgttttttttttttaatttttttgataaataaatatagtatttttaaaataatatataataagaaaatcaataaaaataaattgtagagtaataattgcaacaaaatagaaaaatatcttgtatggatttgtgattttcagtttttcactaatcctttaatgaaaaatcagttcttataaataaattaagtagagtttatttcaaattcttattttattatattaaataactaaaaacaaaaaaatttattttaaaagaaattctattttaatataaattagttaaaaatagaatttgatttaatataattcccaaacatcaactaaaatagtttttttttttttttttagaattttattctattttttacatgaaggaactaataataatgataaaaagatttaaaataagatatatttaagtataaaattatttgataataaaatttttattttataaaaggataaatatggaataaaaaagttatataatttaaaatttatgtgttttgccaaagtgattggttaagtcttatttggtaaacaaattcagtggtttttgtgtggtgtttggtttcaagtggtttaaaatttatgttataaaatatgcttaaaaagtgggacccatcgtcttttttttttttttccacttgtaattggttaactctttatcaaacacccccttagattgtttcgatattatatatgctccattttaaaagctgtttctggtttgaaggtctacttagataagagtacctatattctcaagggagtgtgactgatatttcttctttgcccccacccttcctttttgtatgagtgtgtgtgtgtgtgtgtgtgtttcaaagtaggaaggttagctgagcctatctgtcttcctaatggttcttatttcaagccaaaggcaggttaggatcttatagaggtatgagctgagattagccacattggaaaagtcaatgcctctctagagttggtagagtttccttaaccaagaacactttattgagttacctagttaacttaatgttaattcttctttcattggcttctatgtgcaaaaggttgaaaagacttttgttatgtttgtttcttagggagagtctaatcttagaactgagatgtgttgtgccttctccatgggggaagggggataacgtggcttgcaactagggtttggtggttagaaagctaagcatttgaaacaagctttcactggtcaaatggttatggaagtatgttgttctgtgggattgccttgaagggtggtaaggagtgagcatgggattcaaagagaaggatggtgttctgccttgatgaggggttctcatgaaaaaggcttgttgaggggcattggggagatgactttgttggcttatattcttcattctaggtaatagcaaagtgtaaggttctagcatcatgtatggtagtagaaatcgcccacttaaaagagttttccttatccattttgcattcctacggatagaaaggaattgataactttgtagctagctattccagttaaccggaggtaggtgggtattgcaagtactattttatgcgagagtttcatgtaggaaactgtagatattggaagactactgagcaacaattaatgatgtttaggctagatggattgcagaagatagtatgagattgagggattcaaacatgggggcattttcgataaagaacctttatttcatttgttatgattttaatggccaagccaactaactagctacgaattgttggaaattggcaacacttcctaaattgttatttagttttattttatctggatggtcgtttagaagagaattctaaccttggaccatcttaaggtgacaaggtggatgtgatgtcctacatcagatatgggagaaagtttttggcgctatatatgtataggttctttttaactttgtagacgtgttttaaagtcgtgagggtccctttggacccagagcaaacatatctacatagttgggtgtgagttgttacaaatggtatcaaagttgatccccaatcctgatgtgagagtttgtttggtctcatgaggggtatttgtctatttggctccataatcctatgggacacaacaaggatgttgtgtttgcatgagaaagtgtttgtgatgtctcacatcagataagggagaaagttcatgatgctatatatgtatgggctccttttaactttgtagatgtgttttatagctatgagggtccctttgggcctagagcaaacgatatttacacgattaggtgcaggttattacagtggagcttggtatatggttgtgcctgtgcaagaggaatgaggaattagtgaaccattttttccaccaaccaattgcttgggagttgtggtctatagttttctctagattccaaatttcttagctgctctcgtctttgtattctagatttcttgtattctttctaactctctaatgataggcattcaagatctatcaagaataggtgacagatgtataggactatccctcttgtactttggcttagtgcatttggacggatagaatcatgaacttgtaacttgattttaagtgatggagacaagttacaatcacctagaaaagtataccaaaggtgtagtcataattgttaaaatcttacaataaacgatatggcaattcttatcttaagtgtattttacaatacacacacaatacaatgatacaataatacacaccttcaactatttcataatttttaagaaaatacaaatttttatttttatttttgttaaaagaattattatatttattcccaagctttattgttattgtgagtagttccaaggagtcttaatgttatgtgtaaagctggtaagtcttttctaaggaaaacatgaaaaattttccaacactcaatgttttcttgtttttgtgatgccattagaacttaggtgtgaagtctatggtattgtgatatatgtcatccatctatcattcctctttcattttcctgttctgcatcaccaaaaactgtattatcaattttagaaaatatattttcttcacacctatcaaaaagaaaaaaaaatggaaaatatatttcttcacaatataccaattattcagttattcagggtatcctttttggttgattatctttattctcttagtggtttatctccataagaaaatcatgctttaatgagtagaaaatatattctggtttctttcattattaagctgcaatatactggaaacagtcggtcatttttcttttcttttcaatgtattgcagcaaatttggggacatatttg

SEQ ID NO: 10870 - DNA, 5385 bp, Vitis vinifera
  Intron number 6 from transcript GSVIVT01023545001 (locus G SVIVG01023545001) derived from phytozome v7.0 (chr-ID chr1 4; pos 9886882 to 9892266 reverse strand)
ttttttttttttttttgggtggggggacggggtgggtgggagagagaatttgttgagaaagaggattccaaaaatttgatggtttgattctgccaaactttttatattgcttcaaagtcaaggttccttgttttttagctacatgacaaatctattactattagcaaagcagggacctaagcatttaatttcttttctacgaggggtttttcttttcccacctcctttagtagttcaactactttttttgatcgttttttattagatggaaaaaccaattcattcacttgataataaaacagtacacatgtataatagtgtctgagactcttatgtaatgtggtttgtaatataaatatttcacttcacctttgtcattgttgtaaataagaactcttcttctctagggatttgatgtaatgcaactctagaatggttgtctataattacgtgggttagagtttaaggagaggaatgaggaataaaaaattataacaatggagaaaagtcatgtaaaatataagaaaagagagataaagtagaagagatataacctaagaatctcattgagaccttctaggaatctcacctagaagaaaatcaatggaataccattgagaattgcaaggaatgcaaaggaagcttaatgttattgatcatcgatgttttgataaagaagactactttctaaggactcaaaatagaaatattagaaaatagaaagtttagaatttcctttaaagagaattcaaaaacttctcaagttttaaataaaactcaaataccaactattaactaatcatgatagctaaacaactgcaaaattacctgaatacccttaattaacttaggactttttatttttatttttattattttttatttttaaattctttccttccattcttgaatagatcttgtacatttatcctcattatatctaaagatcataggcttgttagcttggtggctagcctacatgagatctaagctcaaatcctctccaactgaatatggtaagtgcttcgtgggacatctacccctcctaaggaacctaacattgaggggctaatgcatataaaacatttttagttgtcatttgtgtttgttgtatagttgttttggttttatttatttatttttgtttttttctatttttttggtttgtcttttcgggtggatgcgcagtagggagagtggtgtttatagaaagttctttgttaggaaaagagatgattttatgtttcacttacagtttgctactattaccattttttcctattcatgggatgaagggaagagttgaatccaatcttactttgaaatgccttgagaaatctgtaatgacaacccttctaaagtgatttatgattgttaggcatcaatatagatcaataagttgcaagttttattgattccttgtgtggtgggacagtccatcaagtgcttaagcctttgtttagtaggtaatttagggtgttaatgatttggaatttagagttataaaagaaaaagaagctgaaagtttctttgtccacttgcattcttcactattagttgggtgagtatagtttgaattttattaacttttctctcatttaggatccaaacagagagagaaggataggcttggttctcttcatctcttcagaatctcactaagaactagatgatggtattgaaattaacagtaatcattctaactcctaccaaaatttgatcactagtccaacttctagtccatgcccttcattatcttgtttaggttctaacgttcctccatagtttaggtttaggctgttctttttcttgtccttacgttcaactaatgatactgtagattaattagcaaaatgtggagccaatatgagggtttcttttgtaggggattttttacaccattgagtagtacattgagagtacattgtttatccattatatatgttcttgttttatccttcattttgcgttgctaccttgctcctcttatttattttttaatattttttttatcatccttcatattttattaaggatttattatcgtttgcttctacttaaaaattcgcatctatgaaatgtttttttttttccctttttttctttatcttgttttgtttttttcttcttggattaggggttgcttgttggccatttttgcaatccttgtaaatggaaatgctaaaggttgggttaagacaagtagaggtttaaggcaaagagaccctccttttcctttcctttcctttccttttcaccattgcagtggatgccctaagtaggatgatgatcacaacaaaggaaagcggtttattagagggtttcatagtgcgctggaataggactatagtgtctcttttacaatttgtaaacgacacaattttcttctttagagcctctttggaaaatctgcagaagctcaagttgatccttttggtttttggggaaatgtcagggcttaagatcaatttacaaaagagcactctctctggtattaatataagttaggatctagtatctaagttggcctcaatgcttgattgcaaagtttcaaaattattcttatcttttttgggacttccattaggaaggaatcataaggcaagtgggttttgggattcaatggttgatagaatctcgaggagacaggatggatggaaaaaagcctttttatattttttgtggtgtgggggagtgtataactctagtttagtcttgcttgtctcacatccctagctatttttttatatcttttcaagatcccaacatcaatagctttaaagattgaaaaactgcaaagaggttttctttggttggggattggggagggtaaaaaggatcatcttatcaattgggatatagtgtgtaggccaaaagagtttggatgtttggggattgagaagacttctataagcaatcatgctctcttagggaagtggctctggaggttccaaaacttttcttcacacactcgctttatagtgggtggtggggcgaggattcatttctgggaagatttgtggtggagaaatctgctattgtgttcataatttctaagtctttataaagttattacagtgaaaaatctcactatatcaactttccttggtaccttctcttcactagcgtggaaccttaatttctatcacaatctcatcgatctggaaattgaaaaccttgaaaggctcatgtcctcacttactgatgtgcacttgtatccatttgcggtaggagtttagtctttatcatcttcaagtttattcttagtaatttatcaaatccaatcccattctttctagccaaatttttatggaaatcaaaagcttcatcaaaggttagtggtgcacaagaaggtaaacaccaatgacatgctacagttgagaaaaccttacaagttacttggtcctcattggtgcatcttatgcttgggaagtggagaatcaattgatcatctctttctatattgcttgttaacattgggattttggcacaagctttttaatttagtaaagatggattaggttccgcacaggagtatatatgacatgatgatcatctcatttaaattttggggagttccattagaggcaagaccttttggctaatcatttgcctcactatgctttggattgtatgacgagagaaatgttaggatttttaaggaaaagtggagaaaggaagagatgatttagtatctacttcacttctattcctccctgtgggcttcttgtaccatcgtctttagaggcgttccactcaatgttgttcaactcagtaggcttttggtttgtaattcgaatgtggtggataacaatgagagaagttgagtccagttttgaggaaatgttacctttctgtattcttaagcgacctatacctttatctatagttctctttgtatggtggaggtggttaggcttactttgatcagtattctgtattttgtgggaaggacctctgatccttctcttgtactttttttcataattaatatatcttttgtttctgattaaaaaaaagcatattattagatatgcttctaaagaagaaatcttataaagctcctaactctaacatgcaagtcatatgcaaagagagatggtggggttgttgattgtaaccaaaatgatgaaggttggcaaattttgcattttggcaaagcaaagcttgaaattctctttcgtcctccttttcttttgacaaggcatagcttgtgctctgctggcatatttcctcctccttactttggagtgccttcttgtcttttcacattgcattatagattctagatgaaattttagcagcaaatgaattagtggatgaggaaagatgcttaggtgaggaggatgtgattttcgagattaattttaaattttttatgatcatgtggacaatgctttagaaagaaaaggcggtggagttggattaggggttatttggttttttttgccattttaataaattgttgtgctaaaagttggagtaagtttttagagggttaagacaagtagatttgctcttaccctttttcactattgtggttgatgttttgagtgttcttggtgaaagctgaccagcataacatgttggaaagttttttggttggtagaagtagaattagggttttttatttgcagtttacaattgacactacatttttttctcaagagctagaacaaaagatttacaaaactttaatcttattttgttggtctttgggcacatttcaagtcttaagattaagctaaagaagagcacccttttaggtatcaaccagaatcagagttgtatcacaggtttggctaccttgctagggtgtgaagcctcaaattggccttttctgtgtttgggtctcccttggggggagggaaggttgggaaccctagagccacttcattttgggccttggttcttgataggatttcctgaagattggatggatggaaaaaaattgtctagtctctaggcgacataataaccttggtacagtcttgcatatctcacattcccatttaagatcccttccaaacaagcatttaagattgagaaattatagaaatattttctttgattaggagttggtgtggaaaggaggactatctcattagttgagaccaagtgtgtaatctcaataagtagggggagttagtttggggaagatatctttaaagaatagaattctcttaggacagtggttgtgttggtttctgagggagaataatgttttatgatgatctttatggacatacttccactgttaggaatggtaacactctagtcaagttgatgcagtacagaaagtaaaatactaggagactataattgaaaggaccttaggaatcactcctagaaaccttaggcttcacaaaaagtattatttgcatc

SEQ ID NO: 10871 - DNA, 5393 bp, Vitis vinifera
  Intron number 7 from transcript GSVIVT01031724001 (locus G SVIVG01031724001) derived from phytozome v7.0 (chr-ID chr3 ; pos 3837767 to 3843159 reverse strand)
ccagtgtgaagcaaccgtcagggatgaaagtttctgtgcagccctctatagtttcatttgctggtaaatacagcaaggctgaattcaacatgacggtagagatcaatctgggagatgccagaccacagagcgattacattggaaatttcgggtatttaacctggtgggaggctaatgggactcatgttgtgagcagtcctattgtctccgccattgcacctatcatcagaacttgaccagcaactgatcaatcttatttcatgaccttgtgagctgttgattgatcatttctttcggaagagcatagattttcatgggacctagctggcaacttgattaagaaatgcatgtcagtttgacaggattcaaaacaaataaaattatttttacttgatagttttcttctcatctacccaataagctgcccattaacatacaatttcactagcaccatgcaaaatgacaataagttttagtaagtgattgctatgccaattagcaccaaccaaatcaatctaaacactcaaattgaactcagctttgctgaatattcttctttcttttgagaatgaggataagaatgtccttccttgtggcaagctcaaaagctataatgtactctgcatcccatgcaagaaattgtagtctgctacccctgtatcatacagaatgctgggttctatagccttaaaaatcaagacgggtccccggagctgttcaattagaccctcatggctagaaaaataccagctgtaaagttggcttggtacccaacatcaccatcagaaattcaatatcaactgctggattatccgatttgatcatataatcattcatcagctcggtattttttggggccagaagcatttccacctgaacgtgtcacagattgctgcaaaagctacttgtgcaattgggtcctcagatgacgggaggagggaagagaagccagacccatcagctgctagctagatgtaaaattagtgatcaaaatattcaatagttcaagcagggtttcaagacctcccatgcagagaggtattcttgtgggttgtcttagaggctaaggtaaaaagaaaccactgtgttatcataggtttagtatggaggagtagaggggccatttgacaaggtctgtcgtgatcttgtatgatgaaccaaaaggtatgaggaattttcccacaataatggcaatgttacttgtcaaatttgttggaaaattcaatcactttttcattgattgctagcacatgttttaatattcatttcagtctgaagattttcatcaggccctagcccctcttgtccttgctgactcaaacgaccgctccttttatgctgatttgggagccgtgtctcatatgacaaatgacaccggtaaattatcccatatcgaaccatataatagtactgatgttactacaaatgaggattttgttgttaaggatcacaattaaaggaaaatagcaaaggggcataaaaaaaggggcagttctgtcttagatgaaatttgtcaaagatactatctctcttaaaagagaagaaaaatcttaataatacttgatagatgactagacctgctatatatgtattagtcatcaaatgggaaattgctttaaattaccttttcatcgtttaaataaaatatcgaaatattcttttgaacatagtgtgtggctcttcttgtcaagtagagtggtttttagtagttagcaagctgtttgttgtaactaattagaaagttgttagtaactaatctttaaattcctgtatataagaaacagagtacccatcagtgggttgccggtcgtaactcaatttcagttttccatctctctggttttctctcaaacagatgttttgcacatcttcttcttctcttcatatctctgagttctttcttggtatcagagccacaaactaacatttgcaaatcccttttccatggcactagaaggatcagcttcttccactgatcatcctaactccagttttactcatcatacaatgtcatcgttgaatcaagcattcacggtaagactcgatcaatcaaattacttattgtggcgaactcagatgctcaacatcatcattgcaaatggccttgaagagatgatccatggaaagatccctgctccttcacgatttcttggcgattcagagaacataaatccagaatacagtatatggcaacatcggaatcgcttagtgatgtgttgaatttattcttctttgacaggaggagtgatggcacagattatcggccttgatactgcatcagaaatttggactgctctagagaaaattttctcagcagcttcaaaggctcgtatcatgcagcttcgcttccaattgcaaacaacaaagaaagaaggattgagtaagatggaatatctactcaaaatcaagttcgttgtagataacctggttgcaattggagaaaaattacaaaacaagatcgaattctctatttacttgcaggacttggagcagagtataattcgtttgtcatttcagttacttttgggcatgaaccattaagcctagaagaaatccacagcatgctcttgactcatgaaagtcgattagaacaacaacacacaacagaagaaacaaatctcctgcaagcaaatattgcaacagtgaaccttcaatgacacaaaaaaaaatcataagtttggtcaattcaagactcaaggtagaggcaatccgaatcaacaacaattttatcatcagaattttggcagaagccgtgggagaggccactataacaacaatggtggaaattttggacatggtctaggaagaggtagctttaataatcattcttactcatttggaaacttcaataatgtttctggtggcagcaatggaaaaccacaatgccaagtatgtggtaaatatggtcacattgcgattaattgctatcatagatttgatcaaacttatcaaccatcaatgaacaatcatcttgttgcaatggttgcaacttcgtccactgttggagatagaggctggtacatgaataccggagctacgtatcacctaactccaaatctcaacgatttgaattcacatactccttttgttggttcagacaaagtcatcgttggaaatggtaatcgtttaaatatctcaaatattggacactccactatttcttcaacttcttggtctttaaatctaaagaatattttacatgttctacaacttaaaaccaatctgataagtgtgaataagttgtgtactaacaataatattactgtggaattctttactaatggatttgtggtgaatgatcaagcttcgaagaaggcttttctccaaggcaaccttaactatggcttatacaaattgttgtcttaagcacctagtagaagatatcaagatcctgatggtgataaacttgctggaagaacaagcttgacaactgaggtcccatgtatgtcatctgcattacaactttccaataaggcagttctatggcattttaggttaggccatcctgcacgtaaaatagtcaataaagttctgagtgcttgtagcttgcccccagaacattggacaagtgtttgtgaaccttgtcaaatggcaaagagccatcacttaccttttactttgtttgaatctagagtctctcagccttttgctcttgtacattctgatctatggggtcctacccctattgttggtgctaatggtgcaagataatttgtactctttgtggatgaccatacaagattttcttggttgtatctactagcttctaaagatcgagctatctctgcctttttgcaatttaaagtgatgattgagactcaatttgatactaaagttagagtgcttcaaactaattggggaggagagtttcaagcctttactaatactttgtgtaagtttgggattctacatagagtatcttgttcgtctacttctcaacaaaatggtcgtgtggagagaaaacatagacatatgattgaagtaggtctttccttgcttgctcatgcttctattccacttaaatattggtcttttgccttccaatctgctttatatttgattaataggcttccttcctctgtgctgaacttttcttctccacataaaactctttaccattgtctaccaaattattcttttctttgtgtctatggttgcacttgttatccttttctatgcccttttaatcgccataaatttgcatattgatcagttaaatgcacctttattggctatagttctaagcataaaggatatctctgtttaaacatgtccactggaaaaatacatatatcacgacatgttattttttatgaactagatttcccgtttgctaagtcttctacagttcagcctccctgttttgtttccctctctcattgtgccattcccttagctgtaccaaccactccaatatcttcccttttgtcttcttcatcaggtccactttcagagttggtttcagtctctgatactagtgtgtcagtttcctcttctaaggttgcacctattccaacagctcaacctccttcctctcatgttccttcttcttgtcatcccatgacaacgtgtgccaaaaatggcattttcaaacccaagatatttctatcccctactgagactatttttcctccaccttgtgaaccgaattccttcaaggaagctgctaaagttcctgaatggcagcaagctatgcatcttgaatttgaagctcttatgaacaataaaacatgggtcttggttcctcctccgtctaatcagaatatcattggatgttgctgggtttataaattgaagtataaacctgatggaactattgaacactataaggcacgtttggtggtgaaaggatttcatcaaactccaagttttgattactttgaaaccttcaatcccgtggttaaacctactactatttgtgtggttctctctttggcattaagtaaaaattggtctatcaaacaacttgatgttcataatgcctttcttaatgatgatttatctaagcaagtttttatgacgcagccaccaggttttgtggatccttctatgccccactttgtttgtaaatttaccaaggcattgtatggtttgaagcaagctccacgagcttggttcaccaaactcagctccacctaagttaaatggggtttttccatttctcaagcagatacatcaatgtttgtttattgtaacaattctgccatgcttgttgtcttggtttatgtcgatgatattattgtcactggctcaagttccttgctcattgaacaacttatatcctccttaaactcttgctttgctctcaaggatcttggtcttctcaacttcttccttggaatagaggtattcaattctggatcttctttgcatttaagttaagctagatatat

SEQ ID NO: 10872 - DNA, 8712 bp, Vitis vinifera
  Intron number 4 from transcript GSVIVT01016080001 (locus G SVIVG01016080001) derived from phytozome v7.0 (chr-ID chr9 ; pos 18540534 to 18549245 reverse strand)
aaattttttctgaagaattgggtatgggattcgctatgtggttcaattactgaagtggtggacgccaacttgttaagaggagaggatgaacagttcatggcaaagaagcaatgtatatcatcaatcttgggattggctatggattgtgtagcagattcacctgaggagaggattgagatgaaagatgttgtaactacactcaagaaaattaaactcacatatctagctagcagatattgaaaggactcgaggtaactgagctttcatgttcagtagtacttatatcctagttttatttgaatgagttctgtaaatttcatattctaagaacccactcaaagtttaatgttgtattctgatataagcgtgccaggtccttcctggtttgaattctggctgggtttgtgcctccaatagcccaatcaaagccggcctttgaccgggcttcccccaccatccctaagcacaacagtttagttaatatgtaggatcagacacacaaaactttaaaatgtttggtggttagtataatacaggtctctcatgcaccccttgaagccttatacaaggcatatgatcttagaattttttttctggctctcaagcatgttggcttggggcctactaccaaatatactaagggtgcatttgacaacaattctaaaaagtatttttagtctttttaatatttgaaagataaaaaattttaagcattaaaaatgttataaacactttctagaatcactaccaaacacactctaagaatctatttagtagtgattcttggaagtcattttaacatttctaacgctcaaaaacttttatcaaaagagttgttttcaagtgttaaaaagattagaaacatttcgtatgtatatatatttgttataagattgagataaacttgtaaagatagatttgtaaggaaaagtaaaagatactagaaggagcaaggtctcaccactcaaattatagataaaataggtggaatatgtatgagaggtttcaaggttcaatagttgtatcaatttttccaattctacataatcttccctatggcatagtaaaattattctatttcatttataaatttagatataattagtcaaaccatattaaaacctctcgtatctttgtacatggatgattttattcttatacaattgcacaattaagtgacattttaaccttcattagtacaaccaatggctccaaagtttttctagtataacaatggtaaaattttcttaaaaaagaaaaaagaaaaagaaaaagaagaagaagaagaatcctaaagtagagggaacacataagaggattagaaaatgaattttgaaaggtgaaaatatgaattggctaaatagtttgaatttgcagtgcatgaggaaatcatggtgcctagaagggactacggccacgaggagatcatagaatgtggatagttgtgcatagggtaaggattcaataaatcaaacattgtagggattggaaataatagatggtcacttggtattcttttacttcaaactttaatttttgggaagaatctacttaaatttctagtaaatctattttaaataagtttttacatataatacattaggctactatcttaattatgactcatcaaaggtgccatatgcatcaaagaaagcatatgctaaaaggtaacgtgtatataaaaataagtttctttgttgaattatgaaagggtttaggaatatttctataaatattctagattgagggaaattgacttggtcttgtgaaaattatacatgtgatagaaatatgagaaatagtgagacattctatagagcgagggctcattgtttaagttatggatataggaagcaagaaaacatatataggatatgtcaaggctcaacagttatatatgtttctcttatcctatgtaatattatttataatatagccgaacaatttgatctcttacatgatgcatggttggtgaaattggattcaaaatttatatacctttgagtgtggataaatttatttttatgttatttcactagtaagtgaatatttatcatttgaagatcgttgaagaaagtgaataacaaaggtttttcataactaactaaacttacgatcttttgggcaacattttcaaaaacattttaagaatgtaaaattctttaaaaaaattctcaattgtttttataaataaaattctgtttgagaattcaaatatgaacattaattttctcaaacttacacttcatgaaagtattgtgcacttatgtacaatataaaaattcccaagtatatattcctcatattttcaattgtttcttaaaatactctatttaagaaaaaaaaaacctcaaaattgattctaaaaaataaatggttttcacaaaaattgtcaaaaattattgaggcaaaatttgccaagcaagcctttatcttctcaagaacaaaaaaacaaaataagttttctctcttctaagaactctcctaattttgtaacttcttgcctagaaatatgaaacactataatttttctagggatcttctaatcctagggttacatcatcatcaaattatctagaaatggaaaaatcaaagaaaaatcacaatcaccgattaatcagccatcatggatccaaatgagtgatgatcaattttataaattgctcaaatgaattataaatagcaaataattgattaataagtgaggcaattaattatgaactttgagtttaagtaagcaatcaatcacctgacttgcagataaatcgattacctttaaaaatgtatttttagctaattttgagtttcttgatgatgtttactacttaaaacaaaagttgtgaaaattattcataccactaaaggcataattacaatatttgatacctaaaatttttatgttgatgatgttacatttgagtcttaggaaggcaggtagcatgggagatgcccgtaaacacctaatcaaccaatagaacaaatgagtttttacattagaattgcctacaaaatttctatggtttcagtaatcctgcattttgaactttgataataaaaaatagttgaggactttaaactttaatttaaattatacttattacttattacttattacttattatttattacttaataatttaaattgactttaatttaaattatacttaagttgttgactttaaactttaaacttataatttaattcttactttaagtattaaggttgtttgataaaattaacttaaaatttattttaaatcatcattgatatatttattctcataaattataattaaggcaaaagaggtcgagtaataatggaggtcatggagtagccaaagatttatggaagtaattaggataaatgaaaataaaaaggtaaaatgaagatgtggacttaagaataagttaattttttttcttacttattacttaaagttgtttttaactttaagtcatattattaagttattttatcaaacatatttaatttacttaatgacttaaattaagttattaagtcattttaagtttttgagtcagtttatcaaacgcttacaaagtgaagatcttaattagttgcctaaattgtatttattttcattggtttttggataatttttttttttttttgtgcatttgagacatttttttaatttaatattttgaggaaatgagatgtgtatccactagtttgatggtgatcatttcatgggaactacaaattatgctttgttatgtgttgttgcatatgctatacatcttcgaatgtttgtcctgtaagtcattttcactctaccaactacaacttgagttggctgttaatatgacattagagagaacggagataatcatgtcaacaaatagaatggacagaaagcaaatagggaaccatgaaaggaaggatagtatcccatcaatttttaatataaaagaaaattatgatagaatggttattaaatatttcatgcattttaacatttacattattttaaaaagttttgtggctaaactaagtatgggtttgacagtgatttcaggaaacatttctagtttttttaacacttaaaagataaaaaatttcaagtgctaaaaatgttagaagcacttcctataatcactatcaaacgaactcttaggttaaaaatgcttcctataatcactaccaaacaatcagagtgcgtttggcagtgattttagaaaatgtttctagccttttttatgcttgaaagataaaaaaaatttaagtgttaaaaggagtagaacgcattattggtagtgattctaggaagcacttttagtctaaaaaatgtttttaaaaaaaaaaaataggtatttaacaaaatttaggaaacacttttaaaaaatctgaaaaatcacttgtattattaaaaaattacttgtaatgttttctagagaaacatttgataagtgattctcctcaaaatactttcagataaaacacttttactaagagtgtgtttaacagtaattctagaaagtgattttaggaaacattttaaacatttttaatacttaaaagagaaaaattttcaagtgttataaatactagaaacatttttttaaatcattgtcaaacacactttaagttatgagtaataatgtaggaataattttttgtaatttatatttttttataatataaactttaaagacttataaacaaattggataagtcacaattgataagaaaattgtgacatgaaagaactacaaccaccattcatcacttcattttggacactatccctccgtttgatagctaagaaaatgaaaacataaaaaataaatagataaaaacaacctttttggtgttagctaaaagaaaatgaaatcctacaagccaaaaaaaaataatcaaatattaattttataaaaaaaaaagggaatagatcaagacaaacaatagcagttaaagggaagtttttgtagcaacataaaataaaattttcattttaaagcttgaaccaataacattagaccaaaataacaattttacaaaagtatgcaatccttgttactgcatatgcatgcacacaacaatgaaacacgaaaatcaaatttaaagccacggaccataatgtgctcaacattatcgaacaaatgcaatagaatatgaaaactacacatgaagaagaagaggataataattgaataagaatgtgtttgacaatgattcttggaaacgtttttagtctttttaatatttaaaaaataaaaattttcaagtgttcgaaatgttaaaaatgctttctaaaatcactacaaaataaactctaaatgttttttagtttctgaaaaataataaatatataattttcattgataaagtggtaaaataatacatgaaaaaaaatggtaaaattatttccattaattaattgaaaagatagaaaattaaaatacattgttaaaaccgttttcaaaattgttacccaagcctttgaaattacaattcgaaggcgagattgttttcacaagagctcagaggtggtgtcgttttgatctggagatgttatctcacgtccaaatcttgtatggttgttttgcggatcatgttcttattggtagtagagcatcattacctgcaaatgcttcttcccattgttggtggagggttagggttaggggtttgtctttcaaacttgtcttttaagctagagaacggtttttatattgttcactttcttttgggcctgagagtggtttcaatatttttcactgttcttgaattttgctcataggagattattaattgatattgagcaatggcaaacactggtgaactagtcttgttgatgcctctcctttgtgatttctgcactgaacacaaacagccagctatactattctgtgataatgaggcgcacttcacattgtttctaatctcatgtttcacatcgagattgactaccatcttgttcatgagaagatacaaacaagttgtctcaaaacaatgcatgtatcttctcaacatcaaattacagatctttttacaaaggctcacctacctacacaacttaaatttcttctcaacaagatgggaattcacaatattcattctcaacaagggtatttttgtattaaatttttggttgcattttctattttctatttttttttcttgcaaaaattgatgaccgggtgagtcagttatgggtgtagctctctaggctccatatagtcatgcctttaggcattctgtaatacatcttcagaggcatggatgaatagcatttttctttgcaaattctcttcctatctcttctgaaacaactaataggttattttgtggctcatgttcttaccggtagtagagcgtcataacctgcaaatgcttccttgtatggttggttgagggttaaggttagggtttgtctttcaaacttgtcttttaagctggagaacggaatttatatcgttcactttcttttgggcctgagagtgatttcaatgttgttcactttccttgaattttgttcataggagattattgattgatttgaattttgagcttggagctacgtggacattggatcaagcaaaggtacgtacatgcgattctgaattattattattattattattatatattaagcattcaacctagctagtgccaattatttcttcttaaccactttgacttaggtatcatcagaggggcacactcaaggtctactctgattactcctttttgtaggtctcgtgtatttcttaaccagtttaatttaggtatcagaggggcgtactcaaggggcactctgattactcctttttgtaggtctcgtgtatcaagagaaggtggatactttggtcaccatgtagaggaggagaacattattgtactcacccgcttgtcgactcggattagcagcctgtacaacagcacttgtgaagaggatcactaaatctgttgagtttcttaccatgtattttctttagatggaaaggttgttaagttgaagtttgggccattgaactacaaagaaggttttgatgccaaatgtagagaccttagcttcatctaccagcagatgattctgaattttcagaagttttctggtcattattttaaatgagcagaccatgcatgcaatttaaatttaaattgattatagagacaatcatcttaaaaatatatgaaattcgactaaaaaagtaaaaattgttcataaaatattgcaatatccatgtcacacggtattctcttgtattaaaaaaaagaaatacctatttaaaacatggttttagtcaccaagcctctctcaatagaaaatgttttactcctctcttgtcttatttcagtgtttgtagtgcagtgtatcagcggtacgtgcagctgatatctgagaaatttttagtgatcaatcttcactacttggcttgaaaatctgtcattcttagagtaactggtccaccaaaactgccggccatctgcaattagataagagtctggtgccatgccccacagcaaagagccacaaccttgaatctttccaacatgggtctgaatggaaccatcccaaccgaccatggaaacttcttcctgatcgctcttgaccttagcaagaaaattttccatattcctgtaattgatgaagtgggtcacttgcattgtttgaaagcaaccaagaatatacaattcaatcaatttagttggcagaaagcagccagatttggaagcttgtttcttagggataataattttacaaggaccacctttccttccattggcaacattccaatattgctataatctttgggattagagagaatcatcaactggaaacattcctgaagagattaattgacaatctttccaatttgaaggtattaaacataaaaaataatccaagagttttgccaaattctaatttcctgcaaatcttttactgtacagatagattaaagacagtacatacgtttaccatatggtaatcaattaactagaccattccaatcctttgggccaaaacattgctctatccttcaatggtcataatagcatttgcagtcatggctttccattattaagagtacttcttttatatgggtttttcttttatcaaattaacatggtcgtcatcacaaggtttgttgctagttttttgtcttgatgcttacttgcatcacttatagtacgccatgtttgattaaataatcagatcctcaaatacgctaatgggatgaatatagtggcactagaataagtaaaaagatagtcatttatcctgtcttcttggaaggtagattacaatatgaattaggacaacaagacggacttaaaaccgagttgcagcagaaggaaaaccaaaaaacaatagaaagggacactatgattttctgagatggaatgttggctgttaagtttgaagtttaggccggcgaaagagccacagggaagaaggttttgatgccaaatgtagagaaattaacttcatcttgaatgactgagcagagcaggccttcacagtttaattaaaaattgaaagtagatacaagcatcttcgttcctactggccgataaccattgaatatttcagcatccataccgtactgtgaagctagcaaagctattctctcttctgtttaactaccgctttaattagaacatgtttactcataattaagtaacgtctctctcacataatggaaggtgtctttctcctctctagtactattatttcggtg

SEQ ID NO: 10873 - DNA, 1351 bp, Vitis vinifera
  Intron number 4 from transcript GSVIVT01025335001 (locus G SVIVG01025335001) derived from phytozome v7.0 (chr-ID chr6 ; pos 1907342 to 1908692)
ttcttcaaggtgattctgtgtttgtaaaaaactataaactgaagtttgctcagttcttgcatcttttcaactagcctccaattaacttctcttcatcccctcccctctcccccaccccgcacacttacacaaggattaaaatatcagaaactgcagaaacattggtagttgggttttactgaaatatcaaatggaaatctgaaaaaaaatttcagtgggatggaaattaatcaaaacttaaaaaaaatattggaaaaaaaatccaagaaatgatgaaaataataataatacgtatattggagttgttttgttgaaatatatacatatatgataacatttattacgttcaacaagaatatgcagaagttgaaaacacatttaatactaaaatgtgtatctatttcatttggatgtatttaaggatataaaagaaatgatgaaacattaatgattatttttgtagttaaaaatgtttataatttatttacaagtttatatatctttttatatttaatttctacacaaaagatataaagacttattaagaaaattattatgatgatttttatatttttcaactacaagtcaaatggaatttgagaataaactatttaaaattaatttatttaccaaggtggcttttggatacacttcttatttttatttttaaaattagaaattcctatacaaaatataagagctcttattcaaaaatggaaattacattgtattcttaaaaacccttctcaaactttagaaatttgtggaattatttatttatttattttttacttccttaaattttaaaatatgttttcaagtacactatgttttcaatatgtttttactgaggaattttatataaaattttcaatttaaaaaaaaataaaaagtaggaaatgtatccaaacatgcgctacagcactggcatgatgatgctaaaaatatattggcgattaatagaaaatgtcatgataaattgccgaaaaatcgacaattaataaaaaaaatttacaaaaaattgcagaaaatccagagaaattctgctggccaaattgccagccataaaatcattttggtggatgctgaaacatgaaattttggtgaaatttgctgaaattttaatccttgcgcgcgcgcacacacacacacacattattagatttatatgtaggaaataatgaaagaaaggagactcctaaatgttattatgtaattgttatttcattgtttcataaactttttcctatgcaacatactaaaatgtacttttggtttgggcttgccatatgtactgcttggataaaatggtgaatctgaagagaaaccggcagcagcttgtaagtaggat

SEQ ID NO: 10874 - DNA, 1298 bp, Vitis vinifera
  Intron number 4 from transcript GSVIVT01023551001 (locus G SVIVG01023551001) derived from phytozome v7.0 (chr-ID chr1 4; pos 9772647 to 9773944 reverse strand)
aaagggtcagtttatctcttagaatcctcctctttttaattcttatgattttaattttccttttaacattgttatcaatcaaattattggcggaaaataaagaaaatttagattgagctggttcttgtttctctttttttattttcatttttcacctaaatttaacttaacggttaataatagagtttaatataattaaatgtttaatttatttgtttttattcaggtttgaatggtggacgctgaatgtagtttgtatatattaaaatatttataaaattaattatgatatttcttctgactctaatttgaaaaaataatattcaaatatcctaaaatttttgaattatttatattataaaagttttataataattaattatataattattatgaaaatttgtattggaataataaaaataatttctaattttactttattagtaaaaaattgctagaaaattttctaagttagcacttctatacaatgtacatatctttgcataatagttttataattgaagtatatgtttgattattgaaattaattcactaacttttatatttttaatttgggaaagaatatcaaattctattttttgatttacaaaatttattgaattatttactctaatgaatatttagatgaatgttaattatgttttgggtttttttttaattaagaaatatatattagaattagtggtagtttatttttattttgttgtgtgataaatgtatagaattttatggatttattttttattaatttattatctagataaaggaattttttatagacaaatgaaaagtatttaagtagtatttttttttaatgataagtttttgtaatttataatgaattcattctcatccaaattacacgagattgtggtggtttaattttttttaagacaattagataagaatcaattaaaatatttaaggcttcaagtaatttgttttaataattaaataaaaaatgggaaaaaaaaacccaaacaaacgactcttttggaacatttcaaatgtatgagagttgtgttaaaatgaattccatggaaactgtgctatttcttgactaattttttccttacaaattcttatagttttggacaatgaaattcaacttgtttaagcatgtatattttcctccacccttctttaagatgtagtttattgtgttttcctacacatggattatttactttttttagttagtcaaaatatataaataacaaaatggtgggatgaactttgcaggttgcatttcctagcttgaattccttaacgatctg

SEQ ID NO: 10875 - DNA, 4535 bp, Vitis vinifera
  Intron number 1 from transcript GSVIVT01035870001 (locus G SVIVG01035870001) derived from phytozome v7.0 (chr-ID chr4 ; pos 5078788 to 5083322)
caaaagaacacctttgaatctttgatctgttccctagatattcaaacgtacgttatcattctctatgcttgattggagggaattcctctttccagtatagcattattcaagtggtgtctgagaacaacccaatcgatcaaggtataaacacaaccatacagggaattcatcattctagtcttgaatctttcgatccaacaccccccaccccttgtgtttgtttctcgagacaatcaaaatcccactactattcccaaaaaaaataaaaagaaaaaaaaactcatttgtctatggaaaagaaactccagaatagggttccggatgaggaacttgcaaaagggtccaacaccatacaatctcgattatatgtaatatatggtaaagtgataagttgatattttttttaaaaaattattcacaaccaacgtaaaacaagggttgtggctcaaaaatgggtaatcaattggatatgatgacgttgattggaataaactggtaagttgatttatttatttatttctatttaaggcttgtgcttactttaagtataggataggttacaaacacctagcataaatgatgggttgaggggtatttttgaaaaaaaaaaatatgaaattgataagtgtaattttgggaaataaaagatataaaacaccaagtacttcatttggattatatgtaatatatggtaaactagtaagttgatttttttttcaattattcacaacaaaacaagggttgtgactaaaatatgggtaatcaattgggtaagatgacggtgattggaataaactcgtaaattgattgatttatttatttatatttaaggcttgggtttgctttaaaagtgcatttgatagtgattataagatgcgtttctaacatttttaacatttgaaaatttttatttttaagtgttaaaagggtaaaaccttcttataatcactaccaaacatattttaagagtacgtttgatagtgattttagaaaatattttataatatttttaatgcttgaaaaataaaaattctcaaatattagaaatagtaaaaacattttttaaaatcattatcaaacgcactctaaatataggataaattataaacacctcgcataaatgatgggttgagaagtatctttgaagaaaaaaaaattgataaaggtaattttgggaaacaaaagatgtaaaacatctcgtacttttataagtagtatagatggaatgaatatattaataagttttaaatttttaagtgatgtgtggaccccgcattttggctcatgcgtttcccactcgatggcgagctcgatttttatttgaaaaattatgatttttatttattaagaaaatgacttgaagttgccacttatttttgttttatttttaaagggtaaacaaaataagaaagaaaaaccctaagtgtgactccttattttggaaaaggcagtctgtgaaaaactggatcgggttcggggatcaggttacttatcaggaaggtacggtaaagaccataacacccctctaagtccttaaagtgggtctctactaataaaatgaagcaatcatagcaattgattaatcgagcataaataccagataaatattactcaaaacaaaaataattgaataaataggagaggtaaagaatgtacctgagtgatgaaccggtttacttcaatgaaagtgaatgttagcaattaaatacagaataatcacatgcatgtattagagtggaataaatcaatcatgtataacgatcaaatcaaccaatcaattataaaatcacatatgtggggcccccaccaaagcccaatctatcttgcacgaattaatctcacaaatttcattattctgaaattatgaaaattgcattcgtgcttatgcaaaaccaagaaaaacataaggtttgagaaccggagtagaattaaaattgttcgagtgaaaactggattttttaaatttgtttgaaaattggagtctcgaaaattatttggaaattggagattcgcaaattaaatttaagaattggaattttaggaattgaatttgaaagaaattggaatttcgaaaattattcgagaattggagattcgcaaattaaatttaaaaaaaattgaaaatttgaaaattatttgagaatttgaagttttttaaaaaattagaaattacgttcggaaattaaaaaattgaatttggaaatcgggattttgaataattacctaaaaaacggaattttaaaatgaataaataaattgaataataataatagtaacgaaaataataattaaataaatgaacatgaatagtggaatttaatttttttttaaagcaggaaattagatttgaaaaccgggattttgaagaattctttaaatgtgaaatttttaaaaaataaattttaaaaaatgaagtttcggaaattaaagttttaaagattattcaaaagttatggttttcaaaaattatttgtacaagtggaaaagacgtgtacatgggcttaggatggaatggcaagtggtctttagattatacaaccaaaactctcatcatgacttacggaggctgccaactgtggaaggtatcaaagctaggaataaataaaacctggacgcgtgcacactgaaatggttattcatgtggatttgcaagcatatgggagataacagcagcggaggtgcataaaggacccaaaaacatctaacagaatagcattctaaaggagaaaacatgtagctctcaatgaacatacctggaacgtctcttggaaccagatttaatcattttccaagcaccttcttcctcatctcagctagtttttccttccaagctcagccgattctactcctaaccacttccctagctcaaatggtcttctctctagttatcatctctctgaagtctctgaaaagctccctcaactctccataacagctttctctgcccagctcgggttttccttcagcctacttctctctcaatctcattctctgattttctctcttttctctcccccagctgctctctttttttttttctccccccttgataaaaatctctctgaaaacggcagccaaaggtgcctctccctctcagaaaaatcgcccttctatctcttttctatatctttctctccagccgattcctaccttctcgggcaagccatcacctgcttccctgtttcagcagtcagcagcatggcttgcttcatcagcagcacggcgtctcttgcagctggtcccacgcatggagaggggtccccccacacttctcgggtgctgccagctcttctaatatatataaaaaaactaaataccccttggctcttcaaagggggtctacagatgtataaaagatgaatgcaaaagagttttggtagatgcaaatatgatttacctaaaataaaaagttgtgatttattgtgtatgattctttatacttatttaatatgatatttaccaaattgtcaatcattcttgctctaccatttactatccaaataattattataataaatcatatttacaattttggttgaacggtaaataatgagaaggaattgtagaagcattccccatttggaaaacaaggagatgatgaatgccacgtcaaaacccttccacggtggactcacccccaaattcatccaaccaaataacctcaaaactgaaatcaacccaacgtatctttccaaattcacccaaacctttacacaacgaaacttttacaatacaaagcttgaacactacacttcattacaaaatcaattctccccttaaaatttgcctaattactagttgaattatccaactgtgaacatgggtttccaccgtggcagccatgtgatgtgatcaacatattatttttaattaaaatattataaaacttgattaagaccaacccttactttttggccaaggacaaccaaatagaagaatcttgctttgtgaatgggttggaatcgaaacgtttcaaatttttcaaagtttaaaacgtcccttatttgaaaaaataaataaattaatatatattattaatagcaagccaaaaaagtggcccaaatttatgaaaaagtaaacgttagattaatggacgcctaactgcatgctaatgatacggcaacaaactacacattaattacgtaattaattaatttaatacggaaattttgcctaatttaaaagactcaaagttgcaaactaaaaatacaattaaataaaaaatattgacatttaacacctcggattaatttttatcacatttaaccaccttttattatataaataaaaaatataaaatataaaaatgatgatgtgtaccacactatccaaattataattaaaaatttataatctataagatttaaaatatatgccaagtatatttaagagtatgtttgaaaattatttttaaaaaagaaaatttaattaaaaaaatctcaaaaatacattttataattatttttaatttaaaatttatcattttttattttttttattttttattacagggaatatatcgaataaaatattta

SEQ ID NO: 10876 - DNA, 2535 bp, Vitis vinifera
  Intron number 1 from transcript GSVIVT01004407001 (locus G SVIVG01004407001) derived from phytozome v7.0 (chr-ID chrU n; pos 38425657 to 38428191)
catacgtgggatctttgccaccccagcatctacaagccccttcacaccagcttttgaatcatcaaaagcaattaactcacttttccggtcatattcagagtccattccttctcgagtattgcatgtgaccatattttttatgtttttttctgtaggataatcaatgggaaaagagtgaaattctgtattttgaacaaatcttaaggaaaaggtagggagaaagggatcttgcatagtacttggtctaaaaaaggttagtttgggaccaaaacttccacaattagtaccacattatgagtgcaatgagtttacgatagcatggaagggtggtgccagcattgtgatgtcccacattggataggggagaatgttcctagcgctatatatgtagaggttcctcttaaccaagtagacacgttttaaagctgtgagggctcctttgggtccaaagcggataatatctacatggttagttgcgggttgttataaatggtatcagagccgatccccgaccccggtttgggggtttgtttggctccgtaaggggtgtttgtttatttggtcctgcaatcccataggacacaacgaggacattgtgtctgcatgggggggtgtttatgatgtcttatatcgaagggaggttcctcttaaccaagtagacgtgttttaaaaccgtgagggctcatttgggtccaaaacggataatatctatatggttgggcgtgggttgttacaagcatcaacaataactttaaactatatcctccacaagtatagtaccattagggaagaggcttcaacttgacagatttgttatcaaaactgccaattacttgctctgtggaatcaattttcgttttctatgcagaacaagtaaaaaagacgaaaaatgcaagtactgtgtaaactttttttcttaacaaggacaagacagaagtacatttctaaaggagaaaaaggggctcgaatggcagaaagcagagatttctctagaggaagtttaccttaaacttctcagcattgaagttggggtatatatgtgaatgcatctaaatgattgcttcttgtttattacaattctttgagaactctgtggatcagaagaacgctgacctaatgaagcttacctctagcttattggagtatgtaaaatcgggtttttccgcttgtgcgaaatgtcctgaagacttgcactgtcaggccacagaactcaaattggagaccaccctaccccaccgtcacattcaacttaaagacttcctgatctccagggttctccgggaagaatccttcagagtcttcacgcttgaggccactgaccttctttactgttaaagactcttcttctgcacagccttgactgcaaggatctcagctacaaaatgtatatgtagcaccaccacctatataaaggaagcttggctctcattctacatggtcctcttcctcaaacaatatcagggtaagacattgagtagaggttaaggttcaggactaggtgctgtttggctgcaggaatgttgttttagtttgggtatcttggtttctttaatatttgactacaattttcctagggttgttgggttacatgatttgatttgcatcacggtaatagtataaatccactatgccatgtgatgttcagaaaaaaaattcaaatttaataatataattttgtcgtacctgttcatcattcaattaattaattatcaaaaaaaatttaacttagtacagacaaatataccaaccaagtatgaaggggaatctaacatattttaactgtgtatccacatagacttgttcctaggagtttgcaagctttttcttagttcacaccaccgatggtacagattaaaccatatgggaaggtttgtcaagattgacatgctcaatttcatatttccagtcattttcacatcaacaagagcatattaactaaccaacacaaagttaaaattactgccttcaataatcaattacattaccagctcaatcgcaaaataaccaagtgttcatacaaatagaaggtgaatttcccttcaatggattactgagtcagctatgtcagttccaaaacaactcccaggtcagtaatgagtcaattggaaacagaacggatctgaaggaaaactgagcagactcaatcacagaggagaaacaaatggttaaaaaattataaaccgagtcaggaaatcaattccgaatatccaagcatccttacccattcaaaaaaaaaaaaaaaaacaaagaatcgaagcattcctcagaggaactcaaatgtgggcagtgaaatgaaggtcataccagaaaatttgggttgctgcagctggtggcgaagtggcactgttgcagttaaaaaaatggcaaacatgccctccggaactagtgccaatactccatttgcgacacaacctgctagactttgttgtaaattatcctggagattatgttgtggatggatgaatatacgagggatctttgtcacccatccatctacaagtccctttacacaaagtttggtatcatcaaaagctt

SEQ ID NO: 10877 - DNA, 909 bp, Vitis vinifera
  Intron number 2 from transcript GSVIVT01020043001 (locus G SVIVG01020043001) derived from phytozome v7.0 (chr-ID chr1 ; pos 11226432 to 11227340 reverse strand)
caccggcaatctttgcatcaaagtaaatagactatctttatctctcgttccttttctttttccacagtttttgtagattttgttttctttgtcgtttggcttctagctgtttgagttgtgtataagtctggtaatttgattatgaccatcaaattctttgcctgtagaaaaaacaaaccagtggtttaaattgtgttatcccatatgatatttccatcatgctctttcaatggaaagcatgttgtgtgttgcatggttatattccactattatgatggttttggcattcagattttcctattaataatcatccacttctagggcaggttgctgacttcaactattttcatttatgtagatgtctgataccatttctcaaatttaatacgcatattttggttgtgccactgttttagatttttgtctttcatgcagggattgactttattcctatgataatacatataattttcaatcccattttgctttgatgggttcatcttattactctttatgctatttttttctgcctgtttctgttctgtcatccaaagattctttcactcatgttttcaagtcagattgagagaatccctcccctggtaaaattctgttgatttgtatttgtgctgtgagaaatttgacatttgtgggatagcattatttgttcttaaatcttagcattttatgattgatgtattttaatgaaccgtggtagaaatgtggaaatcctattaattttctggcaagtatttcctgggatagcgttttatgattgatgtatgttagtgaaccgtggtagaaatgtggaaatcctattaattttctggcaattatttcctctttaaaatttgatgcattactatccagttagaaatattcttatagtctcctgtgagcaggaagttc

SEQ ID NO: 10878 - DNA, 3810 bp, Vitis vinifera
  Intron number 6 from transcript GSVIVT01015995001 (locus G SVIVG01015995001) derived from phytozome v7.0 (chr-ID chr9 ; pos 17005881 to 17009690 reverse strand)
acccactgtctcgatcagtaatgcttttctcttggtttttcataaaaaaaaacatataatttgttgactctgttgatagtttctttcatgcttatcattttgattgtggttatggattttaatttgcattatatgtctatcatattgttgatgtagttacctatcaaaaaatattgttgaagtatgattttaatttcccttgtgcatttatcattttgttgactatgctgcagtaggctcttttttttttttttttcttttttgttttgttttttatttttttattttttttctgttttcttgacttgaaaacagcattaggaaaccattttcatgtgaatactgatttcacatgataggacactccagaattaatgtttctcagctaagtgttttgctagtcccattcccttgtgttttgtgaaggatgcacttctgcctttgcaatggctctattgtctaatcatggttaaatttcccaatatattacaatatgcaatatatctttactgaattgaagaataggatatttttccataaaaaatagggtatgaattcctcgatttccactacactagaaatattgtttgttcatattttgctgctgctactaagattggaattgaatctatgaacatagctgaagagaggggcctgagtacaatctcagctacaaagtgatcttggtctatacattttctttttttggttctcctttctcttgaaggattttgcatccttctcagatctttcctttcctttgcaattactatccagtttcttattaataaaaatcctagaaatattctgagaatcctaaataaggctccattgatgattgctaacaatgttagagaaattgttctgttctagtttctttgcagcttagcttagaggatagtttcaaatcgtaatacaatatcataggttccttaaatttgatcttaagatccatatgtacgatcttaatccaaagaagtttacaaattccttgtgttgtaactctaaattttgcttctgtgcttgaacatgcttttaataattgtttcttacttctctaagtgataagatgacctcttaagagagtacaatatccagtagttgattgtctatccataatagatccaacccaatctatatctgtgtaagctttcaactataactctctacccttcttaaacatgatatccttgcgagaggctgccttcagatacctcaaaattcagtatacaacttctcagtggggtttaagtggagcatgcataaattgacttactacactcatgacatatgaaatgtctggtctcttatgttacaagtatattagctttttcccatcatttgttgatagttgccttgatgaattgatttgttgatatgcaatgtcttggttgcttcttggctcttttttgttgttttctttggcgctctttgtatacttccagtatacttgttgttctattactttttttttttttttttaatgaaattcatcatggcctattaaaataaaataaaaaaatcaagtgtaggctttctaaatttccaatcatgagttccttgcgactctcttcccctcaaaaatggacaaatgcttcacttcatccagagatggaaatggttctatgcctaacgttaatcattggcagatcaaactttggtttaagacccactaaaaactggaatgctctatccctttccattatttctctcaatttctttgtgtgagtggttgattccatctctaggttctagtacaaatattgttccattaacaaacctttgagggtattgtagtgctttgtaacagtttaggacccttgttaggagttgataatctgccgtttcaactcaaatatttgagaagaaatacctaccttggagtaagtttttgacattgctacctaaatttagcagtagatagaagtagataagtcttattgatttctagttgcattgagtggagcaaccatgaaatcaccatggaattctctgcatcccaaacttcatattctgggtcatcctctgctagtgattttgcagtccccatcacatagtgacctttcccttgctctcgaatatttttgctcattgtgaccactccgtgaagtttctcccattcaacttggaggtggtgattcgaaggattaggttttcattgtgaatggaagccttgttggaggatgacatattgattgaagtaacaaacttggatatttcagacataagtgataaaaatcgatcaaataacagtgtgaaatagagctaacaagacccttcacaaataatgctaaaagtgatggcgatgaaggacgctgccgggtgatggcaatgaaggtcactagaagagtaattagaaactcctagaaaccctagatgggctttgataaatggagagaaaataattctttctttttcattctaaggtattggtacaaggctatatattgaacaaaagttcttaccatggaatctaaacaaggaaacgaagaatctaacaaggaaacaatcaactatgcaacacttaactacagaaactatattagtctatgacccaatcccaattcttccaatcataacaatagtagtaagaataatactactagtaataataataataataataaaatagtagttataagaaatgaattatagtaatcataatgtagttgtagtgaggattcactttgcaacttggaactatagctgatgtagggttggccataccaaatgctagtcattgctgaagaagtgaccaagttaatttacctactctaagctgaataggcttcatcgtttgacttgagtgctcacaaaaaaattgccccctacttgatctgtaactgattacaatgtggtctccttgtaactgtatgccatgtgggacaaatctatgatgaagaactagccctaaaaagggcaagaaagataaaaaaggaaaaaggaatttgtggataatttttagacccttatgtgtcatataaattataagtgaaatacatattatatcagtaaacctagaaaaaagaagaatcttaaacaattttatagtggccttacatggatcaacatattattatattaaaataacatgatctttaaatgggttatgcacaaatttataatggttttttttgagtcatattcatacagggtaaattcgtaaaataaacagtttttgtgctttaatttttatttattttatcaatagttaagagatgtttcttcccttctgtatgcttcattattggtgaacctgttttcattctatatatttatatagcaaaaattttgattttaatatattatatttaaatgtaaaactttaaacaaaaactttgtatcagtttaagaactcctgtttttcgaagagaaaaagaagaatcttaaacaattttgtagtggccttgcatggatcaacatattattatattaaaataacatgatctttaaatgggttatgttcaaatttataacgtattttttgagtcatatgcataaagggtaaatttgtaaaataaacagtttttgtgcttcaatgtttatttattttatcaataattaagagatgtttctttccctctgtatgcttcattatttctcttctatgaacaggtttcatgatgtgtggttcttaaggttatacttgtttctcaatattaaacttgatgcttctttaataatattcatttttaacattagtaaaccttttctatttcctttcttcttccatatggaattgtgtccatatggcaacttattttttttttttcaggtaaggcatcgtttgagaaaagattacggcataga

SEQ ID NO: 10879 - DNA, 10006 bp, Vitis vinifera
  Intron number 7 from transcript GSVIVT01016094001 (locus G SVIVG01016094001) derived from phytozome v7.0 (chr-ID chr9 ; pos 18837156 to 18847161 reverse strand)
tattctctgatttttctaggtatgttatcctttttgatcagaaaattaaatttattgtaactcaggtattcatctttggaaagatcacattatatttggtgtgaaacaatgttatgtttatgccattgataatgtcatgtgggcccaatgttttgctctggccatcaatatcccttcaatgcatgtaacacatattgaatagcatggattagataagtgtagccatatgatccatattctttgcttttcatttaataaagaatttgaagtaaaactctgttttagagaattgaatgcatgaaataactttcaaactccaatcagcttgatatttgatgtgcatagaaagcacatgaaatccaacaatgtacttgatgaaacatgggtcttgcatgaagttatgagtggcacagaaatattgttatttacattgcatataatttaaaaattatatatgtaattgaagatcatacttgcacacattaaattgattagtcatgctgtcatgggttgatcatctttcctacttctttataacaacatataggtttgacagctaagtgctaaatctccctttgctttctacaatctccttttgctttctaaaagaatgtccatcttgtttcttacactcaataaaaagggatacataatggtaaaagttgggaacttgttagtttcccttctacatataatgaaaaattgaattcaaaatggttcctagttctagaagagaaccatttcccatgtggaggtctaagattggattcagagtgatggttttccaattcccactatccatccttacattttggtagtattcaggttgggttaagctcaaatcagctctaaagtgttgcttgaagtagcatcttgtttttagatttaattggaagttgatgctgaagttgatgctgtgattttaaaaggacaacattgtgctatgaacatttcatgaatatgaagaactttgtgcataaaccaaaaaagggcttccatgataggctacattatccatgcttccctgttaggctcttttatagccaaaagctcatctagtaaaattttccaaatacaggcagaagctcttattgagcttaaaaagaagagttttgccttctagaaggccaataaaagcagattataaattgagttaaaacaagtgcttttgatcaacaacaaccataaaagttgtccatttgctatggacttttgtgtgtctgtgtaatggaatcaaacctaaacctctcctccccccagcccaagtccttgccacatgggtaaggcctcaaggcttcatgcttcttgattcacacaatgaaataaattggatctttatctgtggcaaaagcaagagagaattttggttagtcaacaatcatagcaaggatttcaactttcaacttttttgtctataaaacgaaagtaaaaggagtggaaaaaaacaccatttgccattcaaaaggatgttggtgcaagcaaattaggagagggggggagagaatatcttgttcatctctttggcatattgcatgcatcatcgtgttgtgggttgtgtaacaagagagaaatgttgggatttttgaggaaaaatgtagaatagaagtgatgttgtgagatcttatgcatttctactgctctttttgggcttcttgtactgtcacttttagttttagaggaattccacttaatgttattctacttagtaggctttcggtttgtaatttgaaaggggtggataacacttgagagagtttgattttggtttttgagatattttgtacacgcttttatcagtacttctcctcgtacaatggaggagtatagtcttactttgatcaagttttgtattttgtgaggacatctcatcctcctcttcaattttactattatcaatatatattttgtttttgatcccctccaacccccacgcccacaaaaaaaaaaaaaaaaaaaaatcttcttcttgtagtcatgtgttaaatatatattcagaatagcttcaatgtttcaaatattgaaatttattggaaaaaaataagaaaaagaaaaagaaaagataaagataaaaatagtgttagtctatctttggaggggatttgttgaaagttttggcagaattctaccatattgagttcatttatatgaatggcactttcacctttattatccttgtccctaagaaggacctaaaaaaaacaaaaaaatctttcacgtggacatttgtaactttatattttttttgataagtaagagattgtatcaataaaagcgcaaaaaatacgtaagagcatacaggttgtatacaagtaaaacaagcaaaaagcagaaaaaagcgttcaaaaaaatactccctccctcatccaatacccaaccactctataaaatcaatcaaatgcatatagccaccacctatatacaacctaacccacatagagaaattgtttaggaataaattttttagcctttgataaagacaattcctcactataaaaaaaactcctgtttctttccttccatatcatccaaaaaatgcaagtaggagtagctctccaagccttgatttgcctttgcaactttatgaattgacatgtatcaaataataatttttataaagtaaaaaaccacccatttatttatttaataagttcttttaacaaaacactcacaaatctctttctaataagctctcctagtgcatatcttgttacaaaggactttattaaaagctacagctaagccaaaaagggccttagctaaggtccttacaaggcgcctctagcatgtgcttcacaagattatcaacccctcctagggcattttgttaagggtagaccattcatttcttgatgttattttattgctaatgacatcttgaattagaaggtctagtttcaagggttttttagactacgttgttttctaggaaaggttcttggtttagatggaggaaatcaagcaagtgctgttttttctctgttagttttctttgttctggctagtggttggattggggcttctaaatgtcttcaccaaggaaccctcttttcctttaccttttcatgctaaagatgaagataatggataggatgatttagaaggctgaagacaaaggttttatttattgttttgaggtcaagaagcatactgttagggcttcccatttgctgtttgatgatagcaccatcttcttctctaagaattatgctaaaattcttaagcttgttgtggatgtagtatttggccttaagattaatatataaaacaatattttaactagcttaatattaaccatgatcatctttatagtctcacctccttcattgggtgcaggtccactagatggcatttatctttaggtctttgttaggatgtaatcttggggtgctaaatattttggaccttgttgttgagaagaactctaggaggcttgatggttgaagaaggtctttgtgtcattgtggtggggggcacgggaacgacctttccatttccaagatccttacttgggttgggtttaggattgagagaatctaaggagatatcttatggtccgatgtatagtaaagaaggagaggtcaattgagtggaagagccaagtttgcaggttcaatgtgaggttagggtttgggttagagtttggttgtaaggaagggggtggaaggatgtgcttgttgtatagaaatttcctagataatgaaatttgttatggcattgtctttttagaagcatttgtggctgcaactatgacaccaattttgtgtttagatggttcgtttttgtccttggaagccatttccctagctaacacaactttgttcattatgtttgccttaggctcaaagatggtttttgagtgtaatattctgaaaggacacatggtgtatccatacaagactgagcatctttatcttcattgttcaccataaacacctcaaaggaagcgtgggttgtataaatatgagaggagttaggggaggtagggcattggagcctttgtttctcaaggtagttcaatgattgagagttggaaggtgttgaggcctttttagccaagtcgcaaaagtattcaatgaagaggggttcaaaagatagttggttagaaggaatcaaagggtggattgttctaagtcaaagttttctacttttgtttggagtaggaaagagaaggaactttttccagcaaacataatatggaatccttcagtgcctacagaagtaggattctttgcttgggaagcaactttggtggggttttgactttaaaccagttaaaaagaaggggatgaactttggcaaatagatttaatctttgtcaagttcaggattaatcagttgatcatgtccttattcattgtgctaaaatgagaattttatgacacttcttattctcattgtttaaagttgggtgggtgttgccttctatggttagagaaacttcattaaattaatagaggacccttgtggggaagaagcattataaggtgtggactctaagaaatgaattatgtcccaaagaccctttgaagttctcactatgtcctaaaaattcctagcatttcttttccaccacacaacccaaatcaaagcaagacaaacgaactgccacaacaccttgtctctattggtacttcccaatcctttatatgagataactatcgtttcacatatactcctaggagaaacccaatccatataagccaagctgaatagtctatgccatagccctaaactcaatagacaatgtaagaagatatgatctattgtttcatcattctccatacataacaaacaaacatcaaaattgagcgttttgtaggatcttctcagttgtagcatatcattagtttatctctatatcttctttggcacttcttttttcatgtttcatgcttttctcactaaacttcctattatggaacttgaatttttgttataatccaatgtaggaagaaataaaaagcctctactctcttctttctttacatcatgtttatttccttccctccttttggattggaggtgttggactttggaatcgtcaacctgtttctcctccaagtctgtcttttcctttctcagcaataatctagctttcttgttctccagccaaatttatttggaagtttacaattttctttggaatttgagagttttacatttcggtagccactaagaaggttaatttctatcatttaatacatattattaaggtcaaaatcatcaaactaagtgctgtatcttgtgctttgtcagtagtgaatcagctggccacctctttatacagttgtcctaacacttagtttgtattcttattagtttacagtagtgaatcagctggccacctctttctacaattgtcctaacactaggtttgtggtggtggttcattttggcttgtatttcttggcttggccctagagatgttgtagatgtgttggttattatgtgccagggtgggtttgggaaggaattaagggaggagtggtgacaaggacctgtgatagccactctgtgaatgattgtggtagagaggaaagccagaacttttgaggataggaggatgtatgttgattacttgtgggaaacgtgtactacctctagattcagattgcaataaatttgagttgtttctgatccaaaaaggaaaaaaacaatataagctagctacctcatccctctgtgggaatctataactaaagagtcctccagtattcttgttagtttgattatgttggattggagaggggtttgctcctagtaagtttacaataagaggctgtctgggactatgatcaagatgactatgatcaagatggagtccctttcctcgtgttgcctcaaacttgatttgcatgaaaattcctttaatgagaagggactagctatggtgcagtaagaaatcccctatgtcaaagtagaactgaaactgatgcaatgtgatgaaaggaagaatgaaatgcccccaaaacacagacttggtcacttaaagaaagtccaaagataaaaccatatccttttttctttcatttctttgggaattttcaccgttctccacatgaggtgaatgggtgaggtcgctcaggaaagaagcatatgtcaggacttgtgcaagctatggtgtggcataacaactgataacaacccacacgaaatattacgtaatttatgtgtgctcctatattgtgcctaaaactacactagtctcattgttagaccttgattctggcagtgatatcattctgttgatgtgaatggctgtgttttccatttttagcctgagaaggtgttgtgtttgatggaagccatgatcatgtacccaccataaccatttttgctgtctcttactgttgataataatttcatagagcaatgatagagattcctacttttggtaactgctaaggccatgtcaaatgacattattatctcaccttctcaaggaagaaagggtgcactaggaaaacacccccacataagcaactggccttccatataggcaaatgggctgttaggcttgggatcaactttgtataattggcttagcacaattgtcctggccagttgtgttgttgacatacatgctattgagtataagccagtgacacactctagaggagcattaatgcacttgccatcatattttggtcgtccaaggtttttgttgaagcaaaaccaatttcaggatggtctagatgatttttttttttttgataggaaacaacacatgtatatattgatagaaaaaaagaacaatagaaggatgaggaatcctcccaccagagatgaaactaaacaacacaaaaagataacaagacactacactaagaaaactacgaacaatctcccttgactaaatcgtcccgttggaactacacactgctagccaatctagttgtatcacgttaaggggaatgcccttaaaaactgcggaacaaaaagcccaaagagaagcaaggaaatgagtggaatcccaaagactctctgaattcctagctttgtcctcaaatatcctggcgtttctttcctgccacacaacctaaattaaagctatgcacgcattctgccacaaaaccaccctctcttggaatttccaaaacctttgtagttgatggacatcatgtctgaaatgcttctcggaggaacccaatccatcttggctaattgaaataatttgtgccacaaccccgacgacacaaaacaatgaaggaacagatgatctgctaattctccttgcttcatgcacaacttacaaatgtcaggactaagagctttgcggggtctcctcaattgtagcaagtcattagtatttaccttcttgtgtgccacaagccaaataaaggccttaactttgaaggggacttgagaattccatacaaacttagtagggaaaaatggagataagtcgggcatttgagacaaggctataaagaaagacttgactgtgaacaatcctgaagaagataaggaccatgatcttgcatctgaagccgaagtggatatatgcatacaatcaagagatcacatgagacgttctagatcttctatctcagaatcggaaagattacgacggaaattaaagttccatgagaaagggcgatcagaaccgagaattgaagatataggaatattattattcgtgactactctaaatagtcttggatattggactttgaagatctgatccccccactacaaatcttcccaaaaacgaattctttccccatctcctacgacatacctagtatacttggaaaaatcccgaaagacttgtgcaatagccttccaaggacaacgatgtgaccatttgactaaagtgttgacatcctaaccatttgagtgtgtcccgtaaatgctttgaatgacctgatgccacagagctgtactctccctaggagacctccacaaccacttccctaaatgagcacgattccttaaaggaatcttcccaaaccccaaccctccttttaccctcggcttacacaccgcatcccaactaacaagatgatatcttttacctttcccaacccctgaccaaagaaaatccctttgcaatctctcaatttttgcagccactgaagcgggaatcttaaatagagaaagaaagtagttaggaatgtgggaaaggcatgagtggataagagttatcctaccatcgaaagataagtaagccttttgctacccatctaatctcctagatattctctcaatcactggatcccagaatccacaagcaattggattccctcccaaaggaagacccaagtatagtataggccaatcagaagccttgcattcaagcaacaaggctaatctagagagatgattctgatcaaggctgatgccaaaaagattactcttgtcaagattgaccttaagcccagaaatttgcccaaacactaacaataaactctaagagtttgcaattcttccgcgcaagagttagcaaagaagatggtatcatctgcgaattgcagatgggtcaccctaattctatttctatttgccctgaaaccctctagcacacttctttccttaactttcaacatcattctattcaacacatctacaacaatagtgaacaggaaaggggataaagagtcaccttgccttaaacttctagatgccttgacccaccctttagcattaccatttactagagtagcataagagaccgaagacatacgacctctcatccaaatcctccatttagaactaaaccccttcttctccaacacgtgatccaaaaaatcccatttcacatggtcataagccttttcaaagtctattttgaatacaactccttcctcccctgatcgccttttctcgtccactatctcattggctataagaactgcatccaaaatttgtctcccttgaacaaaagcaccttgagtagagtggatagtctcatgtagtactcctcttaatcgccctgacaggacttttgctattaccttatagagacatgtgatcgggctaataggtctaaaatccgaaatcttctttgactgacactttttgggcaaaagaactatgaaggaggcattggtgttttgattaataatcctgctactgtgaaactctgcgaacacccttactaagtcatccttgatcatatcccaacaatcttgaaatgctacaatggtaaaaccatcaggccccggcgccttatccctatctaattgaaaaatggtattaaagatctcttcttcggagaacgggaagtctagcctagaagcactctcttctgatataggggaccaatcaatgccttctactctccaagaggactcgagtagggctttttgaaatatagtaatatctcctctgtgatgctctcggaattattcaacaccaaacctctttcattctccaagaacttgatgaagttcctgtttcgtctcccgttagccactttgtgaaacaactttgaattgcaatccccgtctttaacccatttcaccttagctttttgtctccaatgaatttcttccctcaaaattaattcctctagttccccttttctttcaactctttgagcagaaagatcagaagagagaaccccttcttgttcaatgacatcaatgttagctatttcatccaagatgattttttttcaatctttcaattttgccttaagaaattgtaacttcctcatgaacttgtgaccttcccgaccatttgcaccttttgctattatttgttgctggaagttgttcatgacccatgttgcatgagagtcttcattgcatagttatttatttatttatttaattttttgggagacattttcatcagatttgtttagcccctctgacaaatggacatgtataatctcatgactaggttaatttccaagaataatcttgttatctgcatattaaaataggtcaaatacacatatattctaagattcttctcctctaatattgctttcttgaactcccttttcaaattatatataccagcttaggtactgggaaagagacagaagaaacaaatt

SEQ ID NO: 10880 - DNA, 3218 bp, Vitis vinifera
  Intron number 2 from transcript GSVIVT01016713001 (locus G SVIVG01016713001) derived from phytozome v7.0 (chr-ID chr9 ; pos 554064 to 557281)
attcaggcactgcagaagctctctctgaatcgaaggtatatttacttatttttctattttctatatatatatatatatatatatatatatatatatattactgattatcaacattcttttattctcttgtgaatttgaatgtgtatatatatagcggtattttgtactggttctgatgaacctagataaattatcaactgttttcatgttcttagtttgaaagttttcaacccttaaagaagatttgaatttttccatcaataaaaggtgtggttttggcttctgatggctgttaaagtgaagtttattagcctatttaggtgtatattggaagaatattgtgtaattgcaactgaatgaggaattttttttttttttcttttcaaccttcaaaatgatacagctggacttccccacatgcttacttatggaatcacttaatgcagaaaatgagtgataaaccttatgtggagtgtgcatttcctacacatgtccaacaataagagaccaatctaattgaacatggagtgaggctgcttcaaagttcaaatgttgggacaacaatgtagaatggattcttatctgaagatgtggtccaaattttcgattcagccctagtccactatcaatttggattggtttcctgttgttttgatatgggggacattatgcagtccacttgctgtgccctctttcacctcttagccctaatctttgttgttcaattgtgtcttttgccttgttgctcttactttggtaactctgctcttaccttgacaacccagatttttactcttactaatacctttcacttttgaatttgagcagcgtacattgtggctttgcatgtatcaattatatgtggcaactatatctcaccaaagcactaaacgcatgcaacttcgtgtaatttggagtttcctaagctcataattgtagtgaatggcaaatggcaaggctagtgatattaaaaaataataagaggtcaacacacggtcttcatgttaaccttgaaattaatataaaatgtaacattgctcctaaaaagttcagtctaggctggataaagaacatgtctctataattctccgttttagccaagctttgatcagcaaacggatccttagttgatgtcatcttgacatcattcataatcttatcttccatgcttattttttatgcttatgatttggtgccattgtgggaacagtctagttataatttttacaaaatttcctttataccacttttgaagttcctggctattcccttgttaatttatcatccctagaaaccttttcatattttacttcttttatgtactaccttaaactactacttcttcagcataattttctgcatcaaagaccttcgaatgctcattctgaggtagcaaggcaattttatccttactaaagccttcagaacacctaattaggggtggcaagccagtttccacctttatgtacctaagtgaggtgacagcatacaggctaaaggccttagaatgcctattaagtggcagtgaggcaactaacacccttatgtacctaagaagaggtaatagggtacaaactgaaagcactcaaaagacctaaccagaggtgatctgatataacccaggttcccttaatgcctaatccaaggtagagaggcaactcaagccctttcagcggctactcaaggcagtcaatgaatctgccatttttccatcttttaaccactcttcctgagtgctttaatgtcttttcttgctagctcttcttgaactctcagtaattcttctttcttttttctttttttcttttagatagctaaatttttgtctccatagggacttgaagccaaaccttccacaaacccataaaaaagtaacatcaatctctaaaaatctcttcttggactagataaatattaggtcccagttacctaagcttaacaaggaaagatccttggcagacaccatgctgacaaattgatattcttattttccatgcttacatctttgtgtttacaggataatttccttagtacttttcttaccttttttagtttcctatcatcctatgtcatcttgaagtttcctatctttttatttttgttgctaggctttgtgtttatttttggtaattaagtcatgtttcttatctttttaagcttcctattttattttcatggttatttttggttgttaagtaattaagagaaagggaggtttcttaccctttggtttttcattttaggtttcttttgtaggtttctttgtctctttaggtttttctattttacttcatgtttaccttaccattaagcaattagtacaaggttctcattttttaggtttatattttatgttttcgggtttctttatcttttcatcttttgtatttttttcatattaggtttcctattttatcttcttgtttatccttggtaattaagctgtcacaattttttattatttctaggatcatgaaagctacaaatacttgattatagctagggatcaaggattgattgttattatttggttttctttatattttattacaatttgagttttcattttttttcttgttcttatttgatttttttactttttaattgagttatttctgtgaaggtgttatcttttggtaaggtgacattgttgttggaataatcaacaactggtacgatagttcacttgtttacctataggcccaaggagcagttgaactacttttcattttaagagatcacatttaaggggtgtgtataaatataatggagtgattattttgttcaaatttagctatgattcattttatgaattaaaagtacacatatttgagtttcctgctattcgtggccccatttttcggattggagcaatagctttattttatttttcctagacctgcttgtgttatgttttctatgctatgatgccttttctttagttcctatatataattaagtctgagttgctttgaaacttaaatttatctcattctagtttgcttctatgttatagagaagtgagtttttatagcaaaagaacaacaaattttacaaggttctgagtaggaagtgtagaatcatggttgccaagtggagcatcttctaagccttttcaaatttatgcatgggatggttacttgagatttatgcagttgcatataggactagctgttggaaaactaaacattgtttaatgttcatgtttccagtactaa

SEQ ID NO: 10881 - DNA, 7210 bp, Vitis vinifera
  Intron number 9 from transcript GSVIVT01019759001 (locus G SVIVG01019759001) derived from phytozome v7.0 (chr-ID chr2 ; pos 3051919 to 3059128 reverse strand)
ttgctgctttaattcctcttcagaaggaaactgaggttagtttattgactggctgagctctaagtagggggatggagttgtttttagtgtattcctctgctttgttttgtcctttggcacctttttatacaccatgtatgcttttgtgcacccttttgtttagcattgttaatatatttgatctttgcctatcaaaagagaaataactgaggttagttgttatgcttttcaaatagttgaaactttatccagactgagttttgctgtgtgattaatttttttctttgctacaatgttttgtagaacttccaatcagagtcatccttcaaatatttttttatttggtttcttatttattttgaaacaatctccttgtttgcgattcttgatttgtttgttgttagttgctttaaacaacatgcataattccatattgtcgtatatgcgtggctaagcatattatttttttgttaatgtactcaggtagcatgtgcatttgagtttggtttgtgtcatgcatttaggtgttggattagtctaactccatgttagggtatcaggacagagctaagttcttgaagcattacaattttgttcttctttaatctgagcaaaatgaagtgtctatataacatactatgtcctgcacagaaaattattttgacatacatgaaaaaaagtgacaggtgaagaaagtatccaaggaacttctggggggaaactaccaatatttttcatctctatttttccagagacacctcttaggcatgtgataacatatctgatagcaggcttccaacacattctctacttcatacccatgtttttttgtgcttaatgcaggtatttcatgcattttgaaatgtctatgtaaaaaagattattcatttcggtaaagatgagataacacaagccttgacatggttccatccttgtataaatgctatcaagctcatattgaagaacccaagccagtgagctctctaaaacgtcttgagcagctactgttttcagaaaggaaaagagaatctatgatgctttcttagaaaatgcttttgcatatcaacaactcttaaataatgttccagatgttagaggccatcatgcttgtgcataaattctgttggctgaataaaattcttgagacacaaaatgggggatgaaatttcaatcagcagctaagagattttgttaatctattcatagaaagaaaatgaaaaagcacgtaagaatacaataggcaattgggttggagaagaatagtggttggggatgcaacacttctccttgaaatggcgtgaagaaatcatcaagtagaataacattgaaagaatgaattaggaatgataatggggtgggttttttcaggtaacccacctagctaggcccgcactagtagaccaggtttggatagcttttaaatggattagaggcagatctgggaataaggaagtaagaatcaggttcaggccagaactgatattactaaagcctgcccggcccctccttgatatattatgtttacttatccaatcaatgtacatgtgatgaggatgaatctttaagatatatatcaagaaagggaattagtattaattgtaattaaagtagggttaatattacttggaattaaaatatgattaatatttgttggagtctaattaggattagctagttgagttataatataattagaatttgagtcatgataagttattagagtcctagtagactttggatattataattggaattagaatcataataggttattagagtcctagtagactttgaatttcttagagaaacctataaataggctaatcaatgtaaatcaaaggaatgaatttgatgaataatattatactttctttcattgcaaggttgcaaccctcaatggtgagactccattgattttcttttaggtgagactcttagaaggccttagtgagactctaaggttttttcatcttttcttcattgtttcttctttctctctatttcttatattataattttctctaccataaaatttattccttgttcctctccttacatcctaaaaataaaaccctagcccacctacccttgagtgtaggcaaccatcctagggttgtcctacatcaattttggtatcagagcgaaaattcttggcatgaaggcatacgtaattgaggagtggagcaacgtatgcaaacatggtcgaaggctacaacttttttatgcagccattggtgaacataccaaggctaaatgaagaggaggattggtgacgtactagcattttccaaactcgtgttgcttgtcaaaggagactatgtactttgattattgatggaagtagttgttccaatctagcttcagaggagcttgttgagaagcttaatctaaagacagaagatcatccaaatccctatcaaatagcatgggtaaatgacgcatctattttggtgagttctccttgtttattgacatttaatttcagtaataattttgagttatcagcatggtgtgatgttttgtcgatgaaagttgcccatattatgcttggaagaccatgactttttgatgaaagggtccaacatgatggctatgagaacacttacacacttgtgcgcaatgggcgaaagaagatcctttgtccaatgaaggaaattccaccacataagcaactagaggaaaaagtagcacccttgaaactagaagagccatcaaatattcttattaaaaagcaagtcgaagttactagaaaggatgaagaaatcatcactgatgaatctagaaagcaagaggtgatgaaactaatcttagatcaactaatagaagagctcaaagaagttgaagaagtttcagaagaatcgatgtttgacttcccaaggccaaacattatcgtgagtagtggcaaacatgaagaatctgctgaaatttcttttgaatatagggaattcaagaatcttattcttccacaaaacaatttacaagaagagtgtgggaaacaactttccacaagtttgttgaagacacataattatttcgagaattatcaacttgttgtacaacatcaaaaagtttttcgaagtccagtatttgtcttgcatgaaattgaacaagttcaagagatcttgagatcttgtcttaccatgggaaagagatgacgaagaaagaaagggtagaaggcattgctcgaaatttcaattgatcgtggaaaatcactaaaactcgaggtcgagttttttttcaagtcagggggtattgatgaggatgaatcttcaagatatatatcaagaaagggaattagtattaattgtaattaaagtaggattaatattacttggaattaaattatgattaatatttgttggagtctaattaggattagctagttgagttataatataattagaatttgagtcatgataagttattagagtcctagtagactttggatgttataattagaattagaatcataataggttattagagtcctagtagactttgaatttcttagagaagcctataaataggctaatcaatgtaaatcaaatgaatgaatttgatgaataatattatactttctttcattgcaaggttgcaaccctcaatggtgagactccattgattttcttctaggtgagactcctagaaggccttagtgagactctaaggtttttttatcttttcttcattgtttcttctttctctctatttcttatcttataattttctctaccataaaatttattccttgttcctctccttacaccctaaaaataaaaccctagcccacctacccttgagtgtaggcaaccatcctagggttgtcctacatcaacatgcctatatgctcttcaattctcgcatcctaatcctcatttcctcagaatttctcaatctctcgcaaacctaatcccttcttccttgaaatctctccaatattgaatatggaatctcatattcccttaaattttaatctttatcttcccaggaaattcttcattccaaatctcccataccattgccattactaatggaatctgtgttctcaacaacattcatcttaacaatagtgtacaaacaagtataatttgaaagtagataaatggatctttttttctccattccataggttttattttttaattcgcttcattcaaatgatggtttcattggattcactgtgccataagcagttttttttttttataaaaaaaatggataagagtaagagtttgtcttgatttgaatgttgaacatcaattttttttaatgattgattgttgtaagataaacttgacaaatggtttgatttggttgttgagcatcaatggttattttattttattttttatcattgattgacgtaaaatgatcattgctttttggttcttgagaaggatttagttgctgagtatgatttttatttacttttatttatttatgtatatatatatatatatatatatttattttatttttatcattgattgatgtaaaatgatcattgctttttggttcttgagataggatttagttgctgagcatgatttttatttacttttaaatttatttatttatttatttttatcagtgactaatgtaaaatgatcattgctttttggttcttgagataggatttagttgctgagcatgatttttttatttattattatttatatattagaatagccaatgaggtggagtgggtcaggggtatatttttcaaatttttggttctcgggtatgaggcatatctgctcagctctactttgggtggcctgtgatgttttagaggtgggatgggcaaggtggttgcccgttccgtagccagctcatttacattcctagaatgtacgggttatttgaagcaaacaacagaaactacatagttaatatgtgtttattagttcccaagtcattgctcctcttggatggttgagaagcaaaacgtcactttgattcctgaatggaaggaaagtagctgtactaactacctattaataaggcttgggacttgtattcaagagtgtgatggtccttttgaaataaattaactaaatctctgctcagttttgttgatccagttcataaccttaatttccattggttgcatttcttcggtctcagactcgacatactgggttgtggctgctatggctaataatggctaccatgggactgtaatagctgcttccacattgctacaggaccagctatacctgtgggccaaaaataactgccacagtaccactatggttctaactgagtgagggatgtaaatgattaggtggggatctaactgagggagggagtagttttttgtgttctctctctatttggcagatccttttggtacccattgtatatattccatgtgccttggatttttttagattaatatttgtcttggtttttgggttcaatttggtttagtcttaaaaagttttcatattttatatttaagtggtttacttgtgagttttgggtacctattaaacaatttgttagttttcaaaaagcatgtcattaatgtaagatttttaggtcttacttttttaatatatgttaaaatattcattattacttagttacttaacttgttgactgtaattgtcctcaacattcttgacaactgggagagaaacaggaaaataagtactaataacagcaccaccccttgtattatgtattcatgtgagtgatttggaagcttttggtgttacttgcatttgtagtaattaagcaggaggggtcctagtttgagttttgggcttatccaatacatggttcttggaggaggagttgtttgtgtggttttcctgtcctgtgaagtagaactagagtgtttctgtgctataaaaaaatgaagaagttgtgaagttgtcaacagcagatagtcctgcacaccgtaaccgtaaaatggatgttcgataaaaaattaattaacaatcatgcttatgggggattctggggccggaatgtgtacatcagtatgattctagaaatttgttagcccaagataaaatctcattcctccaatgttcatgttctgttacagagtgtatatctgataccatcactcaacaactgcaataactgacatgattttaataatagatataatacaaagtttaatcatcccaaaccatagtaattgaggacttgcaacactgcaagaaccttgttacattatagaatagtcaaagaagatcttgtctaataattctaaactggtctgaatctagaagctgacaactggtagatcagttggtgtccagaggatgtcccaggcgaagtcagtgtaatataagaggctggaagttcaatcattcaagcttgctgaagcatatatgacatcagtgtgttttaccatatatatgacatatatgggatagttcatacattcaatgcctaatgtaatatacaccctgccctcttccatccccccactatgggagtgtctacgaatctatgcattctggtgaatcatagcctttttattgtgagactgtgagtacctataaaatccttcattataaagtcttctaggaaatgaaatttatatacaagtatcctagcctttttctgataggcagaaatgcatcctgtgccctgaattgaacattttgttcccctgaaattgaaaaatatcttagaacattataccattcaatcaaaaaatttatttttcagtctgattgactcaaacaatgatccaaccaaacaagacatcgaatcacctttctgatttggtatagattagatcttatgaaactgattctaacttctctttttctcttttcaataggcaaattagataatttattaaaaaggcatattaaaatcccttggtattatgaaatcagtcacaacttggtaacccctcacttgagtgtaaggacaaagatcatgggaaggatacagtcattatgttgtgcttgtcccatcaaagcagcgtcatcgaaggggctgaagaccactttcacatctcaaatccaaatgtttgtgcttggtagcccgacatttatcattgttccatatcttggcctctatatgtgtttatatgtgcataagtgtgtggttttatgtgtgtataatgtttttctttcgatctgcatgagctgtgagctctaaggtgttttgaaagttcaacagcatcttgacaacaatggagtgagcctttgttactttgttgtgcaggttccttctc

SEQ ID NO: 10882 - DNA, 9264 bp, Vitis vinifera
  Intron number 8 from transcript GSVIVT01037494001 (locus G SVIVG01037494001) derived from phytozome v7.0 (chr-ID chr6 ; pos 12700340 to 12709603 reverse strand)
acaagcaagaaggttgatctttcttcgactagaaggtatctcatgatttttctatacgtctgatggtatttattgtacattgtttgtggattttatatgttgcactagttctgtggatataaatcataaaaagtgttaaaaagagtgtatcaaagtacacaagacgtatgcattggttgctaaaaggcgtccaaaaaaaaaagaaaatgtataacaaaaaactactccctcaaaaaataacgcactaatcaatgagtggccccacaaaaaaccgaagtatcattgacaaacaacaaatgagaaacctccattccttctccacctttactcctcaccttgaaacctgacaaatatccaccctctctagcccttctaggaaggcaattgagcacctctgtggctagcataaataaatacaagagtgggtccccttgcctcaagcccttagagctttgaagaaagcctgaagtgccattcacatgaactaagaaacttgctattgatatgcacaatctaatccaattgatccactttgtagtcaaacctcattttttccaaaactgaaagtaagaagtcttaattaacatgatcataagtcttcttaatgtcaagcttacatggcaccccacaattgttgcttttcgacatagagttaatggcctcattggctgtgggcataacatctagaatttgacttccctccacataggcattttggaacttgaagaccactttgttcaccatctttttaaccctattagccaataacttataaagactatccaccaaacttataggcctaaaatctttaagatcttctacccccctttctttgaaaccaaaattcaaaatgttgcattgagactttttacaaatctaccccgctcatgaaagtcactaaaaaatctcatcacctcttcctaaacaaagtaccaactaaactactaaaaagccattaagaaaccatctgaccttggagctttgtcccaatttagatctgataaggctttgaacgtctctttctctaaaaatgattcctcaaactttgctgcatctttttttttttttttttgataggcaaacacacagaaagaaatatattagaaaatggcaccttgaggctgacccaaaagcatacagggggtatacaagaggcgccaaaaggcacaaataaaagaagaggggatacaaaaaatcaccagccctcaactagcacctagccaataaaaaaaactgagtaaaggaagaggaccttcatttacaactggcttagtccattgaacatttatagcgtcaaaatacatgtccttgatatagggttgccactcccttaggtctgacaagaggttcttaaaagatcggacaataccctccttaatctcaatctcctccgttaaacaaagcccattaattttaaccttagccaaagatttctttcttctatttgcattggccattttgtgaaagaaattagtatttctatcaccttcctttaaccataccttgatttttgcttctagctagtttatttcataaagcctaattatgatgctccatccttgcttcctcccttgcaaccacctcctcttgagataaagctcccatcctctccttagagtcccaagaatccactagggaaagagccatattctttctaattaccacattgccaaaatcttctatgttccaactcttcaaattagactttaaaactttcaatttctttgccataatgaagctataagaacccctaaaattgaaccctagccaccatctctacaatatatctttgaagccctcttccttatgtcatatattttttgaatttaaaaggtgtagagcctctcctcaaaccacacccatctaacataataggtgaatgatctgacttagatctaggtagcgtacattacactaccccattgaagtggcttcctgccccttaaataccagaaatgggctaatctcaactaggattgattatttaaccccccacaccaagtaaaaggcaccctaagcaagggaagatctctcaattgaaggtcctcaatgatttatgaaaatctcctcatggtcgtagatagcctaccatctccacatttctccccaagaaatttgacaatgttaaaatcacatcgaatgcaccataggtcattccatagccctgtaatgacccccaacttcgcccataagccctcctatccctctaacaagaagaactacacacccctatgaataaaaccaacccatcatcacaattcctaaaatgacatgaaatcaagtactcacctactttcatgctcaccaattctagctattttcctaagaaactacgactgcgcctgcaacacccctcaaattcgccagacctactttaagaatcttcaaactcctaaactttgcgccaaactaggtgatatatcttggattttagttcctgtgtcaggccaagtttatcctctgcaatttaatcaaagactttataatcatacttttattaccatcattagcacctctcatgttccaaaatacaattcttaacttcatttgtcacctaatgagtagtccaaccttctctgctccatccactctctatttttgctccattgtagttcattgaccactccagtttcttaagctgtcttttaaaatgtgaagactcatatttactttttcttctactacacatcgtgccctcatgtccctttcttactttgattttgttcgtatgttcaagaaattatggaaagcaggaccaatctgctcaaggtccaattctccgatgaaacctctcccccctcagaataaccatcgaccctccctttgctctgcttggcctaacctccgcatctactgtatctttctcgttgttggttggaaacaccattgaactcccataaaccaaaatcgtcctcaatgggcttgaataaaaatactatggtgtcttcccagtcacccttccatctagctatgagtcatcaaatcatcctcactgaacccctccctctcacccaaacttagagaaaggagaagaagaagcctcatccccaaaggagaatgcaaggaaaaggaaggaacacggaaatttaaccgcttcctccaattgggcctcattagtcaatagggagtggttagttgacaacaaaagagatgacattgagggaaagacggcatttctgttagtaatgaaggaccccccccccccccccccctaactgcatcaaaatccaacaaagccctctcctcctttaaaaagcctagagacctctcactttataaggcctcttggcctaaaagtacccaacccaagccacataaaccattttctaaaaaagaaacaacttctccaaaaggcctttacaacaccaagcctcttcactgaagataccattaagaatatgagctcctttcaactcctcaaagcccaacccctcacttcttgttgtggcctcaccttgaacacccttaaaacacactatgttcgtacaacccccaccactgccaattgctttacatctgccattatcacccattgacccctttgtatgtaccttttcaaaaacatcagatgccccccatcttgtcatcttactctgacaatcaaaagatgatgcaccctttgcttccttttgtgccaacaaaccttgccttgtcatgcccttgccaacatgtgccagaccctctcctcaacccctaacctttaggccactagtctcacaacttggcaccacctgagagaggtatggtggtacttccaccataactggatattgaagacataaaggccctcctccacctggaacgatccatgcattatgctcccatttgatctcaccaaccctctgcccgctgtaagtgacagactagcagtttctacatccacgataacaaagccaccacatcaatctttgatctttcttaaaatctcctggcaccacattaactctgcctattgcggtcctcctcactagtgcttttgggaattcacaaaccatagccctagcccatctccctactggtttgtaatctcatctcctatctagcttctccttgccatttttgactacttgtgtttccctaataaccattgcttgagagggaaaaaaaattgaagatgctatggcttctccaatgtttccccatccactacttttggatctttttgggatcaccaacaaggttgttttttggcctgttatgaactttgtgatttgcaaaatctgccatcggggtttattttcacctccaagaggtgcactctagttttttccctgtatttgagattaaatcctagggacttgtccatatctgaagccttcttcaaatggcctcaaagccaatcaatctcttctttcttaagaccaacggaagagaacctctatggcttccctctgtgagaacaatccatggccctccactctcttctacaaaccttaccttggaagtcttcctcgacaataggcaaattcttctccagctgctgttcatcttctctagtttctctttcataggatggcgaatgcgcatagcagaaggaactggttgtctaggctgaaagtggatgattgttggcatacggaggagttagatttaaaaaatagtgtggtgggtgcttttaataatctgtacactgaagaaggggggtggcgtcctggtgttgaggggctgcctttcatgagattagatagctgtgaggctgtggggctggaaattccctttacggaaggggaggtgttcgcggcactttcagatctaggcaaggataaagcccccggcccggatggcttcaccatggctttctggttgttcagttgggatttagtaaaggctgaaataatgggcttcttcaaggaatttcatgagaggggtagatttgtaaagtctctaaatgcgacattccttgtcctagtcctaaagaggggaggtgctgaagatttgaaagatttcaggcctatcagccttgtaggcagcctctacaagctgctggccaaagtgttggccaatagaattaaaaaggtgatggggaaagtgatttcagagtttcaaaatgcctttgtggagggtaggcagattttggatgcagtgctgattgcaaacgaggctgtggactcaagattgaaagacaatgtgggaggggtgttatgcaagttggatatagagaaggcttatgaccgtgttagctggagctttttgttggctgttcttaaagagatggggtttggagagagatggataaagtggattgattggtgtatctccacagtgaaattctccgtgctagttaatgggtccccatccggtttttttcaaagcacgagggggttaagacaaggagatcccctttccccttatttgtttgtgatcgccatggaggttttcagtagtatgatgagaagggctatcagtgggggctacttatctgggtggaaggtgagtggtgggaggggtgaggggatgcatatatcgcatttgttgtttgcggatgatacgttggttttttgtgaggagtctttagacgagatgacttatctaagttggcttctcatgtggtttgaggcgtgttcgggtttgaggattaacttagagaagagtgagatgatcccggtgggaaggtgctgaatatagagggtttggctttggagttggggtgtaaagtgggagggattccttctagttatttgggaatgcctttaggggcagctttcaattctttggcggtgtgggatggggttgaaaagcgttttcgtagaaggcttgctatgtggaagaggcagtacatatctaaagggggaagactcaccctaatcagaagcactatgtccagtatgcctatttatttgatgtctctctttcatttgcctagaaaagtgaggttgagattggagaaaattcagagggattttctgtggggtgggggaactctagcccataaacctcaccttgtaagatggaacttggcatgcttggagaaaagaaaaggtgggctaggggtgagaaatttatctttgatgaataacgcccttttgtgtaagtggaattggaggtttgctaatgagaaagaggcgttgtggaggagtgtaattagcctcaagtatggcgtagaggaggggggctagtgtactcgggatgtgatgggaagaaacagagttgggctttggaaagcaataaggaagaagtgggggttgttagatggtagggtagctttccatttgggtaatgggcaaagagtgaaattttggaaagacaagtggtgtggtgatgggcctctttgtgagtccttcccatctcttttttccatgtccatgttgaagaatgtttgggtttcggaggtgtggaatcctgttggtgatggggttggttggtctcctctctttgcaagggcgtttaacgattgggagattgatttggtggaacggttgttgcagaagatccaagctttcagggttcaaagggaggaggaagatagagtgatatggacagcctcaaatgatggggctttctcagttaggtccctttattctatgatggagccggggggtctttctatgttccctagcgaaagaatttggagggcaagagtgcctcccaaggtagctttctttgcttgggaggcttcttggggtaaagttttaacacaggagcaacttcaaaggaaggggttctctttggcaaacaagtgctttctctatctatttgaagaagaaatagtggatcatctcctactgcattgtgtcaagacgcgggtcctatggaaccttcttttctccctttttggtatattttggactctcttgtgtacagtgaaggcaacccttcttgggtggaatagagggtttgtgggaaaaagacgcaagaaggcttggcaaatggcgcctttatgtattttttttgtcagtttggaaggagagaaataggttagcgtttggggatgaggatctttcgcttcaaaggttgaaatattcttttgtatgtaatctttggtcttgggtcaggggctccctagcagagagtcattcttctcttgtaagttttgtagaccggataggctcctagttagggaaggtggtgtgtataatccctgtatacttagagggcaccggtttttggtgtttcctctttttgtttaatatacttcctttacttatcaaaaaaaaaaaaatcttctctagtttctcaattagtaataaatgctcacttgttcagagtgcttgactgttgttatttagcatggttagtttggaatcctaggtgtgattgcttagattgcttttccttaattgccaaggcttcttctccccatcataatttctttgcaatcaaagactatttgttcttcaactcaaacctgatataaaatccctctgttaaccgtattgaatccttaatcttatcctagaaccttattttcttattcctgaattgcacaggactttattctgaaaaccctagacctaatttcccactatagggaaaaatggcccttcttaagacttgaactacacacgtaaacttaactgtccaagacctttaccattgctctaacaatcacacttattttggcttcattgatttatttagggataatatcttttataagtgaagtgggcaagaacttgagttccactccaacactcgtgcacttcagatctaataatggttttaaatcttctcaagaaggttgagaactctcttctttgctgttctcaacatcttttattggtttcttttccagatggagagatctgaacccataggagcttcatgtggtgctgctttggttgtattaatgtctaaggtgtaaataggtttattaatgttatttagaaggctaagttatatggtattatatattaggtacttttgttccactctacacgctacatacttatcatgcatgcctgtgactaatgatattttgaatctaaaatatagattctattctttattaacattgtcaaagtatttttctgcacttctaatatttttccttaacttcctttttttttccaaatcgatgtccaatatgttatgaaaatccgtgttaatgcatctttgtttcatgcccttgatactcctagacattgagataaaaggaggacgagtatcttttggaagggaaaatagttttgtttttgtcttttatttttttaattttttggtttggtttagtcgtgtttttgttttctcttttttggtataaaaattatgttcttttgaacctcttgtgatgctgcattccacagtagactgaccatctttgacaaaactatcaatgacaacaaggaccaaaatttgaaattacaggtattaactcaacatttggcaatagatttgccaagcaaaggataaaaagggggcccttcccttgtccctagctatcatgacaccatcccagcaactgcagctgcaagcaagcacaaagcataaacatttgtcctttgctcagcaaaggcttcttaatgatttatatatctgagcaagttgctggtatttgaaaggagttttgtcaaccatgaaaaacatgtgcttgatctttatttaaattccttagccttgattctacgtgacaggtttgtagtaacaattcttcaatttggattggaagtagccttgtccatggtagactatgacttgtgatgctggaaaatgagacttgagaaaaccctgtgagatagaactttatagagatttgtgctatctgattgaccttgtttcttccattacaatgagattcttcaaatgcaatttacagcagtcaagatgttctttggaagaatagaaactgttttaatgtgagtgaaatttgttcaaatgtgttcaaaaccctgttgaagatgaatatggcctccttatgtgagctttcttatcttatattcatcaaggagtcttcatgcagaggtattttagatatttatctataaaatgttctggttaaaaaaaaaatgtccataaaaattttgtttgccaatgtcattgataagaagaatttttcctctttaactggcaatagtattgtttctttctcaattttattcaattttagtggggataaagctatcgtgtctgttgaaatcacttttgttggatttatctgctttacttgtggaataataggggtattccctattgtagctgtgtgatttttcaatgtacaaaatgcaggggaatagtgttccttttaatcttgtttacttttctaattaagcatgtgtggttactaatggtccttgttctccatgaatgatgttattggaaaaaggattg

SEQ ID NO: 10883 - DNA, 6458 bp, Vitis vinifera
  Intron number 1 from transcript GSVIVT01024453001 (locus G SVIVG01024453001) derived from phytozome v7.0 (chr-ID chr1 6; pos 2760109 to 2766566 reverse strand)
ctctgggttttgctgcagaggccaagaggataaaggtactgtaagggtgggaaaagggttgttttcttctgattctgaatgttttctgtttcatggtatctgggtggaggtagatcttctcttcaaatggatatttgaggttgatctttggttaacatctttaggtttttgaagtattgggtttttgaagtattggcttcattgtttgttttctgctttgccttttgtttggctgctgagaaaaattaggaaaagtagagtaaagttgcaattttgaatattttccgttatgttttttctctttttctttttgggtttctagagaaacagtggttttaacatctttgtctttgaaatattggtttcattgcttgttttgtgtgctgccctttgtttggttgctgagaaaatttaggcaaagtggagtaaagttgcaattttgaatcttgtttgctatgctttttctcttttttgctttctgggtttctagggaaacggtggttcgtatcttttgattaatatatctcttatttaatagatttccttatctttttgcctttacctttgcttggttgctgagagaaccgaagaaaatagagtatagttgccattttgaatgtaatatgttatgcatttccctatttcttactgggtttctagagaaacagtgtttttacttctttcttctatacccttttcttggctgctgagaaaactgagaaaaatagcgtaaaggaacaattttgaatcttatctgttatctctctttctctctcttctgggtttccaactcaaactttggttcattacttttggatcttttaccctttgtttggctgctgagaaaactgaggaaatagcgtaatataacattcttaaatctcgcgtttatgtttttatcttttttccttactggtttccagagaaacaaacattagttttaccactttttgatttacattttcacctgttatctcttgtgtcattacaatttttttttctatgcccattatttggttgttgacaaaatagaggaaaatagaataaatagcgattgaatcttgtgtttgtctctttttcttctggatttcctgaagaacataccataccctttttgttaggttgctgagaaaaccaaggaaaagatggtaaaataataacttcaaaacttgtatgatgtttttctttttccctgtcacggttttgaggaaaatgaaaaaaagtttcaactcaatcatgaaaaatctactattcaagattttgggttttgttttagggatttctttccttccatagaaaacttgcagttttctctccatttaatttaatagaatatggctcagaaattccctattgagtttgttgtgtcactcttcccctactgaatgaggaaaagaaaataattttctgatttggatggttagtagcttatgggctcatattctaacagcttaagcttttagggaagttgatagcttaacatggtacaacaggagtttccctagcagcaacctataaccattctgtcatgtcctaattgatataccacggccttccctaaatcctaagctgtctgctgtcaatcctagatgacctcaaaatactctgttgcaaacccctctaagccctaaacaccatgctgcacttaaaccctaatgatccttccacaaaccctactcattctgcagcaaccattttaaaccctaaccttaactaatctaatgcaagtctcaaatcactttgaatcttggattttttttttctttttgaatgtctgcccccttttcagcaaatcaaatcttgctacttcctgtttactctctagttccctcctattcagatctgttatacataactttctgtttgctactagctatttcttttggccttgatttagagtttctcctattgtttattcccccatgtgagggagagtgtgagcctgtcatgacattgtaggttcttttttaacagtttaagtttcaaggaaaattagtaatagttcactgcattgcctttggctgttacatattttgtttaggtaattttttggtaatcgtggattatttattgttcaattaaaaagtgatttggtgtttggggacttaggcctttcattctgtttgttttttggttgtagaaattgcctctagcatgtcctgaaatttgcacaaaatcaagggtatttgtgcagctagtttcattgaagagtctattcataatgggatgttatatgcttttgtgtaaaattgagggcagttatgcgccttcttgttttggagtccatttggcaagggtaaccatttttcttttaaatatttatctttattttcctcatattgcccctagaaggattcaaatgcatcaggtacacgagtagtttctgagttctgactgacaaatgaagccatgttatacaattgtcttcattcctcgagtagattcagtcattttggtcttttttgttttttttgggatgttagtgcactatatttcccaacagttggaggggctgtttggtttttattttattttttgttttgataagcaaacaaagcattctatgtaagagcgctaagaaaaagggggcacacccttgtatacgggtagcatatacaaaaaatccaaccaaaggataccgactggtatctgcaaaaaactgtcacaatacccaatctatctgcagttaagactattcaaaaagccaaacactgagaagtttcccaaatctaatgaagcatttgactggctctggtgaagttgtcctttaacttctgatttgagagctcttcacccttagagattcggtgattatccgttgctaatgtaggatagatgtggttttcttaaaaattatttttcagtatgatatatgtgtatttagattcattactagggtttctttagatggtttttttcccttgactgttggcacaagcaatataggttacttactacctggttaccccataagccggatgaagggtattttggatatatcttgtagattgttattgtcccttggcaacgtttggttgtgatcttcctgggctttcttgatttgatgtgcacttatattttccaagttgtttttacctattttttttttaataaagaaaagggtccaagctgcatttgttgcctatcctgtgtctctttccatgtattacctataggtattggttatagacttatagtgtttcaagggattgcagtagcatggtatttgcttattttacaagtctaatttgtttttggtacggagctgaagacttacttaccaatgtatttttcgcatgtttttgcgaaccttgatttaaatgcatcaaaagttgattgaggatgagcctaaacttcagaagggtgtgaggtattaattgaatagaaattgtctagtgccatggttttaaaaactgaactggatcggccggtcatggttctgatttggtccgacgaattggaccggaaagtgattgaatcggaatcggaccgggtgaaccagacgaaccagccggttccctccgaactgttaggttcattttttttttcctcccagcatccgcgcaactgtcccattgttgctggccactggagcgtcgtcctgctggcaacacccctcccaaaacgttgcaaagccccgtcgcctgccactcaacaccccacccccccgccttgcgcccactacaaaattcctccacaacacccctccccaaaacgctgcaaactgcaaagcctcgtcaccggccactcaacccccccaccgcgctcccccaagcccagctgcaaaattcccccatcccccctcctctcctctcccaaaatccccttgccttcctagtccaccccccgcgcacccccttcccccccacaccccccccaaaaaaaaagaaaagaaaaaagaagacactggaaaccaatcctccgctgtcacccccacccgctcgctggaaagcccttccccccaaatcgctgcaaagcctcatcgttggccactctgtcgtcccgccagcagcacactcccaccgtgcgccccatgcccagcaatggaaaaattctcccatccccctcctctcctctcccatcccaaaagtcaaaagacagcttgcccccttgccttccatttttgtttttactttttaaaattttaatttttacgttttatatttaatatcttaatatttaatttcttaattttttgtagattataattgtaatgataggtttaatatttaaaaatttcatttttattttatttattgcactttgaaattttaatttattgaaaatattgggttattgacatttacagataaaaaactttataaaaaaactcagtagatattattaaaatttagatagaatttattatttttatttattaatttttttaattttaataatatataaatatatatatttatgacgtcaccgattcgactatcggtccgatcagtgaactgtgaattggtaacttttctggttcgatgaccgatccggttttgaaaacattggtctacacttgtattctcatataaaagaaactgactgaggcattctatttttagccaacaaatgatgttttcaatcttgagtacaacacaaggcaggtcgagggcttgctattgtctttagagtatttattttattgctgctctctgcttttcattagttactatggattcttaggacctgttgcatagcagaagtgaaatgcttttttcagtaatgttttcatttttgaaaataatgggcaaggaacaagtttgttttggaactgttttcaatcgttaacttgactgccttttggaaagcatggaaaactacattttaacaattttcaaaattgactttcccttatacgcattcctaaggcggtggcaaaaaggattgaaaaaatccaaagagatttcttgtgggggggaggaagcttggaggggaaagttcacttgattaattggaaagtggtctgcagccctaaggaggaggggggattaggcatccgaaagatagatttgttgaacaaaacattgttgggcaaatgggtttggagatatgcctatgagaaggataacctatggaaaacggcgataggggtgaaatatggacaagagggatgtgggtggaggactaaggaagtttgtgggccttatggggtggggttgtggaaggagatcatgaaggaggcggattggtgttgggagagcatggattttaaggttgggaaggggaatagagttttgttttggatggataagtggtgtggcaatgaggcgctttctcaaacttttcctcagttgtttacattggcgggtcataagaatgccaaagtttgcgaagtgtgggattctagtctgggtcaaggaggttggaatctcagtttggctagagatttcaatgattgggagaaggatcagataggataaatgctgaatcttctgaaggacttcaggatttctccggaagaggactcagtgagatggaagcgggaaggcaacggcgtttttggggccaagggggcctacaaaagtttgagtggctactcaactggtgtttttccgaatagacgcatttggatggataaggttccaacaaaagtgcctttttttgcttgggaggcagtgtgggggaagatcctcacattggataagcttcaaaaaaggggatggcagctccctaatcggtgctatttatgcgactgcgaagaggaaaatgcgaatcatattctcttacattgtacagtggttaaaactatttgggagattacccttgtcattttcggagttcaatggttgttcccagagtcagttatagaggtgttacttagctggaggggttcttttgtggggaaaaaaagaaaaaaaatatggaattccattccgttgtgcattttttggacggtttggaaggaaaggaataagatagttttcaggggagggtcattagatattcagaaattcaagaatttttttgtatgtaacttgtggagttgggctaaggtgtacattggtgaggaaacctactctctgttaggctttttggagtggtttgggaccacttgagggtgggtgaggcttttaccctttttttgtttttccagccttgtttggggctgttcagtataccccctgtatacatgcggctttcttagccttttttaatatatttgattgtttatctatcaaaaaaaaaacatttttcaaaattgactcattttgacatgtttccaaaaacagtttaaaatgagttcttgaagatgttatcagtgtcctttccattttctctgtttttgaaaatagaaatctcatttactcttacctaagaggccctttgttttatgatgtaaacggttctgaaattattgattttcttctatggtttacttcatttctaagatgatttgacccttatttccttttaatctcacagggttcccaagttcagttctcctcttctaccgc

SEQ ID NO: 10884 - DNA, 5620 bp, Vitis vinifera
  Intron number 4 from transcript GSVIVT01037889001 (locus G SVIVG01037889001) derived from phytozome v7.0 (chr-ID chr3 ; pos 6681934 to 6687553)
tgctggactatttgcgatcactacagccagagaaggtttagtttatctaacccttttctttgttaattctctttaatcttcaaaagttgttcttgcaacatataagttttgggttaataaatttttcctgtattttctgattgctgaacttttctccttggtcatttactagcattagatacattggctgcaggtctcacatcaaactagttgaatatctgacttttattgctattaatagcgtatttgttaaaatctattcaaatttcatattagatgagtatcactgctaccgtatgatacaagataagtcacatttgacttttattttatgtttctaaaaaatcaaatttaatttcttttttaaatggttattttttaaaattactttaaagttaaaaagttaatgaaaggaaaaaaggacagaatgattttatatgcaaacactgtaaacatgttttcaaaggcatgcatagaagatcttaattctaattaccattcctatggatatctaggagattttatcaaatgaaagatatgtggtttagatgatttgcatgttcaatcttaaggatggtgaatgaaatgataaagcatgttaggtaggaaggagctagcaggacttgagcttatcaagagtgtaggagatccagaaatggatgctcagtttggagacaagaaatggtttggtattgaataaaaaaccttgaagatcttggttgagaggatcaaaggcaaggtgtgtggtagggacatgtgggtaggagattctaagctaaaggatctcttccctttgctgtttagaattgcagctaataattctgcaatagtggctgatctgtggggaagacaagaaggtggaggtgggggttgggaggtgcactttagaagaccctttcaagattgggagttagaggaggtgaaccgctttttgagttacatttctgcagtaagggtgcaagaaggggaggattttctggtttggaaaattgagagaaaaggaacgtttaaggtaaactcttattataggtctttgaaggaagacaatagccctttatttccagtaaaggaggtttggggttcgtatgcccctttaagaactcgtttttttgcttgagaagcagtttggggtaaaatttccactatagatatgctgatgaggaggggttggtctatggctaatagatgcaacctgtgcaaagaaaatgaggaaacggcaaaccacatcctaattcattgtggtaagacaagggatctttggaacttattgttttcttcgtttggggtggtgtgggtgctcccggattccgtgagaaatttgcttcttgagtggaaaatgaagggcatggggaagaaaaggagtgtagtttggaaaatggcgcctatttgtctgttttggtgtatttggggagagcgaaatcgaagaaccttcctagaggaagagatgacaaacacgagcttgaggaaactttttcttcgatccctgcttgaatggtctcaacaatttgtggacttggacttggactatctatcttttcggaatttgatgggtgatagggttgttgcttagctaatcctttttagtctttatttttcccttgttgccttgtttttgggccttctttgtatacaacctgtgtacttagggagcgccccctgttttctggcgtttttttaatctattggttctctttgtctatcaaaaaaaaaaaaaaggcaaggtgtgtggtaaggtggttgaattgtgggcaagaagcgtagaaagacttggatggcaactccattatgcttattttggttggtttggaaggaaagaaacaaggttgcttttgaaaatgaggatcttttgattcaaaggatgaaaaattcttttgtatgtaatatttggtcttggtctaagtcgtgtatagttgaacgacctttacgtttaatcaacttttttgattagttgggttttagatgagggttggtgagttttttttgtatcccttcttcttttttgttcttgcctttaggcgcctcttacgtactccctgtatgctttgagttggcctttggacgcccttttctccttttatttataaaattttctgtgcgtttaacaataaaaaaaaaggtggttgaaaggagtcgaggtttatcctcttggcttggtttcatatagttggactggattttttgttggatggggctgaggtttgtggtgatttcatcgatcagaagctttataggagagtttggttggggggaggaagaggttacaagttagagctgtggtgtaatagagctggaggttcttgcagggcgtggagagaagagattcactctgatattcccaggggtgtggaaggtgatggcaaagaatttaagaagcttatggatagctcgtgtccaaagggtgaagcaggtggctcaaatggtcaggtcccaaggttgggaaagtgggaaggatggccctagtgaaggtcctccttatgcagagtcgggtgagcaaatgcaggggtgaggtggcagaatcaatttggattcaactgggaatggttgacatctgcaaatatttggaatgtctgaatcgttccatgtaggtttttggggtagctctttagataagggcctggagctatctttgttgaaatcatgggcagtcttcaactgactcttgtcagggaacttacaattggcattattgggtgattcctgaatcctgctttgactttgaacaggttctcgattctgaaagggtgctgcggttgggtttgagaagatacggggggaagattctttacccagagaggtggtatccagaaattgggtgctttaagagtggtgcatgtgccaaagaagtgtgggtgcgaatagttggggatgtgtgttggggctttgtggctgtggacaaagacatagcactccgtaggaatatgcagtgggctaggatcctgataagatttaatgtgagaggccttccaacttcccttcatgaggtggtcaggttgttggacttctacattcaattatggtgggaattgcccaccatgggcgattctagttgaactgaagaaaacttgtgagggtgggaggacaaggtgaaggtgtggggccttcacgtgcagtagagagcatagggatggctggcaagtgttgtgtgaagggtggaaaacacttgttgccattgcgtttaatgcctaatgctaaagggatggcagggccagcttttcaaaggcttaacaggcaggtgtggaggggccttttgtgaagggtaagaatgtggctgttttggaaggcccaagggagctgagtattatctcttattctcttgttaagacccatgataaagagatgggctttaatggcttgggttttgagggtaataaaaagggtgtgtttacaagaaacaaaaattcagaatatgttttggagggatagaagaagtgtgaccaattaataatcccactcaacgagatttgttcgaaaatcaaatcgccaagatggaagaatcatgggatgtgtacaataatgagattgaggaattactccttaccagaatgtaaagaagaggaaaagaatctcaaaggtgagattaccctgccaagagtcttcctagaatttgatttagatccattgccaataactaatctaatatgatgaaggaaggcttggaatccttgttagatagctttccacacttattgagtggtcctgacattggagttgtcatcctattccttagattgcaaaccatatgtaatcttgacaacagggagctaaggagaagttattcctcaggaattctctacaaccacttgcctatataggctttgttgcaagctaaaaccccctcaacctagggaacctctctgaaaggtgaatctcaaagatggactactcctagaggggggtgaataggtgttattaactaatttaaaaggtctcccaacacaagttatctaatgttaaagatttttacaattttttcttctctttacaaacacttccgaacacaaagtagaaatcacatacaaatatgaatgcaacaacactccccaataagattaaaatttgtaagtcaaatgcaaatgcttcaacactcctcaaagttaattcataagaataattatctccttaactcatttcaatttactacttgatatcattagccaaaatgaatagaaaaattattcaaaatatcaaatggataatcacacttatttcaaatcatatctcttccattcagcatatatgcctaagtaactaatgatatcaaaaactgaaaataaatcaaagagtagaatgagagaaagagacaatgacaccggattttaacgtggaaaacctccgaagagataaaaaaccacgggcctacaatcaatcgaaaatgtccactatgagaacaaaaactgaatacaaggttttacctagctcaagcttaccaatccttctcggaccacttgactagtacctttcacttttagcttctcactttcttcttttgaagcacacttggagtccacgccaagctcaatctcagtctcttcttgaatccacacaagaagaaaatgagtttttacccaaacccaaatagattagaaattgagagatgaatgaatgaagaatcaacccatttttttcttaagaaaatccattaaaaacagtttggaaaacaataggaaagttggattttcttggcaaacaaacaccccaaaataggaaaggagaagagaaccaaaggggatggatgctgctgtctctctctctaaaacaggaagcaagttttgagtctttaaatgaaaaacgcccttgatccaacggatgagatttcatcaaggaagtgcaacctggatcgatctggatccaaaagtcatctggaagcagtttccatcatttttgtccaacttttggataactctgtagtggtttccatttgctaccccaatttgcatgcaatcacttacttgtcttcgtagaggatattttttctgtatgcttctctgaaaaaacaaacagatgccattaatttttaaaattaataaaatcctttttctataagattctaaattatcaagtcttgattgcaccttcactctgtatttgtttgcggccatccatctctctgcttcatatgctccatcacttcttgagtgtattgatgttctatatgcacctttctattatttgtaggcttgtggtcctagttcattgcattggagtacagggacaaggtttgcttttggttttactgttttgactaccttagtgccaaatatcaagttatagtaacgtaactctacattagtcaatttgtattttctacctgttacgttagtctccctatgttttctatgcgttttattatatagaacatacttaaatactctttgaatcctaataatgcattaatttttttagtatactgtggtgtatctggtttggattgattctggtcccagtttgaccaagttgtgtgtttctttttaccttctttgtttgaatgctgatatactgcttaactatgttttacttctagatcctgtacagttattttctttttaacttcattttcatgactcataaattaatgctgttatcaggttgccgagctatcagaaccagcaacccctgaatt

SEQ ID NO: 10885 - DNA, 4462 bp, Vitis vinifera
  Intron number 2 from transcript GSVIVT01032544001 (locus G SVIVG01032544001) derived from phytozome v7.0 (chr-ID chr1 4; pos 28220128 to 28224589)
ggtcgcattaatgaggtaaatcttatgttttgtttctcaatgaagcattccgacttgttgtttcattgtatggttattgtagaagaaatccgggtggctttgcataaatgagataagataagataagagctcattactggttttcagtttttagaaacgctggtatgccatactctatcagccacaatttgttcttaacagatatttaagttagcgcctgtttttgtttgttacacaactgtttgcatctgtattgatattagactagtccattgcaaatcaagtgttgttgatatatttatgaaaaccctctatctgtatggaattgttagtttgaggaacagaaaaaaaattggccacttgacatgtgtcaactcagatggcatgagatggtgtttaacgattccatggaaattctatcggcccattttgtttttaatagcatttgaacagatcgttgacaaatggaaacataactatgatcattgagatcaaacagtagttaggtcattaactggattgataatttttcttttttttttgatggattgataaattactggtgatttaaacaacttctaagaaacaggcttataactgccataaaaaataaaagagactcatgtcatgcacatggggaagtctttactttaaatttgtatctgtcagcatcatccctcagctgataatttggctgcctaattcaatgggtattaggcttgtgtgtgttttcaaggtactgatgctctctagatcatcattcaaacaaaatggttttcttgtttgattctttatcatgcatttcaaaagcagccttcctatcccattctaagcataagaaagatgagttaggaaggatgcagatgatctatccctttttatttatatatgtctgagttcctatttgtgtatgaattaatcagagccgggccaaacttttgtcaccttccccaatcaagtccatatgtaagaaaatgcactgtctctcatcctaacatggctttgttctgattctccctagtaagggactattttgatggaacaactttatttatgactttgggatatggtgtgttgttggaaatcatgtaaaatcgtggtattactatacaagaaaaaaatgatggaagcatacagggtaaatcttgtcacttaaacttcattcctaaagcctactatcttggcatctctgttggtgaactcactaaaccttgcacctgaatgcacagtgatattgttggttatagaaattaagggaagaaagctgccgcaggtggttacatacatgagtaacacgacaaacaagtgcagcaaagaatacagtaagatgctattttccatgaaatttcctgtttctgacaaccatggttttgaagttgctatgcctttcaaaacaagggtaatatgtatttaagttaaactgtagaggttcatgcatttgttagatatgattctaggtttaagttaatagactagtaatatgtatttaaattaaaatatgaggttcaaatggttgttgatatgattctaggtttgaatggggtaagttaatggacttagaatgtttgatgtttatttttatgtcaggatctcactaagagcacatacatgtttgatggaaagtcatgcattctatcgaattgaggatacttattcgtttttcttggaccattgggtgggtgggttggagcttatgactttgctatgttaatcacattgcaacaagctactgagaaggaaacttttaatcattctctcgacaataggttggataaaatgaggttttgaagacactgcagattctattccattgtgtcatataggaatgacaaccttaagatgtagaagctcaaacagttctttttggatacttccatggtttctcaaaatggtattcagcgaaaggtagtgtctactaaaaaccattgaggttggtgctgcttgtttggtgtttccttctatgcatccatgtatgtccacccttctgtggtgcttatttagatatcatttttttgactgtaaaaattaattatcgaggttggtacatgttagatatgctgtatggaggagagattgttagggttttctacttcttttaggtctgtaatttagatagagaagttggttttactattattgctttcaattttcaattagtatgtttagaaaagagtggtagatcaaccttacaccttccatcttttgaaaagcttctcaacttgaagtcatgattcatgcatggaagacattattggtctggttcattgtaatagtgacaatgccctcaggcagatcttcttgacttatttttgtaatgtcgaactgctgggttaatagggatgtggagtaaaagaatgtatatataaaattctagaattgttatagtttgaccaatatcactcatggagattcttgtaattgtaacagagtgagctctgagtacttgttatccatattccaatcaaccattcattttactattgtgtgactaattggatcaagtatgcttggtgctctgttgtgattattaagaggatctgggagccaggggatgctgttgttggcaaatcatcttattctttactgaaatctggccttgattcttgaggattataaatacgatatatttatattgaaatattctgtctctgaaagactcctagaagaagcatctcatctgggcccttctccactgatccatgatttgtaggttgcccaggagagtggtagtggaagacagtttcagaacgaacctccaagaatcaggactcctcaattctgattgttttgttggcccaacaacatagatgattattgctggagtaagtcatcaggctccaattattttaattaaggtctaaatcgagaaataaatgtattggtggtactgaattaggtatgtagttgtacattatgatgctataattgaagggctttattattttctttgtagaagttgtctttgttatagaattgttgcatgaattgaagaggcttgtgaatgtattctttttgttggtcacggtattgaaacatgccaaacctttctgtgctgctaactattcaataaatatagtgtgaagattcatttgtcattgcaaacatggtctttttgacatcgaaacaagtgaatataccaagacgtgtggtgggggatcttgggcatgtgactaaagtacagttctaaatgatagacgatggccatttctgatcctataaacttcattctccccaagtcattccatatcttcattggcctgaatcttgcatggagggagtgatgatgctctcttattgttgtgaaaaagtctaatcctgcatttttaggcatagaataatttcagattttcttaaatcaaagcttatcttttgttttctttgtgtgttctatatatcttttgtctagactttgttcttgtcggaaaaaacctttgttctcctaaaacccaccccccatcccaatctcaaccttaaaaaatgcaggcacaaaaacagactagaaaactacagtcatgtggttgtttttagcttgcattagtttattggaagtttataaatcaaaatatgacagaattttaatgtaatattacggaaatttggacaaaaatggatttgtgctgatgggcaattgcttgtaatatttattttttgaagaaaaaaaatcatgttcagggtcatgttgctgaatatggttggtgcctaaagaactggaaatgggaatggaaattaagctgctggagaagaaaccaaaggaaaatataaaaattgccggagttgtttgctacttctcttactggtgtttggagaagttttcaactggaaaggaaaagagagaagaaaagcagaggaacatgaaggctcttgtagctctgttatgggtttcctcttcaattaatcttccaaatagatataaaagctacacgtaacttgaaataacctctctagatggcctccacatgacatcacatgttgcctctcttatccaacaatgtaattcccaatagccactggtctctaggaactgcatgcttccttagatatctcagaaatgctgatctgaatgttgaaggaaggcctcagattacaatcccacacccgatttgcaaaatagagaggaaaccctttgatgaaatcatttcaaatgaaaaactggtatcttagactgtttaactgatgcatggttgtcactcttgtgtgttaagaacgcaggacacggctctcctgatctttccattgtagacaaaagcagaaaactataactacagtgtagagccgttgatcaataactaccatcttaccgaatgatcaatgctactgccttgccacattgtcacctcctctctctatccctcctaagaatatgaaaatgactgatttgttcctggaacagaagtcttttttcgctatctactttatttgcgtgtcttctttgaatatttcttataataataagaattaacat

SEQ ID NO: 10886 - DNA, 6487 bp, Vitis vinifera
  Intron number 5 from transcript GSVIVT01026145001 (locus G SVIVG01026145001) derived from phytozome v7.0 (chr-ID chr1 0; pos 12936297 to 12942783 reverse strand)
tccggcatcgtcggggaggagagacgacgatccacgttgatcttcaataggtgttgatatttatgtatgttgttctttttgtgtgtgtggagatgagaatttttagtgaagctagggttagggttttagggtttggttgtttttttgaaggggaggaaaaaaaaatttagggtttgtcctaatttgaattattactatgattatatgactaggttatgaacgaatggattcaattagctttgtttcatctgcattctcccctgttgaagattagggttttagcggtctactgtctaggtttttggggttttgttggagagagaagagagattgaagaattggggtttctgatcaatcccatgatgaaaggttctgctggtttcctctgcaattcagatggtttactgcaattagtggcttggatttgacattgtcagaagttttcctgaaaaagaaagtggataaattcttggtacttctataagcaaacgctgggggttgaagactacctttggggttggatatgaatatgaagaatttgttgaattatgatgggttctgcacatactatttttgaataattgggtgcagttgcaatgattgaaacgggtgaaattcagggcattatgtgccatctagcttggatcaatctggggaaattcggtctccttcaaattggatggcactctcatgcttgcgaagggtggtcaaatgggcaacttgctagagcagaattgcagtggtaatgagatgatatgcggctatggcaggggttgtttcttcctcactctttggctttcaccctttactttgttcttgctaggcgatctcaaaggagactggtgtgtgtaagggaaaaaaaaaaaatgctctggttcctctctgtaagaccctctgttttgaatcttcattgtattcttagccatttcttagatttatcagcgtgcaaataatgtgttttccttgtatgtatgtggattgtttacgggtgcctgtggtgtgaataaaaaacccatctgtttctttcatttccccttccctttgctttgccatttttgtttttgctcaatgttgaattgactgcttattctgcctaattttgagtttgcatatgtgccccatttctttctatctccaattggttttgttcccttgatttcttatgtgtttttttcttcacagatttgagatcaagtagttgacatgaaaaccgagaaataggtgaaactccataagctgattctacttggctggatcacccagataagtggtttgaaaactggaatgctttccattctgtttggtttcatggaaactcattcttgtagagccttattcttccttgtggggctttcgggttttgcattaaaatgacttctcctccacctcctcttccttccttgacaggagaaatggccgggttttgaaccccatcctgtgtgcataaaaggcatatgctgaggggaggagaggaagaagatgaactagtgatggagatgagtatgaattagaaaatcccagggacacgacttagttaaggcgcacacagtagagacacagtgaaagaagtggaaaaaggggagaaaagaaaggtgaattgaggggggttggcccataatggtatctttgtagtggtgggtgtgtcttgcctcctagtctgtgttttgtggtgtttgtgactttgtggtcggagttgttttcctttgtagggccttatcttataataatcttttcccatatcaataaagttcttgcttatcctaaggcaaaaaaaaaaaaagaaaaaaaaagaagaagatgctagtgagataggtgataattctactaaattcagattctagttcaactgggttatcttaaataagtacaagaaaggcaataatatggggaatgatttgatttagcagaacaattaatgccacctagaatctagtaaaggggagcaacctcacaaaacccaaaacccccaattcatcatttgacatgtcttgtacttttatacatgttgattattgcaaaaacgagggattaatcacttagaaagcaaaagtgatgggtccccaatggttaataaatgggcccctttggaagacacttagcacggtgaaaagtgaaaaagttgtcataatattgtgttttgaccatcttcattgggcaagttgcaactcgcaactgcttgagagctgcttgctggcccagatttggagggccttggcgattataaatgggccacatgctataactaaagtggttgtgggctctcgtagttgagtgagcacctgtaactttgggccattttcaagggtacagggtgagtttttatctttttgttggacatcaagactcaaaaagcctagacattgacctggttatcctcctccaaagtaggtatgttgcagccgaggaagctttaatgcccatttatgtgtaatgacatgattataaagaaaacatatacaagcttcttgtaagtttcaatccttttgttggatatcaagactcaaaaagcttacgcattggtatgattatcctgtatgggtcgatgcgggagtacttgttgtaaaagcgctttttaacttgtagtgtttgacaatgtttttttattatgaaatacataaaaaaaaatgggagagttacccgataaggtagacgggaaagaataattactaggaagacttactcatctcaaggatttttagaggataattttaccctttaatatgttttttatattatttataaataaattagcgattgtcaatgatgtgggacccatacatgatagtaagtacaggttgataggaaatcaacagtacatttctcaattcgaaaaaattattgttcacttttaaacaatcaagtgattgttaaaaaatttgctatattttttttcaaaaaattgagatttttttaaagaaccttataaaaaaaaaaaaattttaatatctcataaataaaaaccatatcctaaagttattatatcgttttatatatggaacatataattaaaagctttgttaccataatataatgaataattattttttacgaacactcattaattgaataatatataaatattcaattgactaacacacacctattaaatggaataactcacaattattcattgggtaatatagcacgtgaaaaaaattaaattatgttgtaatatattgaaatgatagtgtatttatattgtaaatataatgcatttatgtcgtgcctatatttcattacaaaagtaataattctaaaaatatttattcatatcctattggtattaacatatcgtatcaatatattaacatcatttatctagtgtattgaaattatttgataatttttgtatatctatatctatatatatataaactatgagtctcgtgaattcaaattagtatttcatttggtttcaaaaattatttatgatataggtatgttgtgaaatatggtatgatcatataaaattatcatttttataaaaaatttcaaaaatttcctaattaggttttagtgtaatgtattgtaatgtaagtgtatttatattgtaattataacatatttttgttgtacctatattttataataaaagtaataatcttgaggatcactttttataccttattaatattcaacatatcaaatatattaacatcatccacttgatgatgcattgagaaaaaaaaatttatatatgaaaattaaaaaaaaaaacactatgcaaaggaaaaaaaaatcatataaaatttaaaaattattttattataaaaataaaaattgattaaacttccttcatcattttcttattctttttagataatctgagtgaaaaattaaacattttatcttctttgaatttaatacaaaaacataatttatcaatttaaaattatatatatatatatatatatatatatatatacatcattttttcttaataaaattaaaaattagaaaaaaaaaacaagaaatgatattttaaaaatattttttaaaagtatttttgttttaaatagtaaatttaaataacaaattatatataattgtaaggattaaacccaaaatttttatttaaaatttgaatattaataattacaataaatatgggacccacataccataaatgtcttgacaaatcaagtgaagtgctttaaatgctttgaattttaaaagttttagttgaaagtcaattttggtatttaaacctattaaagtccttcccaagaattattagaaaagccactctttctagtaattgttccggcccaacccattgtaattctccctaaaaaatttggacgaagtacagtgtttttataaaacatttttagtattaaaagtgtttttggagaaaaacacaggtttgataaaaattaaaaaatactttaaaaatgggaagaacattgtactgttttttggagagcacttggaatgtgatgaatgtgattgttgttaaaaatgcttttagagaaaacactaccactgaaaaaaaaatttgaataaaatattatcaatggattataattatgattatgattatgattataatggattccattaccaacactattaaggataatcatttagtatttgaattaaaacaaaagcactttgatatagtgtttttggtaatgtgttatataataaaaaaatgatatcgattttcataaatatatcaatagttgatttttatggatatattagggtatataaaaaaatattaatgaaaatttttataaaaaattattgattggacgaaaattgaccaaaaaaaaaaaaaactcaataattttactagtttttttcaatatttttatgacttttttctatcaattttcgtccaaatcattatatatctatatctatatatatatatatatatatatatatatatatatatatatatatatatatatatgcatttataacaacaaaacacattaggtttatggtagagactatccatttcattctcaaagtcttaagttatatttagctttgaaaaagcaatcttaccatagaaacggaaaagacaacagtgtcacatttaatatgttgatgccttaaatattgtcacaaatgatatcaagtgtgtttgatagtaatatttaaaagcatttttagtctttttaatacttaaaaagtaaaaaattgtaagtgttaaaaatattagaaacactttctaaaataattaccaagcagattctaaatatcggtgcaaaaatattaatatttaaaatatttttaattaaaatattttttgatgctctaaaaataattttagaaaaatcatcattcaaatatttctctaaaaagtattataattaattttcatattttaatgatgctttttaaattttgcaaaaaaattttatgttagaaatgtttttttaagaaactgtcaaatagaatctaagaatcactaaaaagtgattctttcaattgattattattagggagtgcttccaacttccaagtattataaagtgtttttcaaaagtgctcaaacgggctctaagttgtcccaatgattctttagtctttaaaaattgtttagatttttgctaaatgtttaatttttctaatcttctaagaattacttctaaaatgttaagtagtggaaattttaagaagacataaattttgagttgtgaaaacaatcccatgtgggcctaattttcaaaatgcaaagcttagattgagagggttgaattgagtttgagtttgggcagttgaacccaaatctccatcttgtgaatttctattatatttttatttatatgatcatatttttaaagtttttgttttatattctaaaaaacgcttgaagttgtagtggatacatctaatatttatatcacatacatgaactaaaaaaaggtaaaataattaaagggagaattatttgaaagtatttaacacatgctatccttccttccactttcatattagggttcttctaagtgcccatatttgttgaatacgtcatctgattaagtgagggtagatttgtaattttaaaccgcatttttgtcgtgaaccacatagagctcatattcttactgatttttaatttttctttttccctaatggaagaataggattatagtaaatacccaaaaaacatcttccattttcctgcatttttctcagaaaccaaacagagcccataaaccctcaacacatccactgttattaaaactcctctctctcacttcctaaactctatccacaacaacccaaataaaaatttggcaattacttactggcactcctaatagaactccaaatctgggagaaagccccaaacacttgaggcaacgtggaggtgatttcgatggaagtaaccccgagggctagggtttgggggtatccgggcttggagtcaagcttcatctcgagaatggcgaggtgggcgttggctgtgtcgagcttccctgacgcatccactatgaactggtccttcttgcagcaactgaaggag

SEQ ID NO: 10887 - DNA, 2981 bp, Vitis vinifera
  Intron number 2 from transcript GSVIVT01032877001 (locus G SVIVG01032877001) derived from phytozome v7.0 (chr-ID chr1 3; pos 5503 to 8483)
gagcgtgggtatttccttattatcctacatttgcattttagtatttcctcattatcctacattcattactccaatacatttgagtaactccttttttatgaggtctaagttttggaaagtttcggttgcgtactagggttcaataatgaattatggtatgtgcaggtatgtcatgcttctagatctggacatctttgttgtaaaaattgttctgaacctgtaattggtacatgcttggatttccatgggctattccccatttcttatcatcaaaaggattctatgttagtgatgccaatcaattatgacatttcttttttcacttggagcctaatacttcaaaaccatagatcaacctggtgagttgggtggcttagcctcattaaatcattgggtggtcgtggttatttgggtatatgattgttactacttgtttcattttttttcttgactttcttcttcatggatttttccctcagaaaatttggtttcatttcttcactatttctctagttttgatttcttgactctagctatttttaagaatccatttattatgactctcacagtttctgatgcagcacacaatcatcattagtttttatttttagcttcctacatcattagtttatattttaaattagtttctatttcctacatcagtggtttctattttaggttagtttctattttctacgttattagtttctattataggttcatcattagtttcctatttctttcctagttttcctagtttccaattcccttggtttcctatttctagtttcatatttcacttatttcctttatttttgcattgcaaacattatttaaaggctcattgtaattgttagagaggagttcaatatattttttcagaattattctctaattttcagatcctattttgacctttgtgttggttctcgagtgtttttctgtttcggtttgaaacaaacccttccactgcaccagtttctcaattagatctctctatgcttctttaactagtggagttagagattcattcctgacaagcgtagtgtggagttcatgggcacttgcgaagttaggcttctttgcctaggaaacgacttagggcagaattctaacactcaatcagctcaaaaggagatggactttgatgaatagatttttttgtgccaagctaaggaaaaaatattagaccacctgcttcttcactgttccaaagctagaatgtcatggcaattgatgctctctcttttatgtggcttgagtgatgcactcttctatgagagggaatcttttggggtgcatggttctttcgtgggaaagaaccagaaaaaaaaaaaaaaaaaaaaaaacattgagggctgctccattgttcttgttttggagggaaaggaacaagaggccatttaatgttatcaagcattcagatcaagcaatcaaagctaattttataaatgctttcatgaattgggtaaggatctacgtagaggaccaagcaatgtttatgatcttttatattggttgagctccatgaaaggagagggtgcattttttgtttgtcctcctgccgcttagattagccgtcttttgtacatattgtgtgtgtgtgcgcaaattctcaaaataattttatatcttttcaaaattatataataggtcacttatatacaatgagaaccacctacagaaggaagatttacagatatgacattactaagttacaatcagaaatcaagcagaaaatttgtacaaaagaataacaaaaaaaaggtaaactaggaacctatctaaatatagtcaatcaatcaacctagaatcaaggatgtaaatccggtaagaaaataaaatttggaggttgatttcccatactctcactcaagtaggttcaaagatgtccataatacccaacttgcttactagagagtgaaacacttgttttgtaagaatatttgctaaccacttgtgttgtcacaaatagaatacaaattaagccatgcacatttgcccatcaaatatgtgcatatacatatagagatacatacatacatatatatataaggtttggccatcctgctccattttcttttgtgtgaatgattgtcggatggttcctgacaatggctgcttcagggaagctagttccagttacttggactctctcccttgctgtctgtttgtatgtatgtgggctggttcctctccctccctctctctctctctctctctctctctctctttgttttgtttgtgtgttgggggggagagggggagacacggatatttggggtctacttgttagttcaaactggtgtgaaccatatacctctggaaggtttgaccatcctgccatgttttctttagggtgaatggttgttggctggttccttcaaagttatgtgaactttctgcttctgcaaaggtttcatgatcacacttggagaatcataaatcaaccacggaaaacctgaaataaaagatgtgtaattttaaattttaattttatccattaagaaaaactgaaataaaagatgcgtataagcaaaactgaaataagagatttgtatgtatatattttttttgatagatacgagatttgtatgtatatgtgcatgcaggtatataatggatttatgtatacatatatttatcactgttggtgtgtgtttttgtgtcttcattgctgtagcttttttccatgtccatattttcaaaattttcccttggcttgtctattcatattaactctgtatgttgtgctgtgcccttgttcactcaacatacctcaatggtgatggtttgaatggttaaaccatttagtctgtatttgtcatagatgtatgcatgccattgttcttgatttgtgtcataaatggtttccattttctggttattcatgcaagaaccttagtcatagtctttttgaagtcctttcttctctcaaatgagcagctgcatacatttccagagggaaaagtgtcccagga

SEQ ID NO: 10888 - DNA, 11700 bp, Vitis vinifera
  Intron number 43 from transcript GSVIVT01007875001 (locus GSVIVG01007875001) derived from phytozome v7.0 (chr-ID chr 17; pos 8053510 to 8065209 reverse strand)
aggtaattttctgattaggatatgcccagatttgtatatttacctcttcagatgaatatcagaaaatatttatgcttggtgttagtaacattataatatataggtatactgtacttgcattggataaaaatgcagttgtcatcaaatttgggttttatttccttattcccttggccacaaactaacatatatctcacttttcaacagtgaaatggctgtgtttttctaattcctttgctggattctctctatgctattatagtgctttcttgggcttgtacatttttgtcactttcctgtgttgcagagcttgttttgcttatgcactggaacagttaatattcagcttgttggtattgatcaggttttgtacattttgacagaatttcttgtctctgttttttatgcatgcatgtatacagagtctcaaaagtagttatttggaagaggaattataggatccaaggaatataggaatgaaggagtctttattgcagaaaatgtcttgtctgctgagttgggttgctccttcaggtggattcctcactcagctaattagttagctcactctttgggtaaaccagggggttctaggctaaaggcgttcgtagaggagtttatgccaccttgagagggtttgtgcatctttatggtttttgttttctctttcttcattctggtgcaacgaaaggtttgttttgaaacgaaacaaaaaaaaataaaattaaagaacaaacacaaagatcacaataggatctgaaaattagggaataattctgaaaaattatatttaactcctaacaattataataagtttttaaataatgtttgtaatgcaaaaataaaggaaataactaaaataagaaacttcaaataggaaactaatgatgaatctaaaatagaaactaatgatgtaggaaactaatgatgaacttaaaatataaactaattatataggaaactaaaaatagaaactaatgatgattgtgtgttgcatcaatcccctccacttgaagaaaactcatcctcaagttttgtggctgcaaagaaaactcatccgagggaaagtattcaaagacatcaacaacgttgaaagtattggaaatgtttatatcggctagaagatcaatcttgtaagcattatctccaatcttctgaaggactcgaaaaggaccaatcttgtaagcattattgtatgtgcaagtaggaaaatgatttttacggagatagaccattactagatcaccttcattgaacaacttaaggcgctgatgttggtctgcaacaattttgtaatgaagattaaccttttctaaattcttcttcacttctagatgaatctgttgaatacgctctgcaaactcctctgcattaggattgacatcatgagaaaggggaagacgaatcaaatccactatatgccttggaacactagtgtagacaacttcaaaaggagtcttcttggtagaacgattaggcatactattaaaagcaaactcaatttgtggaagggcaacatcctattgcttcgatttatctccactaacagattgtatcatattgccaagagtgtgattagccacctcagtctggggatggctcgtgttactatacttcaaagaagtgtcaaacaatttccatagagttctccaaaaatgactaaggaatttcacatccctatttgaagttatggaacgaagaatgccatgcaggtgaacaatttcacggaaaaataaattggccacataagaagcattcgaagtctttttacaaggaagaaagtgaaccatcttaaaaaattggtcaactacaaccaaaactgaatcaactccacgttgagttcttgggaggccaagaacaaaatccataattaaatcttgccaaattgtctctggaacaggtaaaggagtataaagaccagtattttgaacttgtcccttagctttctgacacactaggcaacgctgaacgaaacgcccaacatcccgtttaagttggggccaataaaatctctcatctaccaagctgattgttttatcccagccaacatgtcctcctagtccaccaacatgcaattctctaattaaatgttcatgtaaagaggaatgagggatacataattgtgtacctcaaaataaaaatccatattaaataaagatgtcagtaacaaactccttattgttgcatcgcgcccatatgccaccaaaatcctcatcaacagcataagtatccttcaaataatcaaaccccaccaccttggtactaattgtggctagtaaaaaggctcgtcgactcaatgcatcaactactttattctgttggctagacttatgtttgataacaaaagtgaacttctataaaaggcaatccatcgagcatgcattcgattcatcgtcttttgagaattgatgaactttaaagcttgatgattcgtaaatagcacaaactcttgatgaaacaaataatgctcccaatgctttaaggctcgaacaactgcataaaattgaaggctcataggtggatcacttttgtcgaggctcactaaccttttcactaaaaaattccattgggcgaccctcttgagataagacaaccccaattcccagaactgatgcatcacattcaacctcaaacactttctcaaaattggggagtacgaacactggcatagtgcataactttgcttttatcgattcaaagttgtcttttgtgctttaccccattggaacttgtctttcttcaaacaatcggtaatggacgattgtgctaaatcctcgaataaaacgcttgtaaaaagtagctaaattgtggaaactttgcacttcatgcacagttttaagagctggccattcccgaattgccttcaccttcgtctcatcaacttgaataccattctttcccactataaatccaaggaatagaagatggctagtcataaagctacacttcttaagattgatatataatttattagcttgtaaggctaaaagaacttccttgaaatgtgataagtgctcttccacgttcttaccatagatgagaatatcatcaaaataaaccaccacaaattttccaataaatggacgaagaacctggttcatcaaccacatgaaagtgcttggcgcatgtaatagcccaaattggcatcactagctattcataaaggccatctttagtctcgaaagtcatattccactcatttcctggtccaatacgaatctggtgatagtcacctcgtaaatcaagtttggaaaacaccacaacaccttctaacttgtcaagcatgttattaagatgtgggataggaaaacgatacttgaccgctattttgttgatagtgcgattgtccacacacatgtgccaactaccgtccttctttggggtgagtaaagctgggactgcacaaggactcatgttctcacgaatcaagcctttatcaagcaactcgttaagttgttgctgcaactcttcatgctcagttgggctcatacgataatgtggcaagttaggcaaactagctctaggtactaagtcgatatggtgttgaatatttcgcataggaggtaactcattaggtaattcattaggagataaatcaggaaaatcagcaagtacctcttgaaccttggtggggatattaatagttgcttcagattggcccttaaccaccaatgctacaacaaaatttggatccttgacttgcttaaagaaatctaggcttgttatgttggtgaatagcaacttatctttcttagtaatcgaattgttttttgatgattgagactatggcatcaaaacaatcttcttgtcaaaccaccaaaaaacaaaagtattatttcgacccttataagtggcatcatttacaatcccctttccctttttcttttcacctttgtggttgatgttttaagtagattgattgtgagagcggaggagacatgtttatttgagaggtttctaatgggcagaaataggatccaagtgtctcatttacaatttgcggatagcaccatatttttttagagcatcatttgaagagttgcattctctcaagttaattctattggtgtttgggcggttattagggctaaggatcaatctaaataagagcactctttcgggaatcaacattagtcaagactaaactgcaaggtaggcttctttgcttgagtgtgcagtctttgattgacctttatcgtatttgggtctccctttgggaggaaatccaaattcggtcgccttttgggatccagtgttggatagtctctaggaggttggatggatggaaaaaacctttttgtccttaggaggaagaatcaccgttatttagttttgtttgtcacacatcccatactattttctttctcttttcaaggttccagttttaatagctttaaggattgaaaaattacaaagagattttttgtggtcaaattttagggagggtaaaaaggatcatttggtcaattgggacatggtctgtaagcctaaggagtctagcgggttagtgtttgggaaaatctctctgaggaaccaagctttattagggaagtgactttggaggtactacctctgccctttggcatcaggttatcttgagtatctatgggacacatcctaatggatgggatgccaacaatataattagatggttacattgttgcccctggaaagccattgctcatttttttcaaattttttctacacattcgttttgtggtagctgatgagaccaaaattcgtttttaggaagatctttggtgggagaaccaacctctttgtttacaatttccaagactgttcagaatcaccaccattaaaactcatcctatttcagctattttgggaaataacacttctttgtcctagaatctagtatttagacgcaacctaactgatgaggagattgtggatcttgaaaaactaaaatccttacttttccttgtttatttgactccttcagttccagatgcgaaagcttggattccgtcctcttccggaattttctcagttaatttttttttttttttcagccttagccagtgtctcaaattctattcctttctacccaactaattttttgtggaactcaaaagtctcctctaaggtcaaggcctttgcttggttagtggctcataagaagataaatatcaatgacatgttgcagttaagaagacctttcaaagcccttagccctaattggtgcatcctttgtaggaggagcagagagacgattgatcatcttttctaacattgtccgattacgttgggattgtggcatagaatcttttcacaagctggaatggagtgggttcaacctagtagtatttgcgttatgttggtgatctccttcaagtgttttgggaattctattagaggcaatactctttagaggatcgcgtctttctctctcctatggattgtgtggagagagaaaaatgctaagattttcgaggacattcggaagattctaaagatgatgtgggatcaaattcattttcatgtttctttctaggcttactgtatagacattttaaaaccctatcctttgagtgtaatccaacttagttggctttagttgtgtacaccctagggttgggctatagggtcaagattattttacttgtataggcctttcgttccttttgcatagccctcattgggttagtggaggtttacttaattcttttgatcatgcaaccttttgtatctcttgtatagccttccttggttagtgaaggtttacttagttttttttatcaagtttgtacttattagggaggatttctcattcttctcatgccttttttctctattaatacatatattttgttttgattaaaaaaataaataagtggcatcaacatcatagtgccacaaccttcctaataaaatatgacaagcgtccatatccaccatgtcatatacgatctcgtctttgtaatacttcttgatcgacaaaggacttttgcaaacttctagcatttgaacttctgggtccttcttaatccatgcaatcttgtatggagaagggtgtttcttagtctttaaatttagtgctttcaccaaagccttggaaacaacattcttgctattgccactgtcaatgatcacgttgcacgctttattacaaatagtgcatcgagtccggaatattttatgtcgttgagagtcgtttggcttctttaggataaacaaaagtcgttggacgatgcacaccactttttctcccacatttccttctacaaactcagcaccctcgtaaatatcttcgtcaagaacctaatcctcttcactgccaccttattctacaaagttaatagatcatctgttcgggtaattatttgaaagatggcctgattggttgcactagatttggacgcgcataagggtcattattgattcgttgttgctgttggtttcagccttgagtattagatcgaataggaattgaagttccactttgattctgcgtcgaattttgagttgaaggggcatctttattgttgttatcattgctacccgaagttgttgacccatttggagcaaaagaagtttcttgggttggtcgacaaaagttaccatgagtgtgcatcgtggacctattgatatgattttctactttcatcaccaaattagttgcatttgtcatggtccaaaccccttgaagagccattcgatcttgaataactaactttaggctcctaatataacgagcaattcattgatacttcgtctcaaacaaattaactcaggcatttaattgatgaaattcctccgtgtattcgttcacagtccggttggcttgtcgacaattttgatattgttggtataaaaattgttcataatccggagggagaaatcacccttgtaataaccatttcatcttaggccaggtatgaacacgtttttcttatcattgacgattatattgaagttgttcctaccatgtagaagcttcatctttcaacttatatgccacgagctttacttgatttttttctaaaatattcaaatagtcaaaaaagttttctacaatatggacccaatcaagaaaatcttcaatgtgtagtcgatcgttgaaacttggtaaatccatctttatcttaaactcttggttattttgacttcgattgttagcctaataattgaaacaaaaatcattttcttctctagatgaataactcaacctccgttgatgcctttgttgaatattcctctactgtggaagttgaaaatcatcaccatctcgaaaaggtggacaaaactcattttgttcatcaaaaacccctcgccagaggtcgtcgtcatcacgccgcctaagagctccccgattctgacgctcaaacactcataatggaaggggctcgcgaaaattgcgatttgtggttggacccgcacgaatcgctcatttgccattgatttctggcctgatctatgaccgacgtcaatcgtcgtagcaatcctcttgctagtcaccacactggtctagtcgtcgctccatgggttcgcgtttcccttcaacaatcaacacagtcaccatttgcgtgaggttgcaaggagtttcgtcgatcctgttgagtcgttgctcaatttcgaaccgtttgttgttgatggttcgttttccactagaattgtcgctagccatcagatcgaggtaaaaattcttgctttgataccaattttggggcagcggaaggtttgttttgaaacgaaacagaaaaacactcaagaacaaacacaaagatcacaataggatctgaaaattatggaataattctgaaaaattatattcaactcctaacaattacaacaagtctttaaataatgtttgtaatgcaaaaataaaagaaataattgaaataggaaacttaaaataggaaactaataatgaacctaaaatagaaactaatgatgtagaaaatagaaactaatgatgaatttaaaatagaaactaataatgattgtgtgttgcatcacattcttagagactattattttgtgtcttatacttcctgaagaataactcatttttcttcattttagttcaaattgcaatgaattttgatgtcatttttcatagagaacacatatacatacataggcacgtatatgaataaatgcaatacatgaaatgtttgattcatactgtgaaaactaaaggagagagtgctgaatcaaatactaaaatatgaaacatgttaatcatataattagtttggtgccatggcaggtagatcactgttgatgctatatcaattaatgaaatgtttggatagaagaagaaataaggtatttatttatttattttaaaaaaaagcttgggatagggtccttaaagaaacaacaacaactgtctctagagtcaaaacaattatcatatatacacaatcaatggaagtgtgatggagagcatgtgaacaatgagaactatgccaagtgaattgcctatcacaatttaggtcaagtgaacaatgttgggccccaccttctgtaccagttatagaggaaagattggacatgtttaggaaggagtaaatatgatccttaagaaggttaataccaatgatatgctctacaagcaaatgccttcattgtccaattgtcatgtgcccgtggcacagattattcatcctttttgagattaaatgagttgataatttcttttagggcttttggggggttggcctaggatcaaggttctatgaaacattgcaagcctcaatttgatttgggctatagggcaaaaaagtactgtgaggattttttgggatatttgaaggacagtatattttgttagaacttgttttacttttcttcctctctttgggcctctattaatgaagccttcatgggcactcctttgagcaattggaaccttgtatgcaggtccaagaggttgcctaagaagacttttcgtgtatggtcattgcttcctacaggttatgtcaaattaaactttgatggatgttccttgggtatatcccaaggcagctaagggctgaaggagtgcttagaaatcagtgcagtactgtgataaagacctagtctaaacctgcagattagagttccactattgggactgtgattctaaccatcctagagggctatttgtaggctaaagcttcaggcctttccaatcttgtagttgagggagattccattgctcccatttcatggatgaatccttaggaaataggctcatcaaggtttgatgagtggttctaccaaatttttaatattaccacaaaattgggttgttccttttactgggttctttgttttgatgctttgaggaaagacatggtgttataaggcttagcaattagtatcgaccaagatggagtagaatgatgaaaacaacttcacatagactacctaattagtatggaacaggatggagtagaagttttatggattttgtttaaaatcaaggatgtcatttcacataagagaataacatcttattcaagaaagtaacttcaaagtccctgttgtgaagtcaatttaattagcaaacctaggtaatcacccaagagagaagagggggaggaaagagaggggggtggggtgttgggtttggttgggtgtggtttgaattgggtatcaatcagtctctttaaataaattttaacaaatttaaatgcaaatagcactaatattaataaataaaataaggagaaagagggtaagagagatgcaagctccgtttaatgtggtttgacacaacccgtctacatccactctcctctaacttcaatcccaagccaagggctccgctatcaactttcaattcaaagcctttaaaacttcttacactttgattctttgactccaatgggccttcaacaatttctctcaagtgatacctcacacttgatacaaactttctcaagcttacaagaatgaaacctcacaagtaatcctcctagtttgcaattttgaagctcaaggatacaataaaaactaggattaaggttcattatgtatggattagcaaatctaatgaaggatgcatttaaatactctttaaagcttaataaatgatgtaacaatgattactcaagattcctctcattcataaatgcacttggagagctttaaataggagtttcaattagaaaagagtgggtagacacattttgttttctacaggtcaattggatggttgagtgatcagtcgacctattacacgactggcagaggttttccttgaccaatagccactactttctccctttgccaaaacctcctcaattggtcaatcacccaattaaacaaactcagggaaaaccaactaaacaaactccttatgatttgaaaatcttttagacatgaattacctaattttaaagtcgttttcatttgaaaagatatttcatacaattttgaaaaggtttaaaacaatttgatttaaattggatgagttttggtgcctcaaaatgatcacatgcttcctaacttggtgcacaccagttttacatgaaattgacctaaaaataaatcttcgatcttgatgagttcttcatgatgtgcactttgatctaccttagctctacatcattgagttgtatagtttcttcattattcatccaaggtgatcttcttttatatcacccttgaaattaaacattaaatcaaagtctttatttgttatcatcaaaacttaggtttagccaaaccttgggctaagacttgtaatttatttatttatttatttattttttgtgatatcatataaattttatttgctttgatatttttaatgggttcttccaattagcatcataggttaagatcatgggcacttgggtttaaggctaagtcagaaaagagcatgcgggaacaagtcccttacgtcttgtgtctgagaggaaagtgttcagccatgacaagtgatttttcccttcttttttttctcagtattttacagagataattctttgtttggtggggggtggggtgtggtctgttaactaccaaaacaaagtaatattacaattgctccttttaaatttgtcctagattcaattagccatgcactcaggatggaatcttttaacaaaaatttggactcattgtggacctctgagaaaatggagaactaaaatttctgccagattttcaggagagaatgaggaaatgtatttatggaagtcctgaatggagaatccttgcttaacttcaagaacataggatgtctcctggttttgaactgcagcaaggcagccaaagatattctctttgctgtgaaacaaagaagtttttcaaaagatgaaagttcagttcagttcttaactccgctattcattgcaagttctgtttctttttctagttactaaactggagataaaaacttatacttgtcctgctatcttttgtgatttgatctttattacgcaggtgtttgtgaattgtatatccaataaagaatgttttttgttgtactaaaaagtcctttggttataagctagattttattctgcatcttcatgaaccttttctatggtttgtagaccctcaaactcgtatctgtgtaaattctggcatcagtatcatcaattgcacatatgcactaactctctgatttatcgatagtagtcatggtcacgtgttaaacttcactggacaagaaacttatgtgttgtttctcatttttccttctctaaattttcttgtgttgctcataggaaaattaca

SEQ ID NO: 10889 - DNA, 11159 bp, Vitis vinifera
  Intron number 2 from transcript GSVIVT01012914001 (locus G SVIVG01012914001) derived from phytozome v7.0 (chr-ID chr1 7; pos 13364995 to 13376153 reverse strand)
gtctctgttgggaattaagtcaccatctgcatcaggtttgttgttcaacaacttatttttcagttatcagtttctgtacctgttatatgattaaattataccatttcttccacacaagcaccttatctcaattatgtgattctttaaattgaagaattgcgtgcatatgaacttttcttgtatgttgtatttttccagccagttcttccctgttttatatatttttgtatactctcttttacctgaagattgaagcaattcttagaaggtgtttggtaaggcaacttaatgacttagtttaagtcattaagtagattaaacaggtttgacttatacgattaaattataccatttcttccacacgagcacattatctcaattatgtgactttttaaattgaagaattgcatgcatatgaatttttgttgtatgttgtatttttccagccagttcttccctattttatatatttttgtacactcttttacctggagattgaaacaattcttagaatgtgtttggtattaataacataatgacttaatttaagtcattaagtagattaaacaggttcgacaaattaaattaatatcgcaacttaaagtaaaacataactttaagtaaatcaaaatagttttcttattcttaatcttaaatatcttttatttcatttatccatgtttagtgatagtatattttacaatcatgattctacattcacaactcatcttttatagtaatatttttgtagttgtcaccaatgttttaaaaaccaaattggatcggccggtccaatcgtcagttagtgacctttttggtccaatccacccttttgagctagaagcctattaaatcggcctcaaactgtcagaattagtagttggatcagtgaaccagccgattcctagtgaatcgaatggttcactggatgtattttttttttccatgagagagagagagatagtgagatggtggggatgggatggctgctggccggtgactagcagtcatgggagcagttgccaacggcaaggtgcccggtggtaagggtaggcataggtatggtgagagagggggagggaaagaaagaaaggaaaagggggaagagaagaagaagaagaaagggagaagaagagaaggggaaaaaggggatggtgcggctggtgataggaagagatgggttttagggtttgtttttgaatggatggtgaagatgaagtgtgaaaatggagggtctagatgtgttctctaaaaatgggtataaatgggctgaaaaatttggctctctaaaaatacatttatatttatctttatcatttaatttgatatatcaaatttaaaaatgaaatattattaaaatttgtaatcatatatatgtgtgtgtgtgtgtgtgtgtgtatatatatatatatataaatatgtttaattttaataatatataaattatatatttatgacgtcaacgatctgatcgttggtcaaccgttagttcgactagtgaactatgaaccggtaattttttcggttcaatggctagtccgattttgaaaacattaattgtcacaccttagatttcaatttcactaactaatattcaaactacataattaatgttctcaaaatctgagatagacaaaatgatgaatttcaagtcgtttttttttttgtgcaaaataaggatgtgacgaccaattataaaagagtatgcaccttgtgacaaacctttgaaacaattaattaataaagtacaatacatttcacgtaatgaaacctatacaatagtactttctacgtatgaaaacgccatggttcataaagggtaacccatattacaagtgtacaaaaacaaacatagattatatcatttcttcaaaaggatttagtcggtctatgatacaaaggcaaaagcctaaaaaaggctctcaacatgagtaaaacaacatccaatcaatatcatatgtaaagctcaagcatcaaccttagcaaatgtctcctgatctgcatctaagagggcaaaggatagggtgagttcacaaccgagtaggagagtttataatcaccacatgtatatacataaaaactcaagtcaaattaaaacatacaacaatatggactatatagcaaaaacactaacctttgtctcttttctccccttatctccttcactttctctctctaacctctctctctaagcccagtagttttctgcagagattggggctgcaaatgaggtctaacagccctttcatatatagttgaaagcaagcatgaggtggcaagccctatggcagccactaaccaatattttcttgcactttagtccccttgtaactttttatgcttttacacctaccaatcagtctctcaagttcttttaattaaaattagcccccatggatctaatacacgatctgaaacgagtaattaatcataattaaccttaatctaagtttaatccataattaaacatgattaatattaaactagtttttacctctaattaaacaagttaaaggttaagtactaagataatagtaattattatttatttaattactactaggtattgcagtagttatcttatgtatttacaatactttaaatattaatgtttagcaaataaatttattgcttaagactagtgaaaatatgaatattaatcaaaattaatgaaagtaaatatgtcaatttgatgatttagaataattttgaagttaactttaccaaacaacactaagagtaaaaaataaaagtaataagttttaagttaataacttaagaacaatttaacttaaaagtcaacttaagttattaagtaataaatattaagttttatcaaacacccatttagtaaggaaggataccttgtggccttttttagtgaggcaaaaacgaaatgctcaaggtatgatattgaatttaatgtaggggtgcaagtaatccgacattggcaaccctaccttagtgatagatagtttgttttatactttgatcatgaaaccttgcgataccttaattccaagaagaaacttaataatcgacatacaaagtggagattgctctccttcaatttagagaactattcaggagttgagaataaagtagttgatgctcttagtagaatgacacttctttttagtaaatatgtgaaccactaccattggatttgaggaacttgattcgacggtgatcctgattttgggactgtttatgcctctcttttgaatggttcaaacgtaccacatgttgatttccatatcttagatgtataaaaatcatttatgcttgcctaaggcttcattacatgatcatgtgaaatgggaaatccatggaggagatataggaggacattttgaagttgataaaattattattttggtagatgatcgattcttttggcctgaagaaggttgattggaaggttactaaacaaagtttggcatgccaattaggaaaaggttccaagtaaaatactgatttatattcacccttacttgttctaaccagtccttaggaagactttaacatggattttgtttaccatggacactacatcttttaattctatacttgttgtgatggaccgattttccaagatgactcatattataccatctaagaaggctttggatgcttcttatgtggcttacatgttctttaaagaggtagttagcttatatggagttccaaacttctgattgtgatgtcaaatttatgaatgacttctagtagatcttatgggtgtaattaggcactcaattgaaattttggatctcattccattctcaaactaatggccaaatggaagttgtaagacatagctttggtaatcccttagaccccatcttaccacaagctgaattgctttagataattttgctaattatagtaccaatttttctccttttgtagttgcatatgtattaaagcctaaacaaccattgatcttataccgttgtctaattcatttcatatcagcaaggaaagtggttcttttgcatgacacatctatagtgtgaagaggtgtgggaaaagattaagaccaaaaatgaaaattatacaagggaaacaaatatgcattgaaattttgttcagtttgccagaggttttctagtaatgatctgtttacatccaaaaagatttcaattggatgcatatcaaaagcttaactcaaagaaagctggtccattctaagtgataaagcgtttaggtgatgatgcttatttgcgaaagcttcccttagaattgtgttttagttcaatatttaatgtggaatatttttttgcctattatcatcatcaagactagaaaggacatggatattcaactatcaccccatcataagtcaagtaatgagattatgtccttgaatatcaaattgtataaactcttcaaggaggtggataccataaatttcgagtgaaattacacaacaaatcatactttgagaatgcttagattagaaccactgattttcaaaagctcaatcttgacctttatgaattttatcaagcatccaacttgtcaagccaagttcattcaaatgtggggaagatcgaccattatgaattttatctagcatccaacttgtccagccaagttctttcaaatggggggaagttgatagggatgagctcctcaaggtgtatttaagaaaataaaggagggttttagaatttgggaagttttagaattctccttaaatgaagtttctaaataattttttttgaagtttctatttaagttcttagaatctagaagttttctttacaagcatttctaattactagaagctttataaagtatattaaaaggaaattagtttatttttttcaataaattttaaatttttttgaaggctatatttgacgctaggaaaataccaaggaaaatgattttcccatatttggtttactatgaaagaaaataaaatataattaaaattagttaaaaacttatatattttcaaaatatttaatcttaatatagaagaggaaaaataagtgaaatgagtataaaatagtatataaaaatactttattaagattggcatgcaattcgtgagaagagtcgaagcgacaggaaataaaaaagtatataaaaatacttattaagattggttaaaaacttgatacattttcaaatatttaatcttaatatggaagaggaaaattaagtgaaatcaatataaaaaagtatataaaaatactttattaattttaaatctatcttttattttcttttgcttttttttcctttctatttttcctctttattttctttcttttgcagtttctcttcattttttcaagaactaaataaaagacttaatagtttaagaaaagaataagaattctaatgagttaccatatgagttggatttactttttcatagttttattaagtttttagaattttctaacacttataaataagattaattgatgtaaaacgagattaatgaacaattgatgatgaataatattaagtattttgcattctttgcaattttcagcactgagattccattactttcttctagatgagaatcttagaaggccttaatgagattttaagatttctatttttttcttgtttatccttcttttcttatttttaatttcacttttcctactgccatattttttaatccttgttcctatccttaaatcttgaaatggtgaagccctaacctacatatttgattgcacacaaccatcctagggttgttctatattatgctaggtgtatttgggagaatttctagtaacttagtgttcaaaagtcttgatatcgtgcctttgttgctttattgtgtgttttaatattgctaaactttagtttcgtagtttctcctattgaagtatgtcaaattcaagttactgtaacatgattgtaacattttactgtagtttgatagtcttcatactcaagtcgctccgagtcctatggagtgtcatagacttgtagtctaaattattggtccacatattcttgattcaaaaactatgattagagtttgaagctgctgaacttggcttggtagaatgggggttttgttcaattcctgcttggggattgattaggatctgatccaatacaatcaagctttatgcaaccagaaaaaaaggcttttaagcttgaagtagtttagtactagtactggaaaagtaggtggtgtttttagaggctggttctcatgctattattggcttagacaccaccacctatgttgatgtcacactgtagaacaaccctttttcatattttattttaagagaatacagtataaactgcactaagtatgatttgaaaggcatctgacacggattaaagaattaaaaactcaagaatgatatttgaatgccattgaaatcctgttcaactacaaagaaacgtgtcccatgtacttttctgatagctttcaattaaagtacctaaaaaatcatcaactttgtagagatgacctggaaattgttcaaatgtaggattaataatgttgacttagcttgctaagtaaagctggagctaaataatcttgttatgagtcaaacttgggtcaagctagtttaagtaagtttaaaaacagtttggtagattatttttatttttattttttgaaaaatgttctcattttttggaaatgaaaataaagaacatgttgaaaacttgtcattggagtcatattcagttgttaaagtgatcacattttggcctaaaaaatatgcttgcattttgtaaaacatgaaaaataaagtttagtttgatagtaggaataaaaaactgtttttctgtttttagagaccgggggtttagtgcattttctggtagctttctccaagggtaatttgtaaatggagataaggaaacacttctgaatatttgttctaaacaaattgatcatgagtttttggtgagagtaataaatttgaagcaggagaaatgacactagaaaaaaattagtggagtttgtgtgttcattatctgacttgggttcaaactcttgagcttgcatttgatcaagttgggcctgtttccacatacagtaaacttgtagtggcatgtaaattgcattagctcacccttgatccatttttgatgagggttcttgaccaagtgacaaggaagtagaacctataggtcagaccttaggtgaaagaggcatggatttagaaagtctaggcaaagcaagcaaaccataagagagaaacttaacttcacctaaactctcccttgaaaataaatattagtaaaaaatgattgatttttagcaaaagtgacatccatggttgtaaaaaaatttcgagaatgaatatgataacatttataacctttttttggttggagagtatccttcaaacacacattttaaagcttgaggatcaagttagttgtgatttggaggatagacatggacaaatgatgcacaactaaaaactttgggaggaagtttattgaagctattgaaatgcgggaaaaattttgagtgtgtccaatggagttttattttcaagcacatttgagggtagttggttaattaaatgagctgcaattaagacaaccgatccctaatacgatttagtcatatttttcttaaaaagtaaggcttaggtgattgctactaaatgtttatttttctgttcagccacaccattttgttgtggggaattaatacatgaatattggtgtataattccttctttttcaagaaaagaagataacacctagttaaagtactcttttccattatcagatctaatgacttttattttaactctcgaattgtgtgctaaccattttgtgaaagataggaaacacataactaacatctaatttgtttttcatgaggtataatcaattcaccttatcacaatcattgataaaggacacgatgatgttgattttgtattatgtaaaggaaacaaaacacgatgatgtttagcaaattgacaaacctcacaatggaaattgctaacatccaatttattgaatgataaaagaaacatttttttgagcaaagaaaaagatgatctcccaagacaaagatgatgcaaccatatttgtactttatttaatgagaattttttagaaaaatgagaaagtagcatacaatcaccattgccaaaaccgaatccaagtaggtacaaaccctcctgctccttagcatgcccaatcattcttctcatggctcgatcctggatcgcacaatgagatgggaaaaaggtgattgtaaaattaaaatctttagtaatttgatgaattgaaaaaaggttagttgaaagtttttgaacatgtaacacggattttaatgtgagggccgaagttaaagcaatatttccttagcctactacagttgctagtgtgccatcaacaattttaatttttttatccgcagaacatggattataagaagaaaaacagtgtgaagaaaaggtcataagatcagtaacacctaagtcaaggacccaagtagtcctttgaaacattaagaacataagaaatgggatacatacctgattgggcgagagagcatgaagtggtaggcttatccattaaagtcaaaaggctatagagcctctcagtctcttctctattcaatctaccaacatttgaatcattagaagttgagatttttggttgggaattctcttcagattaagcaatatgggcttgaccatttctctgtccacatggtgcatattgatttccattccctctattgaatgattgcaggtttccatggagtttccaacaagcctccttggtttgcctcagttttttgcaatggacacaccacaagccatctttgttgattggtgatctagacacttgacttcctccataattattgtttagtagtttggagtttggcttcacagggacaagagctgaaccttctgttgttggagtgtgaagcataacactccttcctcctccttttgctcttatgatggagaagacttcatttaggggaggtagatcttcctttccaaggacctgaatcttgactagatcatattccacattaagacttgccaagaaatcaaatattctttccttttaaacatatttgagcatcgaggcaacatcttcgctgcacttcatcttaatattctaatagtactttaattctaaccataagctttccatgatattatagtattcagtaacagaaaaagtaccttccttggtagcaccaatcttggtctttatttcatagatgtgggcagcacccctcactttggagtatgtttgcctaatagtctcccaaatatctctagccttcatcaagaacatgcatgttccgttgatctatggttgcattgaattccacaatcatgacataatcattgagtcctcttcatcccatgcaatgaactttggattgtcttcacttgggacaggtccaattagatgactcaattttccttttccctttaaaaacattctcaccagttgagaccacaccaaataattgcagccattgagtttgaatggattttgcagattttgatattccacagaaggttaatgttagtcaggttaggagcaaagtttgaagattggatgatttctgatctgttggacatattggaggaaatcagaaataatttttgtaaatctctgagaggggaaaattttgtgaggctatgccggccaaaaaattcaaaggagatgggcatcaacaagttttactgctagcaatgaaggccgtacaagtgcagtgaaagtttcagcaattaaggctaagaaaagaaaaaacttagggtgtaaaagagagccctaactctgataccatgaaataaattttgctcttcttgaattgttttagaataaaatatgtacatcctatttatacacatttggggattaaattcccctaaaatatctcccataaatcagatatcttattcacctaccacctattatcctataatatctcccataaatcatattttaccaaagaaagaaaaggaaagaaataaatacaaaattatttagaatctgctagcagggttaacaaaaagatagataaacttctggatcaattagttaaaaaaacctagtactttagaagaattaaatataaacaacattttaaataagtttgaaaaattcaatctaggagagaaaccaatatttaaactagaacataggttaaatccttttgaggtgttgagaaggggaccattgtttggtctgaaggtaggatttcaacccatgacacaaagtgatgttttttaacaataaattacacttctcattaatgctatcaaataggccctaaaagttccactgggaatattctgatttattcccttttgtcttctattttctcatacgacaatacttttgaagacgtttaagtagccggtgaagtttacttaatagcccagaaactttttaaggttgcctatgataaaactaatgcatttgatgagcccttctatttggcaggtatttgatatgttatctccatgatgtgattgtatcattaccattgattgttgtattactttactttttctattccttctttttcttttttcttttttaaattacatgtgtataagttgagttaaagtcatcaattgttttattgtttcgataggctatgttcatcaattttttttattgttgatgtacaaaaatttgtcttaaaaggcatgggattaaatatccatcaaaatgtcaaatgtcctcagaaggatggcgtctttgagacttgatatatagttgttgaaatcttgatccaaaattcctagatttttctactattcaaaatttccaatttccatattttggtactgattaaaatttttaatctctaacttaatgagatctcggttacaaaagaaatgcagtagaacatcttcatcatgatcatgtgctccatcaacacattgttctcatttttaaaacaaaaatgttgttctttcatgtatattctttaacttgtcctttttcagtgtaaaattccattggaatcatacctgtaggtattttgttgctatcgattgaatgatctagattattttaatctaactttattcttatttgaacatcccttttgtttctttttcagaaaggcagccattactgttttaataacattttttggggcatcaatttaacatgctcatgtggacatataggtg

SEQ ID NO: 10890 - DNA, 12591 bp, Vitis vinifera
  Intron number 9 from transcript GSVIVT01031636001 (locus G SVIVG01031636001) derived from phytozome v7.0 (chr-ID chr5 ; pos 19312591 to 19325181 reverse strand)
ttagctgaacgcttatatactcaaggtttcatcaggttttgttctaactcttgtgctcgttatcgtttattatggaaaaaaaaaatgtatatatgtgctcttgtatttcaaggttcaatttgttggtatttgtaaaaaatgctactatgcgaggctagtataaacccttttgtttttcctttttttttttttttttggtatcagttggttttccatctaatatgtatttttttctttgcatacagatgtttatgctttccttcttattctttcatgagaggctgcacatctggctttagtaaaaagttctgttaatcctagtatttcttactaaaatcatttttggtgccaactccgtatctttgtaagataaaaatgatggcatgtgatgcccaaagcattttgatattaagctcacatgtaggatccaccattcaaactcaccattgaattgtaataaagcacagcttaatcggttcttagttaatcgttgtaattacataaaatcaacctttctatatttttgtgtggaactagggaatcatgtaatgaaatgcctcatgcctgctaacttgtttgtttgttgttccatggagtttgataagtgtatctcttaaatttggtcaagcaagctatatgcttttacacatttaaatttttcctgaaccaaatttgagaatgaagcttggattgcattattatgtgtgcaaaggtaccggagagaaaaagaacactgctgctaattttattattcgaaaaaataatgaataaaaatacagagagaaaactgagatttaaatagaaatctcctgccaaataacaaatcagaaaatcatagaaatctctagccaaataacatatcaaaaaatcatggaaataatcagcaataaattaggaaataaaaatcaaaatgggatcagattttattcctaaaaatcaggacagcagttcaactgcttcctaaaatctcaggatttctgatatcctgacggaaaaacttttcaacactccccttcgagttggattgtagacatcaaacaatcccctcttgcttaacatcttctcaaaaaaaggctgttgtgatcccttggttagaatatctattgtttcctctgcggaagagacatgaggaatacaaatttcaccactttcaatcttttgtctaatgaagtgtcgatcattatgaacgggattgtgagccatactgatcgttgccttattgtcactgtataatctcattggacttttggttgacatttgcaactcctagagtagtagcttgagtcaattagttcactaaccccattagccaaggattgaagctcagattctgcactgtttttggccacaacattttgcttttttcttctccatgttactagattgccccaaacataacaacaatactctgaagtagatcttctatcaacttctgaacctgcccaatctgtgtcagtataggccttaatctcacgggactgcctcttcttaaagaaaagacctctccttggacttccttttagatacttaagaattctcatgacaacctctagatgttcctcataaggggcatgcataaactggcttaccaaactgacgacaaaggctatatccagctatgtgtgggctaagtaaataagtttgcccacaagtctttgatatctacccttgtctactgcagaactagtgttttggtcacttagtttgatgttgggatcagcaggagtgtcgactggcttgcatccaagtaaaccggtttcctttaatagatcaagaacatatttcctttgtgatacataaatactagatctgttctttgcaatctccataccgagaaagtaccttagtgggcctaaatctttaatttcaaattcttctgttaacctcttatttaaacaagccatttttgaaaaaaattgtcactagttaagatgatatcattaacatacacaattagtatagttgatttaccatcctttcatgaatcttttgaaccatgcccgtggagactatttgagtccatagagggatttctttagtttgcacacttggttcggagttcctatacccttaaactcaggaagaaggtccatgtacacttcttcaaataggtccccattcaaaaaagcattttttatgtcaagttgttggagaggctagtccaaattgactgctagagaaagaacaactctgattgtgttgagtttagcaactgaagcaaatgccttctgatagtctatcccataggtttgagtgaatccctttgcaactagttgtgtctaattctttaaatagacccatctgatctgtatttgacagtgaatacccatttacattcgactggaataacatctctaggttttgaaacaacctcccaagttctgtttttctctaaggccttcatttcttcttctgttgcatttttccattctttcttcaaaagcgcttcttcaattgtcttaggtattttaacctcggctagattagataccaaagctttcatagaagaggatagatgattatattttacaacttgagctatgggatgttgtgtagaggaacaaatacctttccttaaggcaataggcaaatcatcagaattaatagcaagcaaaggaacttgtgaattacctgagttcgagtgtgaattatgacaagtcgcaggatgtactaggtcttctactctttgttgatttccccgatgagtgtagacatgaagctcaggaatatattgttggggctgttgttgaacatccaaattaggcaccccggtttcactatttcttttagaattgtttccattttccaagttgagattatggtcaattgtagagaggttaagagaagaggaatttggtggagtaaggctagatgaaactagtaaagttggatggagtatgtcggatgaaaatttctagaaattatcttcactcttattctccccttgaagggaatttttgggatagaaaggtgtattttcgaaaaaggtaacatccattgtgacaaataattttctctttttagggaagtaacatttgtaccctttttggtttgccctgtatcttaagaaaatacacttaaaagctttgggatcaagtttgttgcagttaactcatgattgtggacaaaggtagtacatccaaagacttttaatgggagattagtgatagttcgggtttctaggaagttttttgagaaaacattgtttggtgtttggaaatgaagaacattggtaggcattctgtttataaggtgttagctgtgagaacaacatcatcctagaaaagttttggtgtgttagtagtaaatgttgagctataaatagaataggagaatatttttttttcgtattatgttagtttcctatttctgtaaatagataggtttattagtttcctatttctgtaaataaatagttttatgatttagaaataagttagtttcctattatgtctcttgtttcctatttcttctcttgtaatctcctatataaaccgtgtgtatagtcaatctaaaagagagagaacttattatttttcatcccatatttcgtgtcatggtattagagttgtaggtttttaagacctgggcatcattctggccttcatcgccatttttctggccttcatagctggattttttttattcacatgttcttttaccagccttcattgctgttgatttttttgttttgcgatctgccttaattccaagagattaggttttttcgtggaagatgttggaaaattcaggtacaccttcattctctttttgcataaatgctttacacagagtttatgatgactcttggataatagactctggtgccacagaccatatgacctccaaatctcaacttttcaatacctataccccaagcccaagtaacaagaaaattgtagtggctaatggctctttagttaccgttgcaggtttcgaagacatatacatcacacctacccttattcttaaaaatgtcctccatgtaccaaaattgtcggccaaccttgtttccattcaaaagcttacccatgatcttaaatgttatgctatttttttcccttcttattgtgttcttcaagaacaaggctcggggaggaggattggacttgctaaggaaatgagcggtctttaccaccttgaatcatcttagaaaactagtaataatttgtcgttgtctcttctcagttcctcaaataaagataccatttggttgtatcacctatgtcagggtcatccatcttttagggttttaaaggtcatgtttcctcatttgttccaaggattagatatttctgagtttcattgcgaaacttgtgaattggcaaaacatactcgtgtatcttttcctattagcaataaaagaagttctcatccttttcatttgattcatagtgacatatggggtccttcgactatacctaatgtttctggggctcgttggtttgtatccttaattgatgactgcactcaggttacatggatctttcttcttaaacaaaaatctgatgttagcattgttatacctaatttccactcaatggttcaaaaccaatttggggttaaaataaaaagctttaggacagacaatgctagagattacttcaactagattttgtcaccctattttcaatcacagggcattctccatgactcattatgtgttaacacaccccaacaaaatggggtagccgagaggaaaaatgggcatttactcaatacaacccgagccttactctttcaagggaatgttcctaagtcctattggggggaagttgttcttattgccacatacatgataaatagaattccctcacgagtattagacaacaaaagccccgtcgagatacttaagagtttctatccacacttcagaacctcaaatgggctcactcctagggtatttggatgcactgcatttgttcatgtccacagccaacatagagacaagctagacccccgagccataaaatgtgtcttccttggttactcatccactcaaaaaggatacaagtgttacaatcctttagctagaaaattttacatctttgcagatgtcaccttcacagaaaataaaccttttttccacaagtcctctcttcagggggagatttcaatgatggaagatagtccttatgtgtcctttgaacctcttgatcttcctcatgtctcaacccatggtgatgaagaacctgtgtcatcctctgttccagccagtgtcactcacaattttccacagtttcctaaggtgtattcaagggaaaaggccattccagaacaaaagcaggtccaagaatccaactcagaccttgggaatgaaatcacggtaagatcagacccacctttacatacacaacctggtgaaacttccactaactcaacagacaacctagacctagaccttcccattgtaagatcagacccacctttacatacacaacctggtgaaacttccattgactcaacagacaacctagacctagactttcccattgctgtcagaaaaggcaccagagaatgcactaaccgaccactttatccactatcacactatgtgtctcttaaacacctatcaccagcccacaagaattttattgtgagtctaaacaccactatcattcctaacactgtttctgaggcattgacaaaaagggaatggaaggatgctatgagagaggagatgagtgcattagaaaagaataaaacatgggagattgttgaacgaccgaaagggaaaaacattgttgattgcaagtggattttcacactgaaatataaggctaatggatctctagagagacataaagcaagattggtagccaaagggtacactcaaacttatggagttgattatcaggagacttttgctccagttgcaaaaatgaatactgtaagaatcctgttgtcactggctgcccactacaattggcaactcctacagtatgatgttaagaatgcatttcttcatggtgatttagatgaagagatttacatgaacatcccaccaggatttgaggaaaacacaggtaacaaggtgtgcaagctgaagaaggccctctatgggctaaaacaatctcccagggcttggtttgggagatttgcaaaagtcatgaaagagtctaggtacaaacaaagccaaggtgaccacactctcttcattaagcactcggctacagggggagtaactgctcttctaggctatgttgacgacatcatagtgactggaaatgatgagagagaaaagcatgaagtgaagtagagattagcaacagagtttgagataaaagaactagggaaactgaagtacttcctcagtattgaggtgacaaattccacacaagggatcttcatctctcaacaaaagtatgtgactgatttattggtagaaacagggaagattgggtgtaaaccagtctctaccccaatggatccaaaccacaagttgggagaagctaaagaggaaccaatggtggataaaagaatgtaccagaggctggttggtagactcatataccttgctcacactcggccagacatcgcctactcggtgagcgtgattagtcaattcatgcatgatccaagagaacctcatcttcaagctgtttacagggtgctacattacttgaaaggcaaccccaggaaaggaattatgttcaagaagaacaatactcttgctctagaagcatacaccgatgctaactatgcaggttccctagtggatcgaagatcaactacagggtattgtacttttcttggaggaaatctggtaacatggagaagtaaaaagcagaatgtggtagcaaggtcgtctatagaatcaaagtttagggccattgctcaagggttgtgtgaactactttggctgaagattattctagatgatttgagaatcaagtgggatggtcctatgaagctgtattgtgacaacaagtcagctatcaatattgctcataaccctatacaacacgataggacaaaacatattgagattgatagacatttcatcaaagaaaaattggagaaaggagtagtgtgtatgtcctatgttccatcagaacatcaattagctgatattctaacaaaagggctgaacagttcaatgtttaaagatcttgtattcaagctgggaatggaagacatctattcctcagcttaagggggagtgttgagctataaatagaataggagaattttttttttcctattatgttagtttcctatttctgtaaatagatagttttatgatttagaaataagttagtttaggaataagttagtttcctattatgtctcttgtttcctatttcttctcttgtaatctcctatataaaccgtgtgtatagtcaatctaaaagagagagaacttattatttttcatcccatatttcgtgtcagtaaacataatggacctagcaacttctaaaagtgtcggttttttcttttagcgataccattttgttgaggggtgttggaacaagtactttgatgaacgatgccattttcacttaagtaacttcctaaaagttggttaaaatattcttttccattgttcgtatgtagaatttgaatgttggtagagaattgagttttaaccattttatggaagtttttgaaagtttgttctgcatcaaatttatcttttagcaagtagagccaacacactcgtgtatgttcatcaatgaaagttataaaccaacatttcgagtaaacattttgagattgtgaaggtccctaaatatcactatgaataagagcaaaaggtttagaagctttataaggtcaggatttaaagaaggttgtttgatgtttggctaactgacacacttcacattgaaaaatatctttatttgtaaacaatgaaggaaataaattttttaaataagggaaactgggatgtcctaacctaaaatcccatagtattatttgatctcacctcatgagagaaggtgatttccaactaatggtttgagcttgtctagactcatcagtgtcctcgtcaaagtagtagagtcccctgtcctcactagcattgctaatcttctttcccgaactccggtcctaaaattcacaatgttcttgtgagaaaacaacccaacaattacaatctttaggtatcttactcacagaaagcaagttacaagacaagtttggaacatgtagcactggctcaaggataagggcagagttaattttaatggttccaaaccctgcaattggagacaatgatccatctgcaattttcactttgagttgacgagaactagggatatatgaagaaaacaaatttatacatcctgtcatatgatttaatgctccagaatcaataatccaaggctctttttccgtctttgtgcatttaacggctgtcaggaaattacctttttgggctataagagagttgctggtggttttctcaggtgtaagcagcttgtagagcttttcaatttgctctttgttcaggttgaggccgccaatattcactgtttttaagtttctgggtcttggcagtggactggtaggcacgggtatctcttctaaaggtctcttgtggcttcaggctttggttggcaagtctaccttgcaattttccctattgtgatttgatctttgacagaaatcacaccaaagattacccttgcgtgcacgctgtgagttgctggaattttcagttctgtgttatgattctaggcctttggcagcaaaagctgaggctttggtttggagaggagtcttggagttgcttagcatattcgccttctttcttcccgaaaaacctcagcaaatatttctttgatctgtggtaaggggtgagttccaagcatcctgctacgtacctaatcaagatctttattaagaccaacaagaaagtcataggtacattgcttttccactaactttgcatattttccagcacattctccacaccaattagttggttcgaaaatgtccagttcttgccaaatcttagtcagggatgtatagtattcaatcatgcttttattaccttgtttgagatctcgggcatgatctcttaattcgcatagctgggctgagttctcaatgtctgaatatgacagtcggaccttatcccagattgcctttgccatttcatgcaccagatatagtgaaccaatgtgctcctccattgagttaataagccaggccattactagagcattatttgtgtcccaagaagagtgactcgggtctgtaagagcaggttcctgtacagtcccatctatgaagctgattttgcctctccctcaaataactatttgaactgattgagaccattgaaaaaagttcctgccattgagtttacaagaggtgatttggagagaggaatgatcaaaagaagcagtggggttaatcgtgagggcagatgaagaggattggttagagccctctttggatccatccttgcttaacccagtgagggcccttctgtagtcgcccatctttttctctcaacagaaaaaaaaatgttgctctgataccatgtgcaaaggtaccggaaagaaaaagaacactgctgctaattttattatttgaaaaaataatgaataaaaatatagagaaagctgagatttaaatagaaatctccagccaaataacagatcagaaaatcatggaaataatcagcaataaattaggaaataaaaatcaaaatgggatcagattttattcctaaaaatcaggacagcagtccagctgcttcctaaaatctcgggatttttgatagcccaagggaaaaacttttcaacattatgtaacatatccgtaatcatattggtgttttggatgagtttttgtaccaaataaattgacatgtgttatttatttatttattttggtgagaaattcaaatgagctgaaacatcttgtcatattggaaggataatctctcatgttctttaaggatatgattagcatgaacctttggactttaacttcaggctaaggcagtgaggggagggtggccaatgtaaacaggtgtagtctttgtaaagatggagggagacagcagaccatattcttactcattgtgtcaaagcctggctgttgtggaatttcttgcttatttgcatttcaatgagtattcctgtggtctactaaggattttgtgctgggattgcatgtgcgggggttcaataggtggagctggcaggtgtgaaggatcacaccctttgttttggtgcatttagagagagcagagtctttaatgaagaggagctgtttgatcagagattagaagaggccttcacaaatcacttttggattggtctagagttcctttagaacttggtggatcactctatgttagatttgattaatggtttaagcttggtctagggtttgattttgcttttgatttaatcttattcttttgccctatcaaaaagggaaaaagaacatgcacacacgtgcacacactcaaagtcaaggcttctcatatggtatttgaatgtggggacacttgtaatgtttgttatcttagaaaattcaaaatgtttggaaaattgtttccagttttccaaaagaaaaaaaaaaaaagggaaaaaatcctcattacaagttttattgtgacgttagcatatgctaaaatagtgtgttatatacactaggcttaaaaaggtgaccagaagacctgcatataggaaaagttgtataccggcatgtttattcttctatgaattaaactactgtcttgattagtgatgatattaactgttattgattaccttctatatttaattatagtacttcattttgtataaatatagttttcttttattaacaatgttcacatttcctgttggttccctatttttgtgctctgtaatttttgtttatcacacttaatttttaagacttgttgaaaaagaattcatcatagttttgaaatttggaaatctgaggtaaataggtttgaataaattattgttatttttcttaatcagaataggtttgaataaattgtagttagttgtaactccaaataaagtccagtttcttgttctcctttttctcttcctagattcagtattgggatgaattatgggagctttgcaagaaatctagttcctatctttgggctggtttagttttacagattttcatgtatattgttgagctaccaattttccaaaaagcttaagcttggaggatttggattcaatatgtatatcatgctccttaacaccctccctcacgtgcagccccatacctgcatgtggagagatagacataatttggattcatatctaacaaacaaataggggaaatgcaaattgctaaaagaggggttgagcccaatacctcccaccaaaccaaactctaataccatgttggaaaagagagatctcctggatcaggttttttttattggaccatccacataaccaaggcggccttgtcctcttatcaccatcagggcaaactgagatcactgaatgaaattttgattatttactttcgtggttgtgatttaaaggggagaattttcaaaaaatgttagtaaggaggctgcagtggatgaacttgcagggacgggctgagagacttccgaagagacctcagaaccaacatccctgcgctcaccaattaaggctgttctgtacatctttttgtctcaactggcaccaactctgacaccatgaaactgggcagaaaaccaaaaaagatgaatgaaaaacactgcagaaaaagaaaaaaggacagaccacaaaatggagactgcttttgttatattattttatttctttaatacaagtagatttataggctagattttgtaaccataaccctttattttaggagattcaaacaagttgtattttaggagattcaaaccagttgtaatattacaactagcaacaagtaacacaatctcccatattagaaaataaaccaaatcttagattttatctttagtcagagaataagaattatccgagattctctacataaataatgccaattgcttagatgaccactgttttacaacaacaatgacatgaagcaatggactctagcaataggaggttcattgattggaacaaattttatttatggttaagagataatactatcttaattaacatgtcctactcatcttttatcacctagtattttcccaataccaagaagtttattgaacttctttgtgttatcaaataggttccactcatttgatacaaatctccctaattctacaacctcagactgaagaggctttctagcttccatgtgcaaataaaattcatgctccagaatcttcacttcatgcaaaaacattgtgtgtaaaactcttgccccaaaaatttcactttgcgccaaaacatcattgtgtgtgtgtgtgtgagagagagagagagagagagtactattagcaatttaaagtttcaaatttcattgttttggacaatatgtggttcattatggctgtaaaaaccgtgtattatagtgcatgatatggtcctttcattattcatttaaatgtttccttagtgtttgtggaatctaacaacttttgtaattttttctttttctctagctatccacgcacggagagtacagcttatccctctt

SEQ ID NO: 10891 - DNA, 16705 bp, Vitis vinifera
  Intron number 1 from transcript GSVIVT01008140001 (locus G SVIVG01008140001) derived from phytozome v7.0 (chr-ID chr1 7; pos 5435841 to 5452545 reverse strand)
agtactccaccgattcctggttagatctttcttcttcctcctcctcttcttctcctggaattcaatctgttggtttttctcttggtaattctattatttcatgagcttcatccattgctttgtgttaataatcttggatatatatttccctgagactaatggaactgtagattttgttctttgcatatattaaaatacctttctcatctgggttttgtctcagaataacaggaaaaaacaaaagcaattcccacttattatcttttatgcttttttcatttaggtttcattatcattgaacagttttcaaattatcatccaatagtgaaagttatgtacattgaaatgttggctttgctcttaaatctcatgcaaatacaccacccagcagttttgttttgtgtgttgtctgtctgagagagaatcctgatcaaagcatttacatttaccttggtatggacttgctgggcactgaaaatgagctcagtgaagggatctatcattctatttaatattacttctttatttgtttcttgatccatgtacgtagtacctccattttcctctttggtaaaaaaagggctcctatgccaaattagtaggtttatggtttttatttatttatttatttatttattttgtttgggtggatgttgttggctgttcatttcaaagtactggtactacctctatttccttttttgttataaagggtcctctttgatattcattatactttttttcctctttttccttttttgatattataactttattaacacaacgtagtacctcgaaatctgctgggaaatctttaggaataaagtgatctttttttttttgtttaataattgatcagacattatgaggttctactgcttccttcaagtgaagtcttttcactggctgtgtgtcacagccagctaatagtttttcattatgtggtgtttggtcatcaagaacactggtagaaaagaaggcagccgactaggtgagatggacctttgaatatggtaaacataaatttccaaattccaagttctactttattttctttcttctttcctcctagtgcctcaccagccaaacaagtgggtattgtctgaaatgcacttggggtaggatttatgtactttactgggcatatggatgtgaacaacgcctgtcctataataaattaagcattcaattgcagtaatgaaaggctaaacacacacacaacaaaatgagctgtacaaacattagtttacatgtatgctagtagaactcaacgatccctagcttactactctatgctttgacctatttcacttgagcttgagccattataaggactcatggagatctcagagtttattggactccattagccaattaaaggcccttgctttggctctcctgtctgacatttgactatgatcagttcttttagatccctgaactattggaattatttgatcttttggcttctagctagtcatgaacttgagttttaaggctactgattgcttgaccaaataaccgttacttcctgacacagtaggaggaaagtttttgccagcataaggtttgtgtgggtaactggaaggcgcttcttcaatcaacaactgaatctgtattagttttgaagataataagatataagttctagtgctatattcagcatgctctcacttaaaattgtagcaagtatgtttttactttacttttgttcacgaatataaaaattatattttctcatagttcaatgatgggttcagtatctttctggatttgggacttctcctgttgatattcttatcagatattacagtagttcgtaggatactagattttacattatccccatgtctcatgaggattctttatctttgaatgactgaccatccagtctcaaagtcataatgatatttcaatcttcatcaaacttctccaattcagaaagtagtcgaaactctctgggatgatcaggtactaattattcccatttcttattgttatcacatatgtttttctatctctataagaatcatagatgggatcaaataaattatggcatttttccatcattccgttcatagacatgggtaatataacgcatctggatacttttctagtaccattaaatgacatcttagctcacctttcaaagctagctagtttacctagtttacaggaatcgctgactttccataatgattgtgtctcctcaatcacaaatctccgtaagtgggcagccagcatctcttactggcaatgacttgttgattttcgagatgtcatctgcactatcatctggtagaactgaacgtgagtgtgtccaccaacatatcctgtcaagtcactttaatcaatcatccttaaggctaaaagaatgccctttgagtaaagcatcaatgccccatgtgattactttcttcctagcatgattaatcataacctctgatttttcccgtttctgattttttttttttttttttttatccttcgaggagaaaattgtttgtttcagtgtttcccatcaggttttcagccatgaaatccattcgaataaatctccacgtttctgctttttttttatatattttttttttatccttcgaggagaaaattgtttgtttcagtgtttcccatcaggttttcagccatgaaatccattcgaataaatctccacggtactaaatgttcaaatatcaaaccttgtgatgcgacgacttttgatcccgccgcgcttatatgcagactagcaaccgtacttgagagagagagttggacaagtcgagaaatgacgttattaagtacatacatttcatacaggggtacaccttgagcggggatgggtcaaagttgggtcaaagttactttaacctgattgaaccatcattttaaatattttgattgaacttatgttaggtttttctcacccaaaatcaatataggtttggacccaggtcaaccatcacaacttgaactgaatttaatatttttataatatttattatatatattatgttatataataatatttattttctttttatatatactttttatttttttagaaaggtagattacctataaaaaaaatagaaagatagataaatttatttttaattttttggtgtcattttgaaattttatcttatttactatttaagttttggtataaaaaaagaaaaaagttttttaaaaaacatctcaaatgaattttgaattatacaatatgatcaacccaaccaatttgagtttactttaatcaactaaaactcaactcaaatttaaataaatgaggttggactgagttgagtacttcaaattaaaggttgaattgggtttaatttgagttaattatttcttaatttagattggatttggattagccatcaatccaaccaaactcaaatttcaatcctaatttcaactcaaatttcaatcctaatttcaagtggttttaatagtctctttgaaagtggtacatgttatttatacttaccaatcaattaaatgggttaacttcttccttttttttttttgttcattagttgtgaagatagaggaggcaaacatacatttgtagctatttcttgaactttggtgttttagtttgtgagtatttggtaaactaacttaataacttaatttaagtcattaagtaaattaaatatgtttgataaaataaattaatggtatgacttaatatcaaatacgattttaagtaataaataaaaataattaacttattcttaagtctacgtttttattttactttttcatactcatttgccttagttatctttataatctcctttggtacttcacaactaccactgttactcaacctcttttaccctaataaggataaatatgttaatttgataatttaaaataaattttaagttaattttatctaactttaatattgaaagtaaaaattgagtaataagttttaagtcaacaacttaaatataattgaacttaaagtcaacttaagtcattaagaaataagtattaagttttaccaaacactcctttacattttccatatttttcttttattttattgtcttctttcttatttctcttttctttttataaaagcacttagcagtcttctcttagcaatagaacaaactacctctatattattgtagttaggataacctaatcatcttatctgaaaattaattgttgtcaatatggtcaagctaatctgatttgttgttacacttattcacactcatcctgaacttaaccattcaggtacataacttggcccatttcacacaacacactcatctcagggctttaagtaataaataaaaataattaacttattcttaggtctatgtcttcattttactttttcatactcatttgccttagttacctttacaatctcctttgctacttcatgactaccactgttactcaaccttttttactctaataaggataaatatgttaatttgatgatttagaataacctttaagttaattttgtctaactttaatattgaaagtaaaaattgagtaataaattttaagtcaacaacttaaatataatttaacttaaagtcaatttaagttgttaaggaataagtattaaattttaccaaacactcctttacacttcccatatttttcttttattttattgttttctttcttctgtctttctcttttctttttataaaaacacttaacagtcttctcttagcaatagaacaaactacctctatattattgtagttaggataacctaatcatcttatctgaaaattaattgttgtcaatatggtcaagctaatttgatttgttgttacacttattcacactcatcctgaacttaaccattcaggtacataacttggcccatctcacacaacacactcatctcagggctttaagtaataaataaaaataattaacttattcttaggtttacgtcttcattttactttttcatactcatttgccttagttacctttacaatctcgtttgctacttcatgactaccactgttactcaaccttttttactctaataaggataaatatgttaatttgatgatttataataagtttttaagttaattttatctaactttaatattgaaagtaaaaattgagtaataagttttaagtcaacaacttaaatataatttaacttaaagttaacttaagttgttaaagaataagtattaaattttaccaaacactcctttacacttcccatatttttcttttattttattgtcttctttcttctgtctttctcttttctttttataaaaacacttagcagtcttctcttagcaatagaacaaactacctctatattattgtagttaggataacctaatcatcttatctgaaaattaattgttgtcaatatggtaaagctaatctggtttgttgttacacttattcacactcatcctgaacttaaccattcaggtacataacttggcccatctcacacaacacactcatctcaaggctttaagaaataaataaaaataattaacttattttgtctacgtcttcattttactttttcatactcatttgccttagttacctttacaatcttctttgctacttcatgactaccactgttgctcaaccttttttaccataataaggataaatatgttaatttgataatttagaataagttttaacttaattttatctaactttaatattgaaagtaaaaattgagtaataaattttaagtcaacaacttaaatataatttaacttaaagtcaacttaagttgttaaagaataagtattaaattttaccaaacacttctttacacttcccatatttttcttttattttattgtcttctttcttctgtctttctcttttctttttataaaaacacttagcagtcttctcttagcaatagaacaaactacctctatattattgtagttaggataacctaatcatcttatctgaaaattaattgttgtcaatatggtcaagctaatctggtttgttgttacacttattcacactcatcctgaacttaaccattcaggtacataacttggcccatctcacacaacacactcatctcagggctttaagtaataaataaaaataattaacttattcttaagtctacgtcttcattttactttttcatactcatttgccttagttacctttacaatctcctttgctacttcaagactaccactattactcaacctttttggccctaataaggataaatatgttaatttgatgatttataataagttttaacttaattttatctaactttaatattgaaagtaaaaattgagtaataaattttaagtcaacaacttaaatataatttaagttaaagtcaacttaagttgttaaggaataagtattaagttttaccaaatactcctttacacttcccatatttttcttttattttattgtcttctttcttctgtctttctcttttctttttataaaaacacttagcagtcttctcttagcaatagaacaaactacctctatattattatagttaggataacctaatcatcttatctggaaattaaatgttgtcaatatggttaaactaatctgatttgttgttacatttattcacactcatcctgaacttaactattcaggtacataacttggcccatctcacacaacacattcatctcagggctttaactcatcccgagggctaaggtggtacctaatcatctccagccttacacacggagtcatttttcaatcatcatttatctaggaagcaacattgccgtaaacttaatagttatatgcttaggttaggatttaatattttactaccttctggttgcttgggtggacatgaaatatatactgtgaaacatgcttcagtttggcaatacattatctgataatgtgctattcaagtgttcgttagtcatacataattgaagccagatctcaagcataatccgggacatattctacatatatgcacatgctaatacaaggttaccctcttggttaaaccaaaacaatgttttgatacgcaagcttgaggccatagtttaaggatatggaaaccttgtattaatggttggattccatttgttgaatgtcttttctcaggctctattctactgagtcatgaacttttattgaaaatcttattattactgtttaatttcaaaggaaagtaccttaccaggatgaggagcatgccatggaatctaagttgattcctgggaataaaaggataggcctttgcaagaagatcaagtgccaaatgttatccactttggttcccatttttcgtggtgatgatatcctacttcagccacaaaaaaatgaagaaaaagctttctttcttctttttttttttttttcttccttttggtgtgttttattacaggatgcctttcctcaacactattgaatgatacctgaacaatttttatttctcttcccgttaatattaagaattagaaattatggtaatgatatccaaactcaaaacaccaaattttcaatgaaaaatacatgaaaattttggaagcaatgtaagactcacattggataataaaccaaaatatgtctgacatccaaaattaagaaagttgacctttgatatatagattccttcaatgatctcgttaatcaccttaagatatgaatacccaaaatctggccactgacggaagtctaaatggccctggtttttattgtgcagtcaagtgctatacaaacgattttaagagaaaacatgaaaatcttgaaaccggccactctcactaggtgaccatggaagggaaatctacttctaccacactataatatagtcttcttctaagtcaaagttcataaacaatctctaccatccaaaattccctagggaagctggtttttgatacaaacattaatctccttagtataaaaggaaccaactaaaaccctccattaacacaagatttacataattatgatcactacaatccttttgtggtgcaatagagtgctagctatcctttatatgtagcacttttctagaagtcaaaaacctatttcttacatttattcacaacagctacgacatgatattgaaggaagttaggaagcaacatatttcctcaagaaatacaattataaaaaatattttatataattttttttaaaaaaaatatgtactaaataagaatttaagacacttctaacaattttcatcttgattcaaattccatcaagttagttgcctctatctagaaatttaaagttatcattcatgtaacttaactaaatcacaacttaactagaaatttaagatttttttgattcaaattccacaacttctcactaatatatgtagctccttcaatacataattatcaaggttgtcattcatgtaacttaactaaatcacatccactagaaatttaagttttaagtgaaggaataccatataacaatccattgtctccaatcctaggtccatagaactctagcatctaaatccttatttcacattatgacgtttttttttatcataaataccatttgttttcctttgagtaaatctctatggatttaaattgtttagacattttacctttttccaccttttaatatctaataagtgtatatagatattacactcaattccaaagaatgaagtttatacttcatgtatcacatgccaataagggaagtcttcaactagaattcctttgcaatcctcttgcacattctaagtaggactctaacttagtgggctcaaacataaccaacccaattgttttactaagatgtgtaacttaatttgaaatttgggttaggtttaggcaaaaaaaatatcaatccttatctaatttggggtcttggcttgggagcatgtcatgtgtatgtatgtaaaaaggattgatgcacctttgaaggcttgattacttggttattatgaacaattaacttgtttttcttggttttacctctgggatttacttttgctattatatgaacttttaagtttcttgtaaggacaaattacaaaagtcattcttatgagtaattgggatgattgcttataaattgacattttttcttgaaatatgtaataagtgcaatcttaattttaattatgatggtttacttggaaattatttggaaagtttcgatcatcttatgtaataatcttttgttttattttgttagagctttggattgattttattaattgtagttattgggttgaatgagcaagtagatactatgaaattatatattatcattggtagtttttatataactatatattgtcatttgaggttctagacttttagttaaataaatattattaatagttttatttttaaatgtaggatgatccatataatttttagtgaatggatattaagtttacgcaaaaaaattcgggttggacttgaattgagcatcttgggttgaagcttgagttggattaggcttcaacaaataagcttcatatataacttgagcttaggttgatcgtccatctatgcatccttagttccaaatcctttataccatctttacattcaaattgtgtttagaatcttctaacttggatattttctttaactcttctaaaaatctttaccttaactcttatctcaatttgctatagtcacttatcaaaaaaaaaaaaaaaaaaaattcaattttctaccatctaagacctagtgtctttgctaatggacatctcataaatggttggttttgcaagtcaatttaattgttacaaagtgagcataagccacttttaagccctctcttttgtaaacatttcatagttgaagcttacccatttattagtaatttagtaaagggcacagtgaaacataattgtgaaaaagaatggaagatctaccaaagaaagtgatagccctgttgattcattctcctacgctttctctcatctctacctatttatacaaattttacatatctatctcaatcctataactttttcccttataatcttgaatgctaatagagttatttctaacacatttccttattctacaatacacaacctattttcataagcaaatatcaatatataaaaatgtataatattctttaccaaaagaatatgtatcaaataagaatctgagatactttcaatcttcacactgatctgactttcatacggttggtctttcatcttccgtgacacatgcttccaccttcatatagctatgagcacatgaccactcccaaatgttattatcaaggcaattagtcaatgtatatacctcacctaaaaacttgtttgaaccacactaccgaaatttaagttttaagttgtggaatattaaataagcatctattagctccaactttaggtttataaaactcgatcttctaaatccttactccatattatgacttccttgtatgccaaaacactctttattcacatctatggactcaaatcgttcagacacttcaatatttccaccttagagattcaatatatatgcaagagagactaaacttatttttttataacaaagaatatgctccattaacacatgtcaatgatagagcaacttactttgacttaaatatttccaatctttgtgtacattcaaattgcaattttggatttttcaaccttggatattttccttgattcttccaaaaatattcacattggctttttaaataattccattattccatatgagagactcatttggaagctaatgtgagaacaatgacatgaaaagtaaagtggttaataatggaaatgacatgtcatgatagtaaagtcaataccattgggaatacttggatttctacgttccttgccccggatcatgcagggtgcatgcatttttcctattttctttctagatctaatacagcaaaaacaaatgacattaaaaaccattattaatgtagatctaaagttaaaatactcaaactcgtaatctaaatactcctagatcaatttccataatggaaactctgaaaccgcggtagtcgttataaaactcatctacccaactatcttctacctgatctttccctccatgggtcttggcatgaggaaaggcgagtttatctctctttatctagagggtggttaaggttcctctctccagaatcttaaaaaaatatggaaggaagaatgaatccctaaccccctttaaggcttttatataaggttccatttaagcttaagtgactcgaggtcaaattgggcttgagtcatttaatctaacctatttgggtcataattcattaattagctttaatgggctcaaatgaattaattagcctagtccagaaaatcaattcataagagtcttgcattttcaccaaaatgcctttattgcacacttatgaattatatacctaaaataccctcaaaacatgtgccacaatgaaataggagctcaagtggggatcattggaactcgtaggaaaatatggttttctcataattcaattctgaagttaattcaacattccactaaagagagttaactgcactccaatatctcatgaaattacaacgaaacaaaacttgaatccgtgacttactatctactacatgcaaactccccatgaaccgatgtccataatctaataaggtagtgttgtcatctatcaagattacctttctaatatttgagttatagatctcatttattatgtgattaactgacatactctaattccaatgagtatacatcaaattccactaaaggaattatagtagtcatagatttcatgatcacatgtcctttaaattactcaaggggacacactatctcaataccatgaaatatcatgatgtctttattgagaatatctatttccaccaatatccatcaatagtggcctaatccgtaggggcattgaccactttagggtttcacccatacgacaatgtctcttgctgatttttggcataggcttaatatcctctctaggttgagagttcatgcgatatagtagtttggtaaatcatgacaatcgatagtcttacgtcatgattcaccataggtcttatctaatgtgcatctcatacactagtgcactaaacatagaaactcatcctaacagccaagatgtcattccttcaattaggagatagtgtactatagtctctattagattgtttaaatcaatgaacttatctacctacttacaaggaacctatgacttgtattctttatgcaactcctaatgcacccaagtcatatacaatgtaagagatataaattaaatgtttaaatcaatgtcactacataaaagaaatagctaaaagacggtcaagtttaaccctattacataatgtcttgtttttaggggctcaatccaaatagatacctttttggcttcatacatgttagttttctcaagaaaatcacaaatatatttatgttcgaagaaaaacaaaccaagcttggttgagagagatacaaatccaacaaagtagcccaataaaccaagtctttcaaagaaaattgagtggtcaataatgaaatgaacttatttagaatgtgtgtgtaacttccatgatgactaggtcatcaacatatattaagacgttaaaagtaactaatccttgattataaatggacaatggggagttatattgggagttgatgaggctatatgaaagtaaaaagcctttcaattcagcataccatgcctaaggagcttgaagaaggtcatagataacattttttaatttgcacacatgagtttgatgctaaggctccacaaagccttgttataggtgccaaccgcaagtcactactaatgtgagaaccaagcaaatagttgtagcttatacaataggactaaaagtagcaagaaaatcagatctttgatgggacctttagtgactaatcttgctttgtaggattcaagagagcgatctaatggctcttacccctaaaaattcatttacacacagtaatattttatgaatcatgagaaggaactagatcctaagtgagtgcattaaattcttcactcatagcatacgggggatgtttaagggcatgggtgatggtagtgggcgcgttttatattcaaggaaagatttctcatccttcttgtgtttaatcttttaatggaagtgttttttgtttattaaaacaaaaatggtagtaggctcaatagctttagaaggttgagtggtggaaaggtttttctgggtcaggctatcatgtggtgagagcaggtgggatgaggaggtgtaacagtttctggagtagaagtggtatgttgttgaagaggacttacttaagaagtggggacatcacttgttgactccacaacaagatcatgtgtatgagggttatcattgtttggtaaagtgacttgagtcattaaggtgttaatggagggcacatgaaagtgcaaaggctaatctaatgaagccgattgattgaggatatcaaaattgattcatggcaaatgagattgtgttgtcttaaatggaaattaggtatccattaacactacatgccttgaggtgatgagttttctggagttaagatcatggcaacggtaagcattatgagccttggagtagcctaagaaggtgcaaggacatgatcattttggatttaagtttgagaggataaaaccatatgcattttgtgtagtgataaacaaacataatatggtaatgataattatcagaagaggtgataagagaaggacccaaacatcagtatcaattaggtcgaggggactgcaacttgtgagagaggaaataccaaataacaagcaaggaattttgttacatacgtagttatgatatttattttgtaaggggtctcagacattgatgctggtaacaaattgactagagactagttgctgtaatatcctgatagactgatgaccaagtcaacgatgtcattgatgaactagagctttaggggagacaagagctcatggttgattagatgatgaggaaataaatgatggccacttatacgtatttgctttactcccaccctgaacagtgatgcttctatgtttagattcttcacaacaaggaaaaggaaagaattcaattgaggtgttattttatttgtaaaattgggaaattgaattttttttttttttttttttttttaagtgaaggtgcacacaaaatagaagagggtgtcacaagtttggtgaacctagtttgaataataggacctcctgtaccatcatctattatggtgtcatcaccacttccatcctcagactgtatagggatattttgtaggtttgatgtaatgtgatgagaaacacccaagtccaacaccaattgtaatttgacctccattcagcgtgcagttggcttgggatttggaaaaatagtggagtctgagatctgcaatattttgaactatggccaattttgtcacatagttgacatacaacccctcagctagttgttgtttgaaggagcgtgattatactggagattaagtttgcaattgccttctcctctattttgatagttgttgttcagtggtcattttcctgttccttcgtcctgtcctttcttatggttttgatcacaaccttttgtttgttgttattggaggagtgcccgtgaattgagatttggtaggattgaaatccttagcttctacccatttgagacatgtcacaagatctttgagcttatcgaggagttcctcaaatgatatccttttattaagatatcagaccattaaggacatggattattaagtcgtgtcatccattgttggagcaccaactacagcaagctcatagtaacactctttaagtatttgcatatattcagcaattgattttgtgcctttggttgtgatggtcaacttttccttgagagtcatgatacaggattatgacttgctggcataaagtcaatgaagatgagaccaagctgcatgagcagaagttgctgatgcaaagtgtggaacaatggactgggaaacaggcacaagtatggtgtgaaggagcaggctgtcttgccgtttccaaattgtgtgtttagggttgggcaaggtttcagttcctttgctaatcatggttgatggacatgtatatgaccaccaatatacctgagaagatcatatccatagagaagattaaagaattgagcccttcacaactaatagctgcttgctgtaagcttcagctgcagttgagcaagggcgatgctggataccagagaggtgatttggggtggttagccaatgttagtgacggatttgggaactttctgacaatgttttgttagccatttgggtgtatgatgagggttgtttgacacactagattaatatggaggaagaactgaactagttagagcaatgagtgctctgatgccacaaggactgaaaattgagtatgaatgaatctcatcatgtttagtatgtaatcgtcttcatatatacaagatacattgcaagaagaagaggaaataattacaagcaataattgataggacaaacaatagatggactatgtacaggatgcacacatctatagtctaggagatgattcagctgctgcaattatggtgattattcatctgctatgttcatgaagaaaatttagtgatggaatttagttgacttggagcaactaattatgtcttcttttcattggtcatccaaatgatagtttttttacgagctacttaacatttctcagcataaaaggatattctacattatgttctctgtgaatttctcacaacggtgttcacatttactgaattgtttatcaatttgtgtgtatccttaggtgtacatcagatttcttagctatcttcagggtactcttgaatatagctttctccttaatttatctaatcccttccttctgctgctaaaactattcacagcacatcttccactaagagtgagagttggccttgtaatgctccttggtgaacttggtgatcccatttatggctcaactttatttatttattggcataaaaatttcccaaaaccttggccattaggagtatggttttcattgagaattcatgttttagatttgtggatggactctgacacataacttgcatatcactgaaatttggatgtatttaggaattcctggaattttgtaaacgattattcatttgtcagttacttgcagagaaagacatgttaggggtgttcaacttccttgacaatagcttaggatatttgtttggcccaggtacgaaaaatatggtaagatagaacatttctgcatagatgctaaaatgttttcaagtcctgaacaaaaattctatgcatggatttttttttattgcaaacttctttggaatctaacttctatggtgtgacatgagaaacagaatgtcaatgaaagagatttccatattgataacaagtctgtttatgcccaaacttacccatagcgaaacaaaaacatgacacttttcatgggctaaacaggaagttctcaaaggaaaaagaaaagaaggaagagctaacaagagaaagtgaatattttatggcatctctaccattgtaacagaaatttttctcagaaaaatgccttctactcacagatcccatgacattgtgctataattttttaggcatctttcactagtaaactgcatgttgtgcttcaagattttgattgtgatagtgagtatttatcagtagattctctgctttcctttggtaacagc

SEQ ID NO: 10892 - DNA, 4298 bp, Vitis vinifera
  Intron number 4 from transcript GSVIVT01035985001 (locus G SVIVG01035985001) derived from phytozome v7.0 (chr-ID chr4 ; pos 6815621 to 6819918)
gggtatctgttccaaagaagggaagtaggtaaatgaatgcttttgattaaccatgtaattatgctcattcgataaggcatcgtatgtgggaagattatatggtgatgttatccttggatcccatttgtactgtttcagggtttgctagtctcagaaaattgagctagttgcttagtttttgttattttagctgttacactggaccagatgtacttttggtgtttagctgtttgtattgtagacaaagaaaatgattgttaatgcatatcttggaaaaaaacaagcttaggtggtgttctaaaaccatttcaattgctttattctttaaatttttttttcctttcatgcatcttctttgtatctttttttgtctttttttgatgggcaaaagagaacatatattacatttttaataggcaaaaatgtcggaatttcatctttgatgcattgtttctctagcattcttatgaatttgaatccatctgggccatgagtgatcagttgtttgtgatggatgattgtttgttcagatatatgcagggatggtcaccctgagaatatagtgttgtatactactttgaggttattcactgacactcctaacaaatgagcaccaattcatggagagaataaaaatgaaatagagttctttgctgttgttgaaagctcatattctagattgttgtccattatgatgtcatatcactcatattggtatacttcattagatgattggcattttcagtgcagtctgcaaaaatttgtttatcaattgctagctgatatttttcgacaaaggaaaaaaaaaaactctaaatagtgttcacagtttgcaatttgatgaagatttagaagcctagaaggtacaatgccaaagctgtaattcttctttctttctttgataatgttacagatggaaatgttgaactgcatttctgatggcaatatatttatttttatcaattacatcttaggctattgggttaatcttcagttccctcatatatacagttctatgcatctaaaatttggaattacatccataattattgtcattgtaaacattgcgcaagctgaacagccattagttaaatttcttattgaacaaataagggaaacaaaaagagcctctaggtttagtaaattggtgattggttgtggaaatgccacagaatgctgaatgcaggatctccaaatttacattgtattctctaggcacaaaaaccttgctctttgagagaagattgcccatgccggtgtgccttctgcaatttaccttttagcaagaaatgaaagagaaaaaggttttatttttatttttcaatgcagatttttataaatggttattctcacagtagaaagggtgagacctgaacttaatgtttgttgagcacttcaagttgtgaattcaagatgtgtagggattcatttgtcaccattataaatgcacatgaacactttttcaatgaaaaccttgagggttctctgactctgttaatatctcatttcgttagatgaattaccctcaatgattctagagaagccattggattgaggtcaaactgctgggaaacttattttgtttaaatttgctactctggcagataatgattttggcgtttatatgtttatttatttttggccatatcaggacttctttgaaatgcatgtttcttcttgtattgaacattcgcacgatattccataaaagttgattttttctttttatacataaggaaattatattaaaagaatgctaaatgtatgcaatttatcttcacataagagttataataaagcataggatggggcaggttttacagggtgggaggatgtttgtatgacaaatcttgggtaagacggagttcaattaaaaaatattatgggaaatatgtttcattttgtagttaatcatgagaaccatcaattaaacctagtactctctgcaattctcatgtgtaaaggaataaatctaccaagaatcttaggaacagtatttgaaatgatctacataatagccattacaggaaaaggcaattgcttccccttgtctcatatttctagaaaacctaggagactctggagaaataccattgaatatcaagtatctacaatttgcgggtgaggaataattaccgcatctctagaggaaactatgaaatgacttgttacagctttcctcagaagcaaccttgaaaggacctcattaatgaacataaatataaccaaaaaaaggagggaaagcaggatcctgctgtcttaaagctcctacaactcttaacaaactacttaataaaagagaaaaggccctgaataagatgtaaccatcctactagccaaaatcttaattgttgtagcctggtatgattttaggtacataacattcacacaaataatccttggaactctggtccttaattcgtaaatccaaccattggttaaatgatttaattttctctctttatgcccatcaaatatatatatatattggctctatttatatattggaaactgaaaatattattaatctaagagagaaaaatttctacataggattatatccttaatgtagactggcactagtgaagaggtatacaggaaactaaaactatttttagttgaaggggaagaaagtgcaatgaagggtgagaaattcttctagtagagatggcaagagtaaataaacattaaaaaacaaaaagccaagaattggtagaccgagccatgcaacccagaagcgggataaaattcgctcagtagcctgaccttggaagaaggttgcacttggcaagctctctctctctctctctctctctctctctcttttctcttctttgaagctaaccgtcttttgactattttattatttttacatggaaatgaacttacaacatgttcatttcccgccccatcccttaccacctgagcccagtctcagggatctcatgctcctcttggaaaccttgtctgctgccaaattagatgatccaacctttctcattgtgaagctcttcataccctcaaaaaattgttctactccatcttaaccaaatgcaccaaatcaagctaagaggagcaaacctccaaaaccttcttggtttcttccaacaaagctctcatgagtccaacagctccaggaacaactgggaaagcacccaagcaactccaaacaaagagaacagcatggtctgcaaactcttagctaaactgtaatattgtcagcatatgatttgctgagttctcatcctgtttacaaggcaaaactagttagcaaaaggctatttctttatcataagctgatttgtagtaacaattttcttccataccacctaccgaccaaagaacatcacttgttggaagacaaagggactcaaatcttcttagcatgataagaactggatcttcttgggcttagagaactgtataataattgaagtgagactgccatccttccctaacctctgaaccaacttgtccaggcaatcattccccaaagccattgactgaattcagtgaagaaaatcctgcatcatccaaacttctattccaacttgaagattagctacccaagcattccttagtgaagctattctacaaatccaggaaaaagacacataatgagcttttgcaacactacatttcgaactagaactgagtttaataattgatttgtcatgattggctgaagttcttgtacaagcctgaaaggttctcacctttcctgattgttttccaaagactgaccccataaccttcccttccctccttagaagcccaaaccctttctaacttcccaaatttgcctggaatacccctccacaaattctcctgctccaccacaaacctccaaactgtctgatatcaaaatccacattgcctttttctaggaaaaccaaaggatcacaagtgtaggcatgaattaaattggtaggcttggaaggatgcttttgatcaatataaatctatccttttgagtaggtatagcctctttccaataggcgagcctcttatggaatcttttgcaatggagtcctgcatggaacagacttaaacatgcactcagaacatattccaagtaagtggtaggaagctttcccaccctatgtggctatgaccaagaatcgagaccaataaatccacattctccacatcccccactaggatgagctcttaagacttgagatcacctaaagcaaataagacttggtttgcttttctatttcttcttttattttttatatattgtctagggtaatatttagtagcatggaagaagaataaaatttttcactgcaggt

SEQ ID NO: 10893 - DNA, 17690 bp, Vitis vinifera
  Intron number 1 from transcript GSVIVT01014793001 (locus G SVIVG01014793001) derived from phytozome v7.0 (chr-ID chr1 9; pos 9794714 to 9812403)
tcacaagttcatcatgctactctcttggaggatcttgaagaagccatgagggagttggaacagaagacaaggcggcgctactcggaggcttttgattttcacagcaatgattttgttcagatgatggtcattgatggttgttttgtgcttgaactattgcgcctttaccacaagtttgaaaaggaggtatgtttaaatatcagcagattaactatggtatttgtttgagattgagtttttatcattctgggagacagacagaaagcttgctaaaagtccaggcaagaaagctacttgttccttgtaattggaagccaagatggttaacccagcttgcttctccataaggaattcagtggatttttttgacttggttcaagtttatgaatatgtttttagtcaattaaaaatattttattcgacttccagtccagggcccaaaccatcaactatttcttgcgttagggttgggatggggcttggtctgatcaaatacccggtctgcaggcagcagcattaaattgagcctttacccatggaattggagccatctaaccttttgcctggtcgatgagaaagccaccttgctgaccataggatagaactgtagctggaaattaactgtggaatcagactgcaactagctatatagtttgatttgatatatcaaggaaaaatttgaatcactatcgatggattcgggtttcacttttgggtcagaaaataccaagtcaaattcatgtttatttggtcacacataaacatgtattcttccatatatccagtctgcttgaatgaagcagaactaaaaattgggcttgcatctgttggaactgttgtaatttggatcttagttcaactccaattaaaattgctagaggctttggctttgctggagcaggtttaaaacataattaaattaattcttatgagggtatggcgcttctcatctatctgagcttttccctagtgagtaaagtccaaagctttgaacattaatttgatatgcctgttgttttagttttttgaatggtagcactatttcatgtctgttatatgcagagagccagtatattaatgtctttttctctattatatggctatcctacagaaaaatgtagatgatcccatcttcgccacccgctggatgctgcgaacacttcagcgtgatttattgaagcttgagaatcagctgcctttctttgttcttgaaaaactatttgagctaattagcatggctgaggatccacccctcattgatcttgtactcacattctttgatcccttactgccaaggaaaaatattaaagggatgctgaaccctgaaggggagtttgatcatatgcttgaggtgttccgttcaaccttcctttcatccctcaagcaaaatattacacctggatccgagcaactgaaaatctctgtcaacattccccttgttcaagagagacagctagttcatagtgtaacagaacttgaagaggcaggagttgagctaaaaaagagagaggactgtgatttgctagacataagttttcaaggtggggtgttgaaaatccctcctctgtacattgacgataacactgctcctctcttcctaaattttgtggcttatgagcagtgtgaagacggaaaaccttttttcaccaatttcttaatgttctttgaaagcttgatcaattcttcagcagatgtcgagattcttcacaaaaatgggatcatcaatcatgttctgggaagcgatcaggatgtggccgatcttttcaacaagctaggtcgtgaggttgtttatgatttggatgagtgctacttgtctcagcaaataaagggagttaataactactgcaaggcatactatgccagtaaatggcgtgtttggtttacaaacttgaaacatgactatttcagtagtccttggacatttttctcgcttcttgctgccattgcgctgctgttacttactactgctcaaacctattatactgtgtatggttactatatatcttcataggcattggtatgcgatcttttatatcacttgggctttattcactcattttcctgtttttccttttacatttcttcatgtgttttcctgtttggacattcccatcaatttctagtagttactaacttaattttgagagatcagtacatccaatgcaaatccctggggaaaatagtcactcccaatattaataacagaatcaaatttgagaaaaattagagaagattcatgtgacttggtagtgcacttctgctcacatgaagagaagaattcagttactaacttaattttgagagatcagtacatccaatgcaaatccctggggaaaatagtcactcccaatattaataacagaatcaaatttgagaaaaattagagaagattcatgtgacttggtagtgcacttctgctcacatgaagagaagaattcagtgattctcaaggaattgggtgaagaagttttacattttaacaggtcaagaggcttcccctgcctccaatatcttgactcaattgaatttttgcttctgcaaagagtaaataatatcctcaccaaaatggtaaggcctttggcagctaggatgtttgtgtaactctatctagagctatccaatgggctgggctgcccattttagcctatggcccaacacaccaaaaggtcaggctgggccagcatggcccaattactgtagcagccatgttgggcctaaggagacgactggtcgtgctattgtgccaacccgttgccagcccacttggacctttcaaatatcacttttgactttttccttttttctttttattatatgtcagatgtctataatgcccatttcaacaactatataatgactagtttgaggggtaaacaagtaattctatagctatttttatttatttttcatgtcaaatgtatatattacccttcccaacaactatataatggctagtttaaaggataaataagtaaattctcacttagttggaatgtactcaaattatagtgatgcaatttttacttttttttcctccctattttttcatataatttgttgaaatattgaataaaagaatatatatatatataaattaaaaatataaaaagtataattattagaggtgtttaaagtaacaaaaagaaatttcatttaataatgaaaaaaatttaagatagaatgacttaaaaaattaaattaaaaattttaacaaagtgagtggcttatgggccatggcccactgacacaacatgacacgattggcttgcgggcttatgggccgtgttgggccacatgtttggtttgtatgggcggcctggcccaatacgatttttaagtgggttgtgctagcctgatatgttggcctataacgacctgctaaatattgggccgtgctggctcgacacgacccattagtcagctctagctctatcaggtcactcaccctttcccattagcttcctattgtttcatttgaaacaatgttaaaagtagaacctaagttatactcaatggagcctaacatacaattagccaatgataaaaaaaataaaaaaaataaatttcactatattgatgaatttttttattttatttttaatttttgtgtcttgttaaatttctaaataaaagtcaaagagaaggaggagttgatcaagagtctcacttcagtgaaatttaataagaatagtattattattcacacaataactttacacaacaagctattgaaatagtagaaaaaaaacctaaaatcaccacatctgatatggatatgaatagttgagcaaattagtacaaccttttatcccaagaaaattgtaaagagatggaagaacatcaagaaaaaataaaaacaaattagattaacactagttgttttgattgctaaaaaaaaatgaaagaaaataaaaaatacttaaaatcttattttattttcttttccatgtctaaatttctcaacaaccaaacttcaattttttaatagaaaaatatgaattagaaaggttgtggagagaaaaaaaggttatcattgcaataccttgtagtggtaagagaggatcctagagtcgtagaagagtaaaggagaatagggtttagttggaatagttgtctaggtttcagaataacataattaggaatatttccaaaattttattgaacaatgttttaaaaaacaggaatattattggattacaaatataatttattacttcttaagttatttgcaaaagaaaaacatataaaattatggacccacatttttcatgtgcgtttccacttgatgacgtgactcgctttttatttgatgaaaaatatgattttttgaaaaagatttggagttgccacttattttagttttttataaagggaaaataaaataagaaagaaaaccctgtacgactccttatttggagaagatatgttagaaaaaattgagtccaaatttaagggtcaggttacctattaggaagatacggtgatgagctgtatcatccctctaagcttatatacatacggtctctactaaacaaatggagagaattgtgataattaattaattaattaatcacggataccaagaaaaagaataacacaaatgagtatgtacaaatcatggtaaaaatcaaattaaaagaatagacaataaataacataaaagttatacaatttgatttattaaacttattaaaaaaagatatttcaaaaattactttttcaagaaatttcaaaggattttattaaaaaaaaaaacaaatttgaattaatgattccaatttaattatttacaaacaaaaagttttaatttatttgcaacaagtgatttgatttaaatttatttgtattcacttttcaagaaagttatttacactcattttatcaaaagaatttattacaaaaatctcaatttgacattaaaaatgatttttacttacttttactagaaaataatgaatttttacaactttattttaaaaaaatatttcaaattgatttttatttacaaaggaactaatttctttacaaattttatttacaaaaatattttcaatccaattttattaaaaaaagatttctacaacttcaatttgcaaaaatgactcattctactatcattaaaagattacttaaaacttctatttataaaaattatgtttaatcccattctagttaagaagagagaatttatttaaaaatcattttttagacaattttattaaaaaaaaaccttttgggcaattttatttaaaaaaaaatttcttaacaatttttattaaacagataaattttcagacaattattattaaatttttttttttgaattttgtttaaaacaaattttttggatttttctaaaagcatttttctgaatttttattaataaaaaactttcttttattaagaagaatattttagaattattattttgttgaaacatgtttattgaattgttcctcttatttaaacaaaatttatggtttgtttgatattcaattatgtacagaacgagtaaccaatagaaacgaatatttataggaaccaatagaaataaaactaaatagaagtgggaaataaatatgtaccccaacaagcctacaacaagttcaatgccccatatccttcttgagcctcatttccttccatgaaattccattcttcatgctcaaccaacaaaatcccaatagtagaatgggtccatacaaagtaaaaataaccaaaatgtaaatatccaaaaatgcacaaagtccaaaacagatattcaagcccaaattcaaacttcaaattagtataataaatttcaccagttaaaatgagcccaaattagcaaattgaatccaacagaaatatcacacatgtcaaagtccaaaatttccaaattaataatcaaaatataagcataatcaaccaagtctaaaatataaaaaatcaaaataaattcaattaggcctaaatttaatgtcccaaaatccaaacttaatttaatatacaaaccaaatccacaaccacaattaactcaatttaatatccaaacccaaaataacatccaaaatacatcacaattgtctcatgccaaattaaataattcaaataggtaaaatccatatcaattataaatccatccaataaatttcattaacaacaaataaacccaaattcattattaactcaccaaagtctgaatttcatattaattaaccaatccaaaatctcacaaacaatcattacaattaaaataaaaaaaaaagcaaaataaacttatacttttttttttggagacattggaaggaagattgggggtggttgtgcgttgagagagggaaaataaattaaaaataagataaaaaaaataaattaataaaaaaagagggggaggtgagacatcacacagctggtagtggtgatggtgacaaccgacagtggaagatggtgtgatgagggcaaaagggagaaaagacaaagaagagaaaggaagagaaaaaaaggaataaaagaaagaaaagaaaaggaaagaagggagcaatgttttaaaaaccggaccggtcattgaaccggaaaagttatcggttcacgattcactggtcggaccgccggtcgaaccgctatcgaaccgctatcaaaccggtgacgtcataaatatatattttattattttatataatataaaaattaaaaaattaataaattctatgtaaattttgatagcatctactttgtttattgagtaacttgagttttgtcacaaaattttttacctgtagaagtcatcaattatcatatatgatatttataacacaatataagatgttatacattcataatgtcaataaactcaatatttatcaaataatcaaaccattactatcctataataaccaaattatcaaagagttgttaacttaacacattgtccataacaaataatacaaatgtcaaccataggtccacaacacttaaataattactcaaaataaaaacataacatgtcaatgtttgaatattcatgaagatttttgcatactaataaatataaaatttatgtcttcatttattttggaaatcggaatatggagattgaaaatgagcatttggaaaaccaaaaaaaaaattaaaataatttgaaccggttttttccctcagaaccggctggttcgtccggttcaccggttggaccgccggttcaagcggttcaatcccggttcggtctccatccggtctaatgatcggaccaaactggaacgatgatcgattggctgtccaaccggtcggaccagccgttccggtccggtccggtttttaaaaccatgaaagggagaggagagggggaagggcgtgtggtagtagtgtctttgtgagtagcagcgtggagaaaggaagaagagaaggaaaaaatgggggaggaaaaaggaaaataaaaggaaaaggagaagagagagaagagggaagagaggaggagagagatgggtctttgactaggagagatagtacaaaataaaagaaagaaaataaaaaggaaaaaagtaaaataaaataaaataataaaaataaaaataaaataaaacatagtacaaaataaaaataaaacaaaataataagaattaaaatttaaaaagtataagtgggtcaaaacatgtaaatgtaactgagtttgaaatctaaagataaaattggactcaaaattaaagtaaaaaaacttgggacaaattttggggtttataataatacgatattatttttttaggtctctaaatgatgttaggtatattataggaaatatgacatacaaagttcattattctatataaatcatcttgtatattgcattcaactttcatatccttaatattatttataagaataagttgatgataattttataaaagcaaatattaagaatttgtttggtttccaaaaaatgctagggaaagaaaaaaaaaatgttaaggaaaatggttttctcatatttggttttacaatagaaaaaaaaataattaaaattaatttgaaatttatatatttttaagttatttaatcttgttataatagaaagatataagtaaaaagagtttgaagaaacctataaaaataatttattaaatttaaacatatttttttattttcctttactttttcttttcttttccttttcctctctattttatttcctttgcattttccctcaaaaatttcaaaaatccaacatagcctaaaagaaaaataaggtgaagcactatgtcaattttcaattttctatctttctatatatatatatatatatatatatatatatatatataaggttttcatagtgccaaattattaatatttttatatcatatcaacatactaattaatgtgagattatatagaggatgatacttcattcaaaattatcttgtcaaatatatcaaagcaaagaaataaaactaataaggaaaagggaaaattaaaatattgattgtgtcaataactaattgtttttatttaaataaaattttaatgggtttttgaaataaaagtatttgttcgacttttatttttatcatatcaatttgagatagaagacatttttattattttgatattaagaaatgaaaatatatttataatatattggattttaaattatggtcttttatcctaattgttccaaaatcctagaaaacaagaaatataacatggtgtatatcacaccaagaaaataaaactaataaggaaaagggaaacttaaaacttgagtttgtgaatagataattatgttttatttaaagaatgttctaatgttttcttgaaaaaaaacattcaatctatattgatattcatcatatcaattttagatataaaatattttccattactttgatattgtgaaatgaaaatacatttatattgaattttaaattatacttttctatcctaattttttttccaaaatcctagaagaaaaatatggaatggagtgtttggttgaatatatgagaagattctatgcttatcccttttctttattactttcatatctattattttattatttgatataaaaattttaatattttttttatataaatattatttcacacctaatcataatgtagtgagttaattagtaaaagaaccaataaagcaacaaataaaagtatgtgaatccaaagtcaagaatcatatagaaaaaataatattgtcattatataattaccaaaacaaattgcttatttggtcaaagaatgagtgctttggttgaaaatatttaaagattttatgcttattttttccctttatatatataaacatattataataagtaatagattgttaaataataaatattttattaaataaattcaatgtgatataaaacatgttataagagtgttggaaatgggtttgggtgcccgagtgggttgacccaatttgacctaataaataaaaagaaatgggggagtagtttttaggagttttaaaactacctagaaattgtcgctataaataaataaataaaggatttaaatctctcttacttactctctctctctgagaagattgaaaggacacgattcttctttttggaaaaaagtcatttcttgaagtttttttgttttctcaataaaaatgagggttaatgctcttatgctatgaaaaatagagtggttttcgtatttatagttctattcatgatttgaagcataaaatttgttaatgaagctaccaatcaagattcttgggcatctcagaagataacccgaaactttattttccatcattggtatcaaaacactatttaggcagaaaatgagcagactttgttaatcgatccacaattacccaaatagcattattaccccctaaggttcttggcaaccctatcacaaagtccatggtaatatattcccatttccattcaggaatagaaagtggttgtaatgatcctgctagttgttgatgctcatctttcacctgttggcacaccaaacattgagccacaaatcttgcaatatccctcttcatacttggccaccaataattttgcttcaaatctttatacatctttgttcttcctaggtggatcgcaaacttagaacaatgagcttcctccaatagctctctccttaaatctccatcatttgggacataaagtctagtcccaaatctcaaaatcccatcatctgataagacaaagtcaggcttactaccccctcttaacttcttttataagctgcactaattgcatatcattcttttgtagggtcttaattatcccaaccaagtctggctgcactctaaagttcaccacaggagctcccgagtccaaaaatcttatatggacttgtaaactcatcgaatcttccaataattacctctgacaacctctaatagctgctaaggaaccaacaaatttcctgctcaaggcatcagccacaacattcgccttccctgggtgatactgaataatgcaatcatagtctttaagtagttcaatccacctcatccgtctcatgttcaattccttttgggaaaataaatacttcaaactcttatgatctatgaatatcttacaagtttcaccaaaaagaaaatgtctccagatcttaagtgcaaaaaccactgcaactaactccaaatcatgagtaggataattttgctcataaggcttcaactgtctagaagcataagctacaactttcccatgttgcataagaacacaacccaaaccatgacgagaggtatcactatacaccacaaaccctcctgagcctgaagagatagtcaaaataggagttgtaactaatttgttctttaactcttggaaactacgttcataatcattagaccactcaaacgtaacccctttttgagccaacctagtcagaggtagggctctcttagagaacccctcaataaatcgcctataataaccaaccagtcctaagaaacttcgaatctcggtcacagtattaggtttcctccaatttgacacaacatctacctttccaggttttatagagatgccatccttggtcaccacatgcctaaggaaagagactttgtctaaccaaaagtcacacttctttagtttagcatacaattgcctatctctgagagtttgtaatacaatactcaaatggtgcttatgctcctctctactctttgagtacaccaaagtatcatctataaaaaccaccacaaactgatctagatatggcttgaataccctattcattaagtccataaaagcagcaggtgcattagtaaaaccaaaaagcataaccaaaaactcataatgcccatatctagttcgaaaagcagtcttgggtacatcttcacttctaacccttaactgatgataaccagaccgaagatcaatcttagagaacacacatgcaccttgaagttgatcgaacaaatcatcaatccaaggaaggggatacttgtttctcaccgtcaccttgttcaactctctataatcaatgtagagtctcatagatccatccttcttctttacaaataaaacaggagctccccaaggtgaaacactaggcctaatgaagcccttatctaataactcctgaagttgaatcttcaactccttaagatccataggtgccatcctgtaaggggccttagagataggagttgtccttggtgccaaatcaatggtgaactccacctccctctctggtggcaagccaggtagatcatttggaaaaacattaggataatcccttacaatgggtatgtcttccaactttagattattttcctcattctcaacataagccaaaaagccttgacaacttttcctaagcaaagaactagctcgcaagattgagatcatatgcaatggtttgtctacatgcttcctctcaaaactaaaattaggctgaccaggaatgctaaacaccactcttttcccaaaataatcaatagatgcatggtatgaagctaaccaatctatccccaaaatcacatcaaaatcctggaggtcaagaagtactaagtcaactatcatctctctatacccaatcatcacacaacaaactctaagtattttattaaccacaacaaaattcccaaaggagtagcaacaaataaatcaaagtccatgttatcaatcgacatacccaacaatctagcaaaagatacgaaaacaaaagagtgagttgaaccaggatcaataaagactctagcaaataaggtgtgaattcaaagagtacctgtcaccacatcagaagtagcctgagcatctctatgagtcatagaaaatacccacccttgagcttcgggtttctgtctatcctcagtattctcctccttaggcttcccaaatacaaacttcttattctctggacaatcccgaaccatatgtccctgttttccataaccaaagcaagctcctgtctctctgtagcatgacctattcccatgcttcttgccacaagtaggaaaaatcccatttaaattttgtgctgcttttcctttattatgatttctacttggagcagaatttttctgtgcttgattaccatgagcaacatcatttctattcctcttccttttttgttccttatattggtaaaactcttcattatcattctctgcaataagggctttgtctaccacctctgaatacacactaagcttcaaaattgatatcttattcttcagataaggcttcagcccatcctgaaactttaatgttttttcctcctctatagcaatcaactatggggcaaaacatgatagttcggtaaacttagcctcatactaggccaccgtcaaattcccctattccaaacggacaaactcccccaccttttgtcgtcgaacactgtcaggaaagtacttcttataaaaagccaccctaaactgactctaaacaataggcccctaatcctccaaaatcctcttagtcatgtgccaccaatggtctttctctttgtctaacataaatgctgcataagaggtttttttctcctcagaacaatcaatgacatcaaagaatttctctatcttcataatccaagcctctacctctgttagatatgaagtaccagaaaagaaagagggacccaacttcttaaagttgtcaaaggagctacccttagtagatgaggattgtccttgaccattacttccagtagctctagcctgacgctcaaccaagccaaccaaagtccctaaatatctataaagcccttcaatactcataggggccaaagcctcaagtggaggagttatatcatcattagcctgactgttttgagaagatgcaggtctccttggtggcatggtatcctataaagcaacatgtataactaaattagtcactaagaagccaaataagcaaatcagaattgtaaggaataaaatgaatcggactggatgaagttaaaacttaaactaatgtgtcactcgtttattcctaaaggttaactaaacaagttcccatcaagatcacaacctagtgctctaataccactctgtcacgacccaagacccactccaagggcgtgatggtcatttcacacctcaaacccaaaggcttaaagtgtaacctgacccaaacaattatcttgtagctggaagttaccaattaccaaatacctgttcagagtagcggaacaaaattctaaaatcttcaaaacttaactttaaaactaagcatccatcaaccaaaatccattatccaaatagattacaaactcaaacaattcaagtgctaacaaaaattttcataatctccaaatctcaacttcaaactatcataaaaaatttaaaagttcaatatctaaatagcttccaaaaaccaaataatccaaatgaacataaacttataagctaacaatgtccaaaaacaacatcctaagcaaaatcctaatgatgatcattccctaacctagccatcactcagcgcccgaagtaagggtacttgaaaaattatcaacatgtaggaatgagctcaaagcccaataaggaacattaatacaatccattgatcaaatatttcaagttcacttgcaaaataggagatatcacaactaattattttcataaacctttaagtaagttttgccaatacattcaaaacttttaattgtatactttcatttctgattcaaacattttcatagcaaattcaatcaaaacattcaaatcatttatttactctggtcatcaaacatcaaatggtgcccaattaggtgggacttttcaaataggtggctagcctcaaattgttcctttaaggtgggcggaaccaaacactactagtactagtaacctctaaccaaacccctagaggttggggtccaaatcaattacattccccaccaagaaatgtaaaagtcaattattatatcccgttgacaaaggtcaaacaaaccagagtcaaatacttatttcaattattcaaatttgcaaaacataatatctccacatttctctattgtaatcaaaatataaggttctaacatacttttcatgcaaaacatatttgatccatgcataaaacgaataataactcaaaatgtttccaaatgatgtatataaaaatttgtttctaaaaaaaaataattgctttaatttccctcacctcgaaagaaatcctcgaaaacttaggagaaaaataattctggaaaatctactattcacctaatataacataagagaaataactattactatttatctataatttaactaatctattccttatttaaataaaattaataaattcccaatttgtttctaataacatattactaatttaattaaattgtaattttatttcattataaaattctataatttttttatactaaatctctcattctatttattacaataaaccattattactattatcttatttattaatctaaaactaaatattattattttattaattatcaaattcaatagccacccaaaccattacccacttgtctctggtacacacaaaaccaataacacaaagcaagttcttcctattgccatcatcattattatgatgattcattatatatatattttagttttccaaggccttccttccatccaatgcacatgcctcctttttattttattttattttattctttctttctttcttaacctgacacgcccctttttttttttcttccagcaacgtgcacacaactacaatgcctcaataccataaatacaagtatctatatcacccctccaaaatccaaaaatcatgtaattcttcctattatttatttattttcttttcaatctaaagtctccgcaaacgactaatttatttattatctaaatctaaaatttcttttcttcctctgattttttttcttcaatagtactaacaaaaatcaaaaatcaaaattttcaatttttttttttttttaaaaaccccaatctagattagggtttcttaaaaaaattacctaaagtttgttttcacaaaaagtgacggatctaagaaaataaaattgaagaattagaagaagaaaaaaaatcttacctatagagatctgttcttcaaaccctgaattctgactctaacattacgttatctggaattctgttagtatgaacgctattcagaaaagaataggaagaatataaatttctaatttatacttagggcatttattcaaaaaattatatttttacccctctttcattttattaaattaattaatttaattattatttttattttcctaacttatccctaaaaaaataaatttgggcgttacatatactattagttgttaatgttaaagctagatgggaatcttcaatggcatcgaatacggatattcatactgttatctgtagatcttaagaactatttttgcaggggcactatcccttaatatatatgtttgtattatacgttgttacatccaaatgaactagttgaaaagtgaccaaaggatggtactcaagaacacgtagacatgccacgggccttgagcaaacattgatgcatcatatgcattaggttcatagcagatttccctctgaaatggctaatggtggaaatttattatttcaaatgacttggaagcaaatgagaacaaaaaggttctagatcggtggcttgtatggaattaattaatgagttaatgaattagtgtggctatacatcgtcaactgcatgctagagaagaagacaaagcctgatgacctagatttgatattataaaattttaactcacgttaaagagactttggtccatacaaactaatcaagaaactaaggatatgtttggtttcggaaaatttgtggaaaaatgggagaggaaagaaaaatgtgaagaaaaataaatactaaatttaaaatcgttaaattatttttatatgctacctcaaagttatttcaaatatttttctcttttatgtaaatattaaatattttgaaaatgtataaaattttaataaattttaatcacatttcattttcttttttcatattttttatagataaaccagacatgataatttcgggaaccaaatatagtataagaaaaatgattttattatgcttgatttatctatgaaaaatatgaaaaaaataaatgtgattaaaattaattagaaatttatatattttaaaattatttaatatttaaataatagagggaaataagtaaaatgagtttgaagatacatattaaaataatttacaaactttaaatttattttttatttttcttcactttttctttccttatacttttttctatttactttctttccctcctatttttccataaattttcccgaaactgaacataacctaaagaatatctctaaattgcaacatagccaattttatagataagttgaagtgggaacttatcttgcaggccaaggaagcagagatcattattttatttgacttatcctgcaggtcttgatcctactgtgaaatatctagaaacatccagatcaaataatatatacgtaactttgggttaggttggaggccactttcccagctgcaagattccttctcccagattattttagtatgttcatggcaaatatttgtctcatttttctttcaaaagacttttattattattattattatggaaattgataaaatatgctttctattcattgtttcttttaaaattgtcggcatattcctcctctttatcccttcacagactgatcattttattagttgacacatttcattgcctagaagaagagaaataggtctgagtttggaacagtaaggttgtttgatatcctactccgatggtgagagaaaccaaaggtaagagaagcacaatgaatgtaaaaagagcaagagcaaatcaaaagcaaattgaaggccaatctccagaatgggtgatcaacatcaataagcgttgtaaagaagggcctcagtatgactgcggaaaatggttgacaatctatcatgtcccaatgaacataagagaagttcataaaaatgcttttgccccaaaaattatgtccattggtcccttacattatggggacccagggctaaggttcatggaagaacacaagatgcggtatcttttacgccttttaggatccaggacccctgaaaatgtagaacaggcagaggacttggtgccacaagttcatcgggctattctcttggaggatctcgaaggagccatgaaggagttggagcagaagacaaggcagtgctacacagg

SEQ ID NO: 10894 - DNA, 551 bp, Vitis vinifera
  Intron number 1 from transcript GSVIVT01011467001 (locus G SVIVG01011467001) derived from phytozome v7.0 (chr-ID chr1 4; pos 29865836 to 29866386 reverse strand)
ggctgccttgggtacgatgctattcgcatgtatttatggaattatagtagaattctgcaaaattatatctagctcttaacatattttttggaattgttggatggattattagaaggtaattgaagtactgattcttggccagtagccatgggttttgttttttgttgtttctttggccttggtgcggacttgtataacaaatgtgtactagggtagcacccccttctttgttagttacctattggtacattttatccatttgcctattcaaaaaagaggtatagatgctcggtaccattccttactgagaagactgagcttagagtatgaagtttgaggtcataactactatcaaatttttaattattatcatacgaatatatgcacacatggacgtctacatgtgatgcaaacttgattctttatattgaatctagtctatgccattgagaccacactttgttctcactttttttaacgcattatgcatgttttagttcttttccataatccgttttgtctgatttttttcttcaaacttaagcagggaa

SEQ ID NO: 10895 - DNA, 3837 bp, Vitis vinifera
  Intron number 1 from transcript GSVIVT01014551001 (locus G SVIVG01014551001) derived from phytozome v7.0 (chr-ID chr1 9; pos 5060349 to 5064185 reverse strand)
gggcgggtttggtgcgggcaccctcatctagagctgtccacggcacggccctatgcctagcgggccattacaggctaaagtgctgggcagacacggcccacttaaaaatcgtgtcgaaccgggttgacccatgcaaatcaaataagtgactcaacgtaacccataagcatgtggcccaatcgtgccttattatgttgtatcgggcgggcggcctatgattcatgtgccactcactttcttaaaatttttaatttgattttttaagtaattttgtcttaaatttttttattattaaataaaatttctttttattactttaaatacttttttattttttatatttatatttattgagtttgtaattgtaaaatttataaaaatgttaattttttatttttaaaaatagtacaaaaattattttttatcaaaataacaataaatttaaaataatagaatataaaaagaaataaaatataaaaaaaataataagtcatttacttatttacctctaaaactaacctagttgttagaggaagtgttatagatatttaacatagaaaatattaatagggagtgattaatttatttatcttttaaactagtcgttatataattattaagaaatataatataaacatttggcatcaattaaaaaaaaaaagtaaagttattgatttacttttttatccctaaaactaactattatataattattaaaatgaatattatcaatatttgacatgtaataaaaaattaaaaaaaaaaaaagatatttagaaaggtgaagtagacatggtagactgtctctttagacccaacacaaccctctcctttgggtcgtgccgacttggcccattatagtaattgggtagtgtcgacccaacctaacctttagcgtgtttggccacgggccaaaatgggtagctcagtctaatggacagccctaatgagtcatcccaatatcatcctatttattatcaaagaaaaaaaataaaacaagacaatatgaaaacacaaaattcatatacccgttccatctaacccagtttaatttttcataaattttaattattttttcttttatttttaaaatttttaaattttattaaaaatataacataatttataaataaataaatattaaaaatatttataatttgtttttatgaaaagtaatattatatacatcataaaaaaattaaaaatgaaacataaattgactaaaaagtaattttttagtaaacattagatatatgaacctattccggtatcatgttttaaaatttttttcaaatatgccttgatcccatatattcttatctcaaacttttcccgttaggggctagaaagagatgcccaaaccaccttcccataccattcttagttttttgtagagggttgggatattatatatttatatggtaacagtgattctttttctaacataaacctacacttataccgaaataagcataattttgacataaaaaattaatgtaattacgtcttaaaatgataaaaataattttaaaaatatcataattttagaatttcacatctaactcaactttaaaaaatgagttaacatatatatatatatataaaaggtgaacttatgatgaacgagttcaatgtaaaaagtgaattcaaaagacagatttaatgtaaaaattaaattaaacttttaaaaacatgtttattttgaaaaataatagtatttgatttgtagattgtaaattatgattattttaagtgcttatatgatttgaaaacataatgtacaaatttcatgagtttctcatttttttattttttttaagaaataatattcatgctcattatcaaacatatggtataattcttaacttaagttaggataataaggaattaatataaataatggtaataaacagtatgggttgtggaaaacaatctacaacatgaatcaataatttaatgataattttttgtaaatatgaatattaacattgcattttttttaagaatgataatgtcaatcaaaaattacaaagaggaagagttgctttttcaaaggtttggaacataatcgtacatgaggtgaaatgagaaataattgataataattaaaaaaaaaaaaaagaaaaaaaaaaaaaggtagaatttgttttatcaaactttttgaagacacttctttggccaacttcaaaaaataactcccatttttaaaaaaaataatattttcataaactttttaatataattttggtaggacaccataaacataaatatggtaattgcaactataatggttggaggtacgttttcattttctatttatgggcattgttcataagaatgacaatgaacagatttgggatgggtgaccaacccatctttaactaaaaaaacaaatttaatatcttccttacccagccatgcccgtttaatctttttatatttttttctatctttttagcctttttttcccattttttattgataaaattttaaatggtattaaaaataaatataatttataaataaataaacattagagatatttataatttatttttctaaaaaataatattttatatatgttaaaaaaaagttgaaaatttaacaaaaaaaatcaattaaaattaattcttatttaatattatatataattgagacaagtaaaataaaataaaacccgaacccatctcaaacccgtttacatatttccaaaacaaacctgggtgaaatgagataaatacccaaaaaaactcacctcattatcctccctatttatacatgtaccacaaagaaaaaatgaaaaatgtgagttgaatgtgctcaatacaaatgcaatcataggccataactttcatttattatccaaaatggttgttgaatgatcaatggaacacgttactttacgtgtagtcttctttttaaataagcatgtgaggcccacaaattaaaaacttgtacgtgggccaataaatggggaaaataacaaagtcataatacctcattaattttcctaaacaagactttaatatcctattaaattaataaattatcaattaacctaactaatagtataaattgctaggcattgagtgtaagaatgaaaactaaacatcagtgtcactcaaattttgattcctatcttctatgtagattacgattaattttcattttcgtcctattttcattcctgtttccacgtgccaaacgctagtgatttggcacaagcaatgggccatgcggtgacttgtatagaaaagtgacctagatgggccatcctatgtaaaaagcaaagactactacataggaccataacttaatggagtatctaaaagtaatctctcaaggctgccatcacatttggacttcgttttcatctttgacaaatgaaactcatgccttcccgacaagtcattcgctcatcctttacataatctttttttcgtcattgaactcaatctgaaagcttaacccttttcaggattgagacttatattttacgctggctgcctactaccctacccaacaaaacttgaagttgatacgaaatgttgctacactcaaggtttaagttaacccattttggaactttttattcaaatgccttccctacaagctttgtctctaagcaccaagacttcctctgcaggttctccttgactgccaacaatctccaagcttatccctgaactcaccttctaccacaagagaaaacccagacttgctgtttaaaatttcttcttcaaccatattttcttcaacttcacatttaagataataacacaaattcagtttagtttaaaatctcccgcacagcaatctaaaacaaacccattgttc

SEQ ID NO: 10896 - DNA, 15464 bp, Vitis vinifera
  Intron number 2 from transcript GSVIVT01013644001 (locus G SVIVG01013644001) derived from phytozome v7.0 (chr-ID chrU n; pos 2078828 to 2094291 reverse strand)
gtggttcttgccaattcaactctatcgaactccaggttcaagttttacaatttgttctcatacatttgtcatgtcatacacatatccagcagctgcttgattttctttcctgtaaatttgggttctttagattttgtttggatctcaggaaacagtggaagaaaaaaaatactttaaggaatattagtttatgttgttggttgatggaaaacatcactgatggattttaggaggtacttttatatatttgaaacctccaagcttatttctaaaaatcatgaggaaggctgaggcaagagtgtgagaaaaattcatagggctcaaacttatggttgtttccttgcccttttccattctttccctttttgtttcctcttccttaactgtacagcttctgggagcccaacagagccataggctccacttgaacatactaaataacaagaagagaaagtaaaatagcaatgccactcaaagtaattgtcgttattttcctttacttgtctttgctccttatgagattcaaatgaagccttttacttcattttttctcttcttaaaatttttcctgcaagtttctcatacattattattattttctttttattggagtggatattcagcttgggaaacatcatgctatcagcttagtgccttttaagcccgtctaatttagtcctttagagattcctgctaagcatttccttaaggctatggcttgcatgatttaccagttaaatatcatgcttaggcaatgttgagttgaatgtttttttggtatttatgcaaatataaacttttcaaataaatgattaaattggacaatcagcaaaggaggtaagcaatttatgcatctatgactgtcctgtttgtttgtcataatataccagattgtgtcgtaaatagaacttggatgactggtgaagcatgtatcacatgcatgcatcaaactttgttcaccaaattttatggtgctcatctgagtgatgattttttaaaatttttgaggaatactgattgtttaatgaaaatttatctgtatgcaaatgttacatagtgatacaggacatgaaagtaagatgcaaggagtagtagtgtaattgagcgaaccataggaatcactcctagaaacttttaggcttcaaacccaagtgctctttgcatcacacgaagaaaatagtggctgccggaaatttaattgttcattcattgatttcttttcagaagatagatcaactaccatatagaacttctctaggggcttataattccttggaactagtcacatagtagtaatgcaacttggaaataacaaaaccttggactttctgctagactacattaaagactctcggaatacgacaatattaatgattgaaaatagtaacttgtggccattgattagggccattaggcctataatgtgatttttggaaaatacttcaagattgaatccatattaaattatataagatcccagctaagcctattataatctagggaatggcaaattaaagcttgggccttggagtccattcccttgcgtctttggtaaacttttaaacgtggttgttattcgtctccatcaactcccctcgacttaggaaaacttgaccctgacttgtggaagacataaaatctctcataaaggtcatgattcaattgttggaattctctatctatgatccatgtgcaatttgaaagtggcctccctatccatttgataagatacttttgatagccccttcttctagttgaaacaatttggtgataaaaaacatcttcaatttgctcctttaatcgaggagctagggtaagccaacatttgggccatcgttatttatagcatcttcaggatcagatcatagggtgaggtcctcaatgttgaaaatgttgctaatgcccatattttttttggcaaatcaagaaaataagcattggaggtaatttttatgagcactttgtatggaccaacattctttgagtaaattttcttatagacacctttaggatgtcattttggcctttttttttttttttgataaataagcaaagaatataataacaaaagacaaacaaccacaaagcatacaaggggtatacagggtagctaaaacctcaaaaacaagataagaaaaaaaccaaaagcctcatcaacccttaagtggatgctaaccactccaagaagcctataagagaaagcgactcctctccaatatacaatttagcccaactccataaattacagacaaaagaatttttgagtttctgaattgctaaagaaccccccctaaaggctagcttattgctctccttccaaaccgtccaaaaaatgcacaacgggatggatttccaaatctttttccttttttttttcccacaaaagggtccctccaactaaataagacctcttttacagtttctggaaagacccactgaacaccaaacaaaactaagacgatttcccaaagaactctaaccattatacagtatataagaatatgatttacagtttcttcttcacaaccacataaaaaacaacgattagggagctaccaccctctttattggagcttatctaacgtaagcaccttcttccacgtagcctcccaagcaaagaaagcgactttggttggaactctatccacccatatgcaattcttcgggaaggcggtgtcattggggttaaccaataaattgtacgcttccttaactccaaactgcccgtttcttccacccttctaagagactaagtcatcctccaaagttagcctatagctcctcaagacatggagcaaatttcctaccaaatccaattcccaatcattaaaagctctagagaatcttagattccaacctccctgaccgaaattctggtcccaaacttcctccaccatggcgttcctatgtgtagccatgacaaataattgtgggaaagtttgggacagcgctgtacggccgcaccaatggtcagtccagaatcggattttattgccatttccaattgtgaacactatattttcccagcaccaatttgtttccttcaaaatctccttccaaacccctactccaaacgccccattagccttatttgtcctccaaccaaagccctcttgcccatattttaccgaaatcacctgcttccaaagattttccttgtttcaagcaaatctccatatccatttgccaagcaaggccttactcaagagagctagcttccttaagcctagcccacccttctccttatccgcacaaaccacctcccaattaactaagtgggctttcctctctgaagaatttctgaactcctttattgataatgaatcggtacacaccatacacgtatatatacacaaatgactgaataagaaacaatcaatctagcttaattctctcctaaaattaggaaactaaatcataaggaaatatcctaaatgatctctccttttttattcctaaattaaagtcctaactttggcattatttcaacactccccctcaagctggagaatatatatcatataatcccagcttgcaagttaagtcttcgaagttaggcctaggtaaagctttggtgaggatgtctgcggtttggtgcttggtaggaacatagtttaatttgaccgtctcactagtcaccttctctgtgataaagtgtctgtcaatctcaacatgcttggtcctgtcatgatgcacggggttctttgctatgcttatagctgcctgattatcacacatcatcagaattggagatgaactcgtttgtcccagttcactaagaaccctttttatccaaatcccttcacagattccctgtgcaagagctctgtactcagcttctgcactacttctggctacaactgattgcttcttactcctccaggtaacaagatttccccagacaaaagaacaatatccggaagtggaccgcctgtcaatgatgtttcctgcccaatccgcatctgagtatacttcagtgtcacggttctctgtctttctgaagaataggcctttccctggtgtcatttttaaatatctaagaatcctgtagactgcttccatgtgttcctcagtggggctgtgcatgaattgacttacagcactcactgcaaagccaatatctggccgagtgtgtgagagataaatcaagcgcccgacaagccgctgatatctccccctgtctaccggtgtactttctttctcgataccaagtttcttctgactatccataggagtatcaattggtttgcatccaagcataccggtctccttaagaagatcgagtatgtattttctttgagagactacgattcctttccttgatctagccacttccataccaaggaaatatttcaaatttccaaggtctttaacttcaaactcttctgacaaatacttcttcaaattctgtaactcccccatatcatttccagatagaataatatcatcgacatagactatcaatatggccaatttcccggcatgagatttcttgacaaatagagtatgatcagcctgaccttgtttgtagcccagcttcaggactgcttttgtgaatctatcaaaccaggctcgaggagattgtttaaggccgtacaatgatttttggagtttgcaaacctgattctttgccatactttcttcgaaaccaggtggtatttccatgtagacttcctcttctaggtccccatttagaaacgcattttttatgtccagttgttgcaagcaccaatcttgattgacagccaatgagagaaggatcctgatagtgttcagttttgcaacaggagcaaaagtctcctgatagtctatcccataggattgtgtaaaccttctagctaccaaacgagccttgaatctttcgactgatccatctgctttgtattttatggtgaaaatccacttgcaccccacaggcctcttcccaaccggcaaatctgtgatagtccacgtcccattcttctcaagtgcatcaatctcatcttgtactgccttcttccattctgaaatttttaatgcctcttgtattgtgttgggaacctgagtatcatcaagagaagtagcaaatgctctgtaagatggtgataacccttcatacgtaacataattcccaattggatgatctgtacatctcctaacacccttcctcaatgcaattggcaaagtagaatcatcaatgctgggaattaacacctctccagccctatcctcacctatgttctcttcaggaagacttgaattggagtcaatatattggccacatgttgactgtgatccgtgctctaattcctgtcttttcctcctcctgatgtaaacttgtaagttctcattagcaagttgtggggctataggttgaataggcatgggagactggatggtcacgggagaaggaacatttgtgtgctgggctggctgaactgatggcggcatgggtgtggacaactcagtgggcgcgaattgggaaggatttggtgactctgagtgaaaagaaggtacaccatcaagaaaagactcccaaacttgatgttcattcatgctctccccctgaacatgagatttgggatagaagaagacatgttcaaagaaagagacgtccatggtggtgtaaaatcttttgttggttggagaatagcatttgtaccctttttgggttggagaataccctagaaaaatgcacttatttgctcgaggagcaaatttgctacgattttgaggatacacatgaacgaatgccgtacaaccaaatactttgagtggtaaatcagaagaggcggcatgggtgtgaggaaactgttttaagaaaagttgacgtggggattgaaaggtaagcactctggatggcatacggttaatcaaataggtagctgtgagaatagcttccccccagaaatagtttggaacattagaggaaaacataaggcaccgggcaacctccaagagatgtctattcttgcgttcggccaccccattttgttgtggggtgtcaacgcaagaacttatgtggataatgccatgattttgaagataagcactgagactactagtaaagtattcctttgcattatttgacttgaggacttgtattttggaattgaattgattttgaaccatacgattgaaggtttgaaaaatgtgcccgacctctgacttttctttcataaggaaaacccatgttacccgagtatgatcatcaacgaatgtcacaaaccatcgagtgccagaaatattttttatccgggagggaccccacacatcactatgtactagagagaaaacagtcgaaggtttgtatgggatttgaggatatactgttcgagtatgctttgcaaactgacaaatttcacagtgataagatgctggatttttattgataaataatctgggaaacaattttgcaaggtaaacaaagctaggatgaccaaggcgatagtgtaacattataatctcactatctttattgaccttagaatttgacacagaattgaaagactctgacatactctgagactgtacgcaacttgcttgagagacttggttggagaattggccacatgaaaggaggtagagcccggaacacagttcagcactgccaatcatcttccccgatttcaagtcctgaaaaacacacaagtttggatagaatttagtaacacattggagatcatgagccaatttgctaatggacaaaagattgcaatccaagtttggaacatggaggacagagtcaagatataagtctttagtaagttttatagaacctgtcccggcaatttttgactttgaaccatcagcaatatggacggatgaatgaccattacttggcttgtaattttgaagaatggcagcatctcctgtcatgtgatcagaagcacctgtgtctactatccacggcctcattcctcctcgattagcagtgaaggctacaccggtagtactgccactgccaacttggcttaataatttctgtagcatctccatctgctctttgttgaatggactcggctcgggaacagaggtgctctcagagttggcagccacgtgtgctctgccatctctgtcaaaccgtggctttggtttccaatcagcaggtttgccatgaagcttccagcaagtctccttataatggcctggtttcttacaataatcacaccaaggcctatcccgtttctgacgatctccaccactactattaaatgaccgagccgcaagggcagaggcatccaatgttggggcaggttgctcttttgatcccatcatcactttctttctactttcttcacgtctaacctctgaaaaagcctccctgagacttggcaggggtttaatgcccatgattcggcctctaacatcatccaattccctgtttagtcctaggaagaacttgaacagtctcttttgttccacaatttgcctgtatgttgctgcatcatccgaacatttccatgagtgagtctcaaataagtcaagttgctgccaataccttgtgagtgtgttgtaatactgagtaactgactgctctccttggcggaagtcatgtagagctgattcaacctgaaacagttctgaagtattttcagaacttgagtaagtttctttggctgcatcccatatgtcctttgcagtcccaaacaacaagaaattttcgcctatgtcattgttcatggaattgataagccatgacatgatcatgctgttttcaatcttccacttcctgaaacccggttctgtagtttctggcatgactgcttctccagtgaggtactcatcctttcctttaccgcaaatgaacagcaacacagattgtgaccactgtaaatagttatggccatttaatttgtgtcctgtgatgagaataggagaggaatcattgccaccaaggtttggaatttcagatctgccccctgattctggtgacatgacgctggatacttgtgatgatgccattccgtattttgtcatggaccggaaaggtagaagaacacttttcaaggcacgtgcagggactggagttgagaaaaaatagccgaaggacgccggaaaatctgatcagagggcccgcggaagcaaaagaaccccaaaagaggcacgtgcagggctcggattgcacaaacaggtaggaagggtggctggtcggcgtcaggcgagcctggaggaggaagcgcgtcgccggaaagtggctcacgcgccctcacgcgccggtgcgtgagatgcagtcgccagtcggaaaaacgcgcgtgggcggcgcgtggatgggtttctggttccggtgctttgggacaaattggagatctcctccaggcgctccttgcggtgtagaaaaaaaccgtcgccggaagttcgccggaaaagttcgccggaaaagttcgccggaaaagttcaccggaaaagttcaccggaaaagttgccggcggtgagtgttttctgacgactattcgactgactggaaagtgttttctcccttggctctgagaacagggactgatggccggaatgagagagagagagagagagatgatcggattgagatatggccagaaagatttggccggaatgagtgatggcctgaataagaggtggccagaagggattagggtttcagaaaactggctctgataccatgaagaatttctgaactcctttattgataatgaatcggtacacaccatacacgtatatatacacaaatgactgaataagaaacaatcaatctagcttaattctctcctaaaattaggaaactaaatcataaggaaatatcctaaatgatctctccttttttattcctaaattaaagtcctaactttggcattatttcaacactctccaagtttccccctccccaaagaaagcctctttgtaatttttctaaccttcttgctactaccttgggcattcgaaagagagacatttgataaatgggcatactagccatcgtactctttatgagagtgattctcctgcctttggaaatatattgacgtttccaaagcgcaagtctcctcctcactctctcttccaccccatcctacacagagagagtcttgttaggaacccctaaaggaagtcccaaataagaagaaggcaaagaacccaccttgcaccctaactccactaccatcacatcaacctcttccacctcaccaactgggaagatttcacttttggccaaattgatccttaaacctgacgcggcttcaaaccaaaataaggtccagctcaagtgagttaggtgctctttctttgcttcatagaaaacaattgtatcatcagcaaaaaaaaggtgggaaatattcaaatccgaccttcttccccggattctgcaccctgaaaggaagcccccctcaacagccctcctaatgagagcactcaacacttccattcccataacaaagaggtaaggagatagggggtctccttgacgaagccccttggtactcggaaagaagcttgctggcaccccattaaccaaaactaaaaatttagctatagagatgcatctccacatccattccaaccactttgacccaaaccccatcttttgcataacctttataaaaaactgccaattaatgttgtcatatgctttttcgatattcaatttacatataagccctttctcttttcttttctgccaagaatcaatcaccttgtttgctattagggagacatccaaaatctgtctacccatcacaaaaacattctgatcaggggagaccacttttccaatcactttcctgagcctattagctagcaccttaaccatcaatttctacagcccccctaggcttataggtctaaaatccccaaggtcctcaacccctcctttctttggtattagaaccagaaacgtggtattgaggctctttaaaaaagagctttgttcatggaactccttaaatatttccatgactttctcttttacaaattcccaacagttttgccaaaaagccattgtgaagccattcgggcctggggcgttgtctccattcatatccatcaaagcagagtggacctcttcctcaaagaagggaatctctaggttctcagcttcttggcggcttatttgatctaattgcagcctcccaatatcagcctttcagtttgaatcttttgatagcaattacttcttcctcaaagaagggaatctccaggttctcaacttcttggctgcttatttgatctaattgcagcttatttggccttatacttaccataaccatatctccttctttaaaatcagcaaactttcttttcaaatcaacatgtgctttgtaattctcattgctgatagcaattttccttcgatcatcatcatgtatgtcatttatatgtttgctaaaagcattagcttcaacacttggtcgtgcctacattggtaatggaattaaatcaatagttttctaagaaagtaggccactcatgatctcaagggggttgtgatctacaaatctgtttgttgaactgttgtatgcaacctcaaccattggaagaatctgatctcaattagtaacatgttccctaactaggaaacaaagtagatcacccaaatttcggttcacttctgtttaactgttggtttgagggtgaaaagcaaaggaaaacttcacctttgtgttcagcatcttgcataagcttcttaaaaaataactcataaactttgcatcccacttgaaaacaatagtcttaggcaaaccatgaagtcaaacaatttctttaaagaagagttacgaaacatggaaaacatccaaaagtcattgaacatgggataaagtgcaccattttagagaaacgatctaccatgacaaatatggaatcatgtcccttgaaagtttgtggcaaacggaggacaaagttcatgcttaggtcttgccatggctcatttggcatagggagtggcatgtacaaccctgtatttttcttccaaccctttgatagttggcatgcgcaacatttagaaacattctttttttttttataagtaaaagcaattgtattaagaaagcctgaagtacacctgaaagtatacacgaagtatacaaggcaacaaggccaaaggaagaagaaaaaagcaaaaaaatcccttacttacaacctaaccaatcaacgaaatcgaaaatggaccatgcagtacaatctacatgcaccctaacccaatccgaaaacatgtacaaaaaagaccgtaaaatagcttgatccgctaattcagtatcttcaaagattcttttatttctttccttccataaagtccaaaataaacataaaggggttgcattccacgcattttttcttttctttccaacaaaggtgctgttccaaccaagaatgggttccttgatagaattgggcaaaacccaatgaacaccaaaaagagcaaaaataaggtgccaaatcataactgccttgggacaatgaataagcacatgatttgctgattcttcatccgctttacacaaatagcacctacttggtaagacccaacccctcctttttagttgatccatagttagaattcttccccaaatagcctcccaagcaaaaaagctgactctctttggaacccaaggattccaaactaagcttgaagggaactctctaccaatgcatggaactagggatgagaagaaagacttaactgtaaagaaacctttctttgaaaccctttaaaacatgacatcctcatcaccccttctaagcgcatgaccatgtaacctactgaaaaaagtttccacctcttccatctcccaatcattgttaagtcttgtgaatacagggttccaatgacctaaattcccaaactgatcccataactgagctacccaagcatccctggaggaggcaagagagtacaaacttggaaaaggctcttccaaagaatcctctccacaccacctatccttccaaaatcgcactctactaccatcccccaccttaaaagccacccttttgctaaactctatccacccgttcctaatcgccttccaaagccccactccatgactctcccttgaagcaccagaacaccaacgtccttcttcctctccaaatttccttacaatcacttgtttccataaagaatcttgctcggaagcaaatctccaacaccattttccaagaagagccttattcagcctagaaaggtttctaatacctaagcccccattctttttctccatgcaaacaatagaccaattcaccaaatgcaacttactttgagaagctcctttctcccaaaggaagtctctttgaatcttttccaaccttaggctcaccttgcgaggaatgataaataacgacataaagtaaattgggaggctagaaagagtgctctttaccaaagtcaaccttcctcctttggacaaataccgtctcttccacaaagcgagccgtttttgaaatctctcctccattacatcccaaacctgagatgatttgaaagcagctcccaaaggcagacccaaataacaagagagaagagaacctactttgcagcccaacaccctaaccaagtcctcaaaattaggaaccacccccactagaatcagcttgtttttgtgaagattgatttttagcctttagaaacattcttagctacatcattttttaaacttagccaataaaaagcaacctctgtcattgtagttgttttatctctcctaaaatgaccaattgcccatcgagaatgtagttcccatatcacttgctcccgatgtgatgtgttaggtgagcaaagtgtcactacatgctccaaatgaccctccccatgggcttatataggatgcaggaagcttgtggagacccttagagccatctacacttagctacaagggaagagtgtggaagcttttagagatgcctaacttggctagtaacccttggaccagtgtggggtgttctagagtcttccaaagtcatcttctatatagccttgtacatagactagtgtaggagcatctagaatattcttgatttgtaaggaaccctccaaggttctagagacttcctaagttggctataaataggtgagaccctcgtttggtaccaagcaagtgagcttctaagcacccgtaagcatcctttgagagcaataaagttcccatttcttcaagtgttgcctactacgccttctaaaacttctaagtcgtgtgtatcttaacctaatgagctaagcatcgagggtaagactgacttagcaagatcaattgtcttaacttgtctaagtgccgcatcgagggtaagcttttgaatggaaacaaggttggctgacaattttggtacatggaggacatttttaagaataagggtaggtgtgatgtatatgtttttgaaacctgcaacggtagctaaagagtcattggccactgtaattttcttgttacttgagcttggggtataggtatggaaaagttgagatttggaggtcatatggtctgtggcactggagtctattatccaagagtcatcataaaccctgtgtgagacattgatgcaaaaagagagtgaaggtgtacttgaaagagccaaaaaacaagttctagtaggtttgtcccaacaagcttctcagcttctccatttcttcactattgaacccgcctgttgctgaattttcctcagttttgggttgctctgccatgtgtgcttaagggctttgctaccctccacggtttccccattcatgacttggtggtttaccattcagcttccaacacttctcttctgtgtgccttggtttcttgcaaaaggtgtatcagagattgtccttgttctccttccactgattgtctctacctaagtgtttaggcagatcattctttctttgctttgaatattctgtttttgcaactaggactgatccatccaaggtttgtggttcaagcataacactacttcggctttcctctcctcgaatcagtgccaccacctcattaaagcatggaacctcctgcttgccaagaatctggattctcacttgatcaaattctgggttaagcccaacaagaaaatcatagactctatcttgttcaaacgaaatcctttagaacaacggcatcctcaagacatttggtttttatcaccctataatgatcaagttcttgccacaactttcaattgattgacatattcagtaattattttacttccctgttttgcagcaatcgttttcaccttaacctcatatacttgagccacatctctagcttttgaatacgtctgttggattgcttcccaaatatccttagctgtagccaagaacatacatgtgtcgcatctcaggagttatagaattctgcagccacgccataatcatagaatcttcttcatcccatgcttcaaaatggggatctcctggtttcagccctgtacccataagatggctgatcttccctttccctttcagcacagtgcaaacaagttgagaccatttaaggtaattttttccatctagactatacgcagcctgaatgttttgcaattccccaggttgttgagatcaaacaatcttctccgattgtgctgtagtagttgtctctgcaacctccgacatcttccacgaaaaaacctgatctcttgggaattaaggcagatcgtgaaacaaaaaaaccagtaacaacgaaggttggtaaaagaacacgtgaataaaaaaatctagctatgaaggccaaaaaaatggcgatgaaggccagaatgatgctcaagtcttaaaaatctacagctctgatactataacacgaaatatgggatgaaaaataataagttttatatattagattgactatacacacagtttatataagatattacaagagaagaaataggaaacaagagacataataggaaactaacttattcctaaactaacttattcctaaatcataaaactatctatttacagaaataggaaactaacataataggaaaataattctcctattctatttacagctcaacagccacttgtctctatcatgtctccttttgtaaaatgtatatgttgagtagccgttagtgcagggtaattctagggcaaatatatagggttgtccaacacaaacacaattctcaactaaacaaaggccaagtacgtggggtcactgaaggcattcttttttctgcattttagttcaatgaagggtttttttgttatatacattctgatgtattatatttccaaaggaatgtctaatgaatgctaaatatttttgagaaagaagggtttagtgaatgcaaaatagggcataacatcaatatgtttcaagaaacaataatattttataataagtagagttttgcttctcttcctaccagtaaataataaagaaggccttctctaaaaatctttttagaaatttagaattgctagaacttttctgggtgttgccatgggagttctatactttttaactgagttgatctcttttatattgtttttagatatccagataaagttcatttccatttctttatac

SEQ ID NO: 10897 - DNA, 16962 bp, Vitis vinifera
  Intron number 25 from transcript GSVIVT01018506001 (locus GSVIVG01018506001) derived from phytozome v7.0 (chr-ID chr 16; pos 14200161 to 14217122)
atcaaaaaaacattcaggttagcacctttatgtgtttcattttctgatacagtgtttggttgtacacttaaaattttgggaagtctaacctggtgaaatatttctgtgaaatagactaaaaattatgagttctattttacctttttattgatcgaaagccatttggattatggtttaatgaggtttacaaatggagtgtcatcactacaaccaccagtccatcaaaggtcatttatgttctttcttaaactttattagataggtatttagaatgtagcatctcctgtgagattgactaaaaattatgacttctattttacatttttattgattgaaagtgaagaatttctgaactcctttattgatattaatcggtacacaccatacacatatatatacacaaatgactgaataagaaaaaatcaatctagcttaattctctcctaaaattaggaaactaaatcataaggaaatatcctaaatgatctctccttttttattcctaaattaaagtcctaactttggcattatttcaacactccccctcaagctggagaatatatatcatataatcccagcttgcaagttaagtcttcgaagttaggcctaggtaaagctttggtgaggatgtctgcggtttggtgcttggtaggaacatagtttaatttgaccgtctcactagtcaccttctctgtgataaagtgtctgtcaatctcaacatgcttggtcctgtcatgatgcacggggttctttgctatgcttatagctgcctgattatcacacatcatcagaattggagatgaactcgtttgtcccagttcactaagaaccctttttatccaaatcccttcacagattccctgtgcaagagctctgtactcagcttctgcactacttctggctacaactgattgcttcttactcctccaggtaacaagatttccccagacaaaagaacaatatccggaagtggaccgcctgtcaatgatgtttcctgcccaatccgcatctgagtatacttcagtgtcacggttctctgtctttctgaagaataggcctttccctggtgtcatttttaaatatctaagaatcctgtagactgcttccatgtgttcctcagtggggctgtgcatgaattgacttacagcactcactgcaaagccaatatctggccgagtgtgtgagagataaatcaagcgcccaacaagccgctgatatctccccctgtctaccggtgtactttctttctcgataccaagtttcttctgactatccataggagtatcaattggtttgcatccaagcataccgatctccttaagaagatcgagtatgtattttctttgagagactacgattcccttccttgatctagccacttccataccaaggaaatatttcaaatttccaaggtctttaacttcaaactcttctgacaaatacttcttcaaattctgtaactcccccatatcatttccagatagaataatatcatcgacatagactatcaatatggccaatttcccggcatgagacttcttgacaaatagagtatgatcagcctgaccttgtttgtagcccagcttcaggactgcttttgtgaatctatcaaaccaggctcgaggagattgtttaaggccgtacaatgatttttggagtttgcaaacctgattctttgccatactttcttcgaaaccaggtggtatttccatgtagacttcctcttctaggtccccatttagaaacgcattttttatgtccagttgttgcaagcaccaatcttgattgacagccaatgagagaaggatcttgatagtgttcagttttgcaacaggagcaaaagtctcctgatagtctatcccataggattgtgtaaaccctctagctaccaaacgagccttgaatctttcgactgatccatctgctttgtattttatggtgaaaatccacttgcaccgcacaggcctcttcccaaccggcaaatctgtgatagtccacgtcccattcttctcaagtgcatcaatctcatcttgtactgccttcttccattctgaaatttttaatgcctcttgtattgtgttgggaacctgagtatcatcaagagaagtagcaaatgctctgtaagatggtgataacccttcatacgtaacatagttcccaattggatgatctgtacatttcctaatacccttcctcaatgcaattggcaaagtagaatcatcaatgctgggaattaacacctctccagccctatcctcacctatgttctcttcaggaagacttgaattggagtcaatatattggccacatgttgactgtgatccgtgctctaattcctgtcttttcctcctcctgatgtaaacttgtaagttctcattagcaagttgtggagctataggttgaataggcatgggagattggatggtcacgggagaaggaacatttgtgtgctgggctggctgaactgatggcggcatgggtgtggacaactcagtgggcgcgaattgggaaggatttggtgactctgagtgaaaagaaggtacaccctcaagaaaagactcccaaacttgatgttcattcatgctctccccctgaacatgagatttgggatagaagaagacatgttcaaagaaagagacgtccatggtggtgtaaaatcttttgttggttggagaatagcatttgtaccctttttgggttggagaataccctagaaaaatgcacttatttgctcgaggagcaaatttgctacgattttgaggatacacatgaacgaatgccgtacaaccaaatactttgagtggtaaatcagaagaggcagcatgggtgtgaggaaactgttttaagaaaagttgacgtggggattgaaaggtaagcactctggatggcatacggttaatcaaataggtagctgtgagaatagcttccccccagaaatagtttggaacattagaggaaaacataaggcaccgggcaacctccaagagatgtctattcttgcgttcggccaccccattttgttgtggggtgtcaacgcaagaacttatgtggataatgccatgattttgaagataagtactgagactactagtaaagtattcctttgcattatctgacttgaggacttgtattttggaattgaattgattttgaaccataagattgaaggtttgaaaaatgtgcccgacctctgacttttctttcataaggaaaacccatgttacccgagtatgatcatcaacgaatgtcacaaaccatcgagtgctagaaatattttttatccgggagggaccccacacatcactatgtactagagagaaaacagtcgaaggtttgtatgggatttgaggatatactgttcgagtatgctttgcaaactgacaaatttcacagtgataagatgctggatttttattgataaataatctgggaaacaattttgcaaggtaaacaaagctaggatgacccaggcgatagtgtaacattataatctcactatctttattgaccttagaatttgacacagaattgaaagactctgacatactctgagactgtacgcaacttgcttgagagacttggtttgagaattggccacatgaaaggaggtagagcccggaacacagttcagcactgccaatcatcttccccgatttcaagtcctgaaaaacacacaagtttggatagaatttagtgacacattggagatcatgagccaatttgctaatggacaaaagattacaatccaagtttggaacatggaggacagagtcaagatataagtctttagtaagttttatagaacctgtcccggcaatttttgactttgaaccatcagcaatatggacggatgaatgaccattacttggcttgtaattttgaagaatggcagcatctcctgtcatgtgatcagaagcacctgtgtctactatccacggcctcattcctcctcgattagcagtgaaggctacaccggtagtactgccactgccaacttggcttaataatttctgtagcatctccatctgctctttgttgaatggactcggctcgggaacagatgtgctctcagagttggcagccacatgtgttctgccatctctgtcaaaccgtggctttggtttccaatcagcaggtttgccatgaagcttccagcaagtctccttataatggcctggtttcttacaataatcacaccaaggcctatcccgtttctgacgatctccaccactactattaaatgaccgagcagcaagggcagaggcatccaatgttggggcaggttgctcttttgatcccatcatcactttctttctactttcttcacgcctaacctctgaaaaagcctccctgagacttggcaggggtttaatgcccatgattcggcctctaacatcatccaattccctgtttagtcctaggaagaacttgaacagtctcttttgttccacaatttgcctgtatgttgctgcatcatccgaacatttccatgagtgagtctcaaataagtcaagttgctgccaataccttgtgagtgtgttgtaatactgagtaactgactgctctccttggcggaagtcatgtagagctgattcaacctgaaacagttctgaagtattttcagaacttgagtaagtttctttggctgcatcccatatgtcctttgcagtcccaaacagcaagaaattttcgcctatgtcattgttcatggaattgataagccatgacatgatcatgctgttttcaatcttccacttcctgaaacccggttctgtagtttctggcatgactgcttctccagtgaggtactcatcctttcctttaccgcaaatgaacagcaacacagattgtgaccactgtaaatagttatggccatttaatttgtgtcctgtgatgagaataggagaggaatcattgccaccaaggtttggaatttcagatctgccccctgattctggtgacgtgacgctggatacttgtgatgatgccattccgtattttgtcatggaccggaaaggtaggagaacacttttcaaggcacgtgcagggactggagttgagaaaaaatacccggaggacgccggaaaatttgatcagagggcccgcggaagcaaaagaaccccaaaagaggcacgtgtagggctcggattgcacaaacaggtaggaagggtggctggtcggcgtcaggcgagcctggaggaggaagcgcgtcgccggaaagtggctcacgcgccctcacgcgccggcgcgtgagatgcagtcgccgaccggaaaaacgcgcgtgggcggcgcgtggatgggtttctggttccggtgctttgggacaaattggagatctcctccagacgctccttgcggtgtagaaaaaacccgtcgccggaaagttcgccggaaaagttgccggcggtgagtgttttctgacgacgattcgactgaccggaaagcgttttctcccttggttctgagaacaggtactgatgaccggaatgagagagagagagagagagagagagatgatcggattgagatatggccagagagatttggccggaatgagtgatggcctgaataagagatggccagaagggattagggtttcagaaaactggctctgataccatgaagaatttctgaactcctttattgatattaatcggtacacaccatacacatatatatacacaaatgactgaataagaaaaaatcaatctagcttaattctctcctaaaattaggaaactaaatcataaggaaatatcctaaatgatctctccttttttattcctaaattaaagtcctaactttggcattatttcaacagaaagctatttggattatggtttaatgagctttacaaatggactgtcaccactataaccacctgtccatcgaaggttatttatttatgttctttcttaaactttattaggtaggtatttagaatgtagcatctcccttgcctacttgcctcttgtcacctctttgtcattaattgatctctcatgcttaacctggtgactggtgaccttaattcaatgttttgttgtggcactattcatcttttgttatttcaatgttcacaacttatggttttaacctgtgctgatgctggtagaactgctaacatttgcattactgcttcctgatcatcagagtgatcatagtttctgaatttctgcttgtgctgagattatttgtgatttctttgcacttgtggtgcatggactatttacgccatgatggttacctgattatgatgtatagctaactaatggatttgcttttacttattaccttttcaagcaatttttttgaaataataatcccaatgtaaggattgtagttaggtctgcatgttgatttgtagtgcaacgggttgaataactctattcctttttttaaggtttccttgtttgctctttctttttggagttttcatttcacaagtgtatgtgcatttgggttttaggactgtcttttatggcaaagttttttgaagtggagaaaaaggctttccaagtaaagtttgaaggttccaatgggggaacttggatctcaataacagagaggagttgaggatttgttgtctcagtaggttttggaaaggaggagttggaatggttgtcggagcatttgaagaaagctgtggagttggaggcttccaggggttttattcgaaagactaggggcaagactaggactcatttgatggagatttgtttcaataatagagggagattcatgaaaattacagaatttgttacaaagaggaaacccttaattctagttgttcccaagggtgttaaaggcaatgggtgggaagcccttaggaaggcgatttcttcagtgcaagatttttctgatcaagctgtaagagcctcgaaggagacaattgaagattctcagcgagtaagggcatttacagaggacgtcggtcctatgtagatgtggttgcagaggaaggacctaggaacggagctctgttgctagttggaaaatgggccagagctgtaatttgtgaaagtaaaggaaaagttcaagattgggtttatgtaggaaaagctattacgaggatgatgggtacaaaaggaatggtgtttgtaacccctatttccacttacaaggggtgtttctttgtggattctgcaaggagagctgattggttccaagattaggggagtttaacaatgagaggagggtctatttttctgaggagatggttgctaagagaaaatacggttgtatttggaaaattcagaaggggttgcttagaactaaaaggtcttccttttcatttgtgggatgaagatcaattaagatacattctgaagaagtgggggaaggtaacgaaggtgacacgggattctttgaagcttgtagacttgtcgaaggtaaagttgtgggtgaagatgcttccaaatgtcgtgctacttgcgttgctagaggtggaagatggggcttggtcattcacggttgcagtttcagtcatcggaaaagataaagcaaacgaccttttcaggtctgagtcaacccgtagcaaggacgagttgatgttagcgggaggttgcgtctcttagaagccaaaaaatgctgcaaggctatgtggtatcactagggataatgtgtgctacagctggaggcctcttcctcaatcccgttctcgtttttcaaattcaaatttggcttccaaaagggagaaaggctggggagggaatctcttgggcccaatggtgggaagcaatatcgggcccactaagccagatggcttgttaaaagcctagtctgttaggacccagtttggggtgaaaagttttgggcctcctgctggtccaatctttaatcaagcccacgagacagaagcaaggtcttctaagggcgcccctgtagcgcttttgtcctcaaagctccagtgctcagaatcttctgcaaaggaggtcttgtcgattgtacactctcaagagtcgtcaaagataaaaggcccctcaatcatcgcaaggcgcaaagcaagaagccggcctccgtgccttaaggtgtcaccttttgcaccaaaacgtaaactagatgggggtgttttagcggaagcaaatctagccatttttcaaggcaattcagtcttcaatcagggtattatttctcctattccaaaaatttcccaagattttaccgtggagacaaaggaggacgaagggctttcgtgttgttgtttggcaaacaaggtgtgtcttcctttcttagcttcctttgagaagggccatcctttggctggggcttttgttccaaaatctcttcccgtctcatctatttctgcttttcactcttttcagtgctagcccatttctttgattccactggagtcaaactttgtttctcagtttgttcccttttcgaattttcctgctgatgagtttagtcgtcttgttggcgtgcccatttcggaaggtatggcgtcccccttagaagcctctaaccaaaattttaaagactgttctttccttagggaaccacttagtagcccaaaggagctttgcgtctcaggtacggtttcgtccccagagctagaacctcccaccctcccattggaaggttttcagattgagggcctcacacccaggaagatggtcaaggtttagttggttttggaaagttttaaggattagaattgtcaaagataatggaaaaggtgtggcaatagagagtaggagtactgtttctacggacaaggtctatttcaaaaggaagagaaagattttttgtggaatctagggagaggcttaggtccggttgcagtttgtgctgggtttttttgtttacatgaagatcttaagttggaatacaagagggttaggttccaagaagaaaaggaggattgtcagaagttttttaagttctcaaaattcagttgttgtgatgcctcaggaaacaaagagagaaatttgggataggaggtttgtgagtagtgtttggaagggaagaagcatagagtgggttgctcttcctgtttgtggggcttcagaggggattgtgattatgtgggattcaaataagttaaagtgtacagagaaggtgttagggtctttctctgtaattgtaaagctgaattctggtgaggaagggtctttttggttaactttagtgtatggcccaaataagcctttgtggaggagggatttttggttggagcttcaagacctgtatggtctgactttcccaatgtggtgtgtaagaggggactttaatgtaattaggaggatctctaagaaactgggtgattccaggttaacattcaacatgaggtgttttgacgagtttataaaggagagtggtttgttggatcctccctctaagaaatgcagcttttacttgatcaaacatgcaaattgctcctatttgcaagaggttggatagatttttgttttcttctgaatgggattcttttttctctcaaagtcttcaagaggcgcttcctagatggaccttagatcataacccaatttgtttggaaactaatcctttaaaatggggtccgactcctttcaggtttgagaatatgtggttgctccatcctgagtttaaggagaattttagtgattggtggcaagagtgtacggttaaaggttgggaaggtcacaagttcatgaggaaattaaagtttgttaaatcaaagttgaaagactggaataaagtggcctttggagatttaagagaggaaaattttcattctttcggacttaggtagaattgatctaattgaacaaaaagggaacttgaatcttgatttgttatcagaaaggaccttaagaagaagggagttagaggatttgttattaaaggaagaggttcattggagacaaaaatctaaggtcaagtggataaaagaagggcattgcaattctaatttttttcatagaatggccaatggaaggcgaagcaggaagttcattaagtttttgatctctgagaggggggtgactttaagcaacattgagatcatctcaaaggatattgtaaatttctttggtaaactctactccaaacccaaaggtgcttcttagagggttgaagggttagattgggttcctacttttggagagtgtggtttggctggatgggcctattttctgaagaggaggtacgattggtagttttccaattgaataaggaaaaggcccttggtcctgatggttttactattgtagaatatcaagagtgttggaatgtgatcaaagaggacctcatgagggtgtttctagagttccacaccaataggataataaatcgaagtacaaatgcgaccttcattgcttcggtgcctaagaaaagccaaacctttaaaatttcagattttagaccaattagcttggttacaagtttatataagataattgctaaggtcttatcagggcgtttacgcaatgtcctccatgaaacaatctttggctctcaaggagcctttgttaaagggagacacattctggatgctatgttgatggccaatgaagtggtggatgtgaaaagaaggtcaggggaggaaggagtggtcttcaaaatcaattttgagaaggcctatgatcatgtggattggggctttttagatcatgtgctagaaaggaagggcttcagcccaaaatggagatcttggatgaggggttgtttgtcttcatcaagttttacaatcctagttaatgggaatgcaaagagtcgggttaaggcctctagaggtttgagacaaggagaccccctttctcctttcctttttacttcagtagcagatgttctaagtaggttgatgatcaaagcggaggaaactgggctaactgagggcttctttgtgggaagggataggactagagtgtctttgctacagtttgcagatgacaccatctttttctctaaagcctctctggaacatcttcaaaacctcaagattatccttttggtttttaggcaagtattaggattaaaaatcaacttagaaaaaagcaccatttcaagtattaattcaaggcaggagttgttgtctagtttggcctcggttttttattgcagagtatcagagtggcctttgtcttatttaggtcttccattgggagggaacccaaagacaataagcttttgggatccggtggttgagagaatatcgaggaggctggatggttagaaaaaggtctttttgtctttgggagggaagattacttttatttagtcaagtctgtctcacattcctagctacttcttctccctcttcaaaatcccagtatcaatagcctcaaagattgagaagctgcaaaggggttttctttggtctagggcgggggaagggaagaaagatcatcttatcagatgggatgttgtttgtaggccaaaagagttgggaggtttgggtttcaggaagacttctttgagaaatattgctctcttagggaaatggctttggaggatccctagagaaaggaatggtctttggcataaggttattgcgagtatttatgggatacatcctaatggatgggacgccaacatggtggttagatggccacacagatgtccttggaaggctattgctcaagttttccaggatttctccccttttgtccgcctagtggtgggaaatggggagagaatccgtttttaggaagatctttggtggggtaaccaaactttgtgctctcaatttgctggtctttatagagttatttatgtgaaaaacctcactcaatgtccttggcaattcctttccactgtcttggaattttaatttttatcgtaatcttactgatatagaaattgatctccttcagagaatcatgtcctcccttagttcagtgtttttctctccttctttggcaaattcaagagtttagtctttgtcatcatcaagcttgtttttaatgaaattttttttcttggccttgtcaaaattctcaaatcctatcttgttccttctggccaaatttttgtggagttcaaaagccccctcaaaggttaaggcccccgcttggttagtagtacatgggaaggtaaacaccaatgacaagttgcaattgagaagaccctacaaatccgtctgtcctcaatggtgcattctttgcaaaagaaatggagaatcgatcgaccacctttttcttcattgtcctattaccattggactttggtacaagttgttcaatctagcggggttggcttgggtccctccaaggagtattgtggacatgatggttattgcttttaaaggtttggggaattcattaagaggcaagacactttggcaaatcgcttgcctcactttgttatggctggtgtggcaagagagaaacaataggatttttgagaataaaggaagaacggaagagatgtcatgggacttgcttcttttctattcctctctttgggcctcttgtactgcagcttttagcggagttcctcttagtgttatacaactcaactggactacggtttgcatttcaaaagtttgaaagtgttggggtttttctttgtatttagttttctaaagttgggtgttttctcttttgttcaatttttgtttttgtgggaaggacctctcatccttttcttgtttcttctctttctcttgtatctcttccttctcttgtatcttttcttcttttaatatatttttctttgtttctgataaaaaaaaaaaaaaaactctattccttcaaccgttcctcccctccccattctttctttctttctttctttgtgtttgtgtgtttgaaataatgggccattataagccctaatgaacttggataccacttgacaggctcttgtcttctacttccctaattcttttctatctcattctcaacacaacccttggtttcctgagttgggcgttaagggctcgggtggaaggatgtttatttgaactttcttctatgtttttagcatctgtgttggatctcttttgacttgtttccctagatttaatatttttaacatattcctttatcatcattttagtagtttttcccttttcaagaatcttaagatttttaatccaccatttcaagaccctctagtcttaacaagcctgtatttaagtaattgggattgttattgacattgtggaaaaatttttggccacaggccacctctttgaaattgggagagtggttttgctttctgtataacttagatttttgggagtttactgctattttcatggattagttttatacaatccataatgttcaataagttatttcatcatcattttatttttgtgaactagatggcagaaagtagatcaaactctatagggatgataccatatcgtcggattcttttttaccatcctagtagaataactggtttggtgaatggagcttgtttgaatggtttgttgtgtatctttctctataaaattcagcttctattctctttcttccttttgacttctcattcccattggtagcatctccactttcccaagttatttaaatcatgtgtgcagccttgtgctgtttgggaccattggttttcatttttatctttgatgcttgagatggcagcttagttagctgatgttacctactggccgtttttctaaacatagaaaattagtcgtcattcatattgaaacagaactgatgcttgaacattttatttcttatttcaaattaggaaaaaaaaaactaaataatcttataaatgatagtatgaccagttttaatcaattttaatgagtttcggtgagtctcataactcccctgtttcttgatatttcttcttttcaaggaacaactcacctgcaaaaccaattgttgaaccataatgacaaccaattgatgctaagctcaatatcatagcaacaaactaacttagattttttttttttttaaataggtaaagatgggtaagtataaacaaaccaactatagatttgtcaataaaccaactctagcatttgagatatgttactgccaacttacaaacattttttctttgcctattagttaatgttccctgaattttgtatagattgcttgatagaagttaaattctgttaagttagattttatggagtaagagttatcttttcattcactgaatgagaaacaaaattcactagttctctatatcccatgagatctggattcattattttaaatattgcctcaaaaaaagggaagttaatggaaggaataagaataattattaatggttgtcaaatttcgtgatctggaataaagcttatcacttgtccaaatgtgcaatctttattgcagattgctagcatgttagcaagttgtgataactgatttaatgtgcctgcctcagttggagaaacatctaacagagttgcctttaggtaaatgatttaaaggttgatcaatttaaatatcacttggtgaactaagttgattgtttgtgatttaaaccaaatgggaggcttggggatctggattgtatcctcaatggatgcttttctttgccctttgtttcatcacgttggctagattcctcaccatattggatttatttggttgatgtctccagcatgattttgcaaacagtacaattgtttgctaaatgaaagatttgtttctgttcaatcttttggttcatcttgatagaccaaataaaaaggaaccttttctgggggcacaaatccaaacaatgcaagggtatagagttttgacatggtagcagttcagttttcttttttgattgaatttagagggtacaattggctgaatttctgaggcatggatttccaaggtctatgcttaagtttcttataggacgactttgtttgctatagtgacctaccttgaagttttcctcacatgtatattcattataataatagatattgggcttttaattgaataatgttaagacgttttgtttcttactcacgactgccatagccagcacatacatttttaccagcattctctgtttagatcaatccaaataccagtctcacctttatcctcatcattatccttgccatcaccagtaaatcttctggcactacaatttctatcaccaccttttattgctgacaacagttgatctgactaccaatgccactactttaaactccattttttatccctttctttcatccttatgaccttatctaatcctccattgcacattcccgtagattacacccttgtactctctcataatctatcacttcaccatctacagatcagctttagagtgcgtttggtggtgattttaggaagtgtttctagtcttttttatacttgaaagataaaaaatttgaagtgttaaaaaggctagaaacactttctaaaatcactgccaaacgcactcttagtagtttaagcaatagccataaggttgaagccaaacagcaccatgatggtaagatgatcccactaaggagaaaaacgtgagagctaacagattgaggtaaagcaactgtatggtgtcattgttggctatcattggtataaactagtcttggaagaagaatatttgggattcagccagcaaaagaaagcagaactagttgtctagtttgaagagcattcctggatttcaagtcaccaaaccatgtttgaattgggcatggatgctttaggtgagaaactgtttgttttcaaaaatgaattgagcaaaggtagtttgttctgttagctcactctcagaagttcaaatagtgggtcccatactccacttacaagatcatgtatataaataccaagctatgttgggcaatgaagaccattcttgtccagctatacactgtttttatgtttccccaacaattctactgggtagtataaccataagatccttataagtagagcatacattgaacatcaaatattcattatgacatataacatatgattttcactctcttgtgaacttagggcatttcagttgcaggttgctcttggaatggggtggcctgtctcaaggctgtttctaacaatattgccaaagttagtttgcttatcaaaatatattggtcaattccttcaggtctacagtttgatgcatctagttacactgctgttccttaatagcagcatgtggagtggtaaagcatgcaccttataggtgagaaagcctcccatgtattacttgtcactactacaattaggtaaggaaaaatgaaaaaggaaaaggaaatgaagaatggagaataaggttctatttggcaatgtttttcaagacagttttttaaaaatagtttttgagaaaaattcttaaaaatagttttcgagaaaagttcttaaaaatagttttcaggaatataattctgtttaggaactcaaatatgaaaaacaatgttctcaacatttactctgaaaatgttttgcacttatctgcaatgtaaaattttgtaaaagcattcttcaaatttgcaattgtttctcagaatactctacaaaaaacacttaaaaatacttcaaatttgttctaaaaaataatgtgttttcaaaacaatttatgaaaaaactgtttttagtaacaaatttatcaaacagtttttaagctagaaaactgttttctatttgaaataacagaaaattgttttctagaacatttcccgaacaagccctaaggcactgctactaaatagtactagatgtttttcctttttctcttcttgatgggggaattggagatttgtagggtgtacaaataatgatggtcctttcttctttccttttctctcctccctttttatttgtttgcctcttttcttcttcttcttcataccttttgtatttttaagttgtaagtggaatgtattgtcatgtaaacttcttgttgctcagcagttggggagggatggggaagtggagggacttcgtgactcctcggaagtttttctctttgattctaataaattgaaagattttatgtgagtaggcggcatgaggatttagttctttgaattttgttttaatattttacatgtaccccatctacagatattctatt

SEQ ID NO: 10898 - DNA, 5888 bp, Vitis vinifera
  Intron number 1 from transcript GSVIVT01028569001 (locus G SVIVG01028569001) derived from phytozome v7.0 (chr-ID chr7 ; pos 10001441 to 10007328)
ctcaggtctgtttgcattttttctctatcctccctttcggtttggggtattttatatatatatttctattttttttcttttttctatgaatgcctatttttatttattttttgttgtagatggatgcattttatctatgatatatgtaaaccgtagaaaaagtaaattagaaaaatatctgcaaaaaataaatctttttattctaaaaagattaattttttttaatgcatgttatacaatttcataaaagagcaataaatttgaatatttctattgaggtacaactatgaaggaagcttaattatgatagtatttgtgatttttattttaggtcaatgaataattttaggggtgaataattaagggaattaaataagagaaattcaagggagtagttgtatgagttcttttatttaaataactttaagtttgaatgtattttttatcaaagaaatattttgtcaagttgtttcttgcggggtttcctcatagaagtgagattgttcttgtcttagtgtcaatctcttctctatttttatcaattggtattagagtttgattgtgatgcttttgatatcgttgagggaatgaaatctcatggtgccaaaggaatggaggagagagtattcgactcttaaagggaaagtttagaaaaacaagcgaaggcactacaaggactcaaggagttgattactaaaataaacataaagtatgatcatcttgctttgaagatgatgggcactaccaatgaaatagcgtaatcagcttagaatgatcaaaacctagcacaatcaagtaatacaatgacctttatcatattaaaaaagattagttttctaaagtttgacgacgaggatccaaaaagatagatatgtagatgtaaacattttttcaattttgaccaaatatttgacatacaaaatgtgcatataaaagcaatccatatagaagagaaatttattcgttagtatcaatggtttacaaaaatgtatgtagaaccataacgggaaagtttccataggttgtttatgctccaattttgttcgattacatatgaaaatgccttaggggaaatgacctatataatgtttgtcaagttgtatcataataggtttgaagaattagctaattgaactcaagacttgtccgaatctttcttagttagttgttttgttagcggcttagaggatgaagttgaagttggagtaagaatgtttcacctaaattcaatgactcaagagattggcttgaaacaacggtaagaggaaccttagaggatttgatgcaagttaaagactgtaagccaagtgacacttagagcaagtagaggtaagtcgtatccaccaagtactacctctatgcttattaaaaggttgacaaaattgacacgttatatttgttgcataaatactaaagcctgaggatggtagtaatcattgttaagaaaattcacagataggaacactatgacttctagtatgagttgtcatcctataggactaacactaatgtgttttagctatttatgttaaaaagattaattgtttgttgaaactaaataaaaacctaatttaaaataaataaaaataagagtatgaaagaagattttctaaaatatttaatgaattaaacaaaacaaaaggaagatattcaaagagtttagccatctaatgttaatttcataaaatgagagaacaatttatgatgtagggtttaaggtcaaagtctatatgagatccaattgactcttaagcctaattcacatccaaaactagaattttgacttttgaaaacaaatttgtagatttacttgttagagtaattcacaatagattaaatcaagttaactagtgatcaaagtattcccaagcatctccaggcagtaaccatctactatgcttattctaagttgaactacatagaggatctctttcaagtaatttaatcatatataaaacataaacaaactaatcaaagttgcccttgatactcattttttgagttcttcaccttcaccctaccttcgctagatcacattgaatcaaccaaatataatgagggatttatcttcacaacttatgtttggttggtaagaaaataaaccaaaaacaacatgaaaaatagaaactttatttaagaaactaaagaaaaacaaagtgtatggatgtctttcctctttttccttatctatatggaatatattagcaaaaacgcacacaacatcaacatcagagtaatacaacttaaaccacctttgacatcatattggaactgatatggaatgctctcaatatcaaaattccactaggaaagaatgatttttaggtggtatcggatgtctatctgagtgaagatacataatttataacaagacatgaagctattgctagaaaactatatcaaaatttcattatcgaaattggtatcaattcatccaatctaaaaattgaccatagaccttccaatacttggtacaaagccttgtcaaacttcacctttcaaaacaataacatgtttaaggtactattggttccaatatcaatttctcacttctattattaaaatttccaataaaactaattacccttctttatttcattttcaccaatcctcttacaccttccacatcctttttcattaattctttaagaattaaaagccaagaatgagagtccatggtgtaaaattgagattttcaccatgatattaaaatatctaataaaccaagcatttaatgtcagttgttttaataaaagtctttaagttattttcaaaattctccgatgttggaatgcaaactgatagagcattatgacataagaatattcttatacaaaattgttagacaaattaagtttctccaacctatggtaatcaccctagagggggaatgaatagggtgatgatctctttttgcaaatcaaattatgtgaatgcaagagacaattatatgcaaatatataataaaacaatataaaagcaattgcatataaattaaaagaatatggaagagagaatgcaaacacaagatttttatagtggttcgacgtaacccgacctacgtctactctcctctagcttcaatcccaagcttgaggttcaactatttcaaggcttccaaaccaagccttcaagaaatacaattggattatggttcctatctacccacttgaacttttgtctccaaacaccctttataatcctcaagagatatcccacttttgaacaacctctcaagtgataccccacatttgagaatcactaaatgatacctcacacttagattcttcctctcaaagatatacaaataatttcacaaaatcctagtacaaaactttaggctcaaatgatacaagaaaactaggattgaatggtgcactaatgatatgcaagttttagaacaatgttgcactcaaaaatactctcccaaggctcaaatatatctaagaaagatttaggaatgttaaactcatgaaacaatgaagattggagcctttttatagaagaaaacgatcaaatttgccgttgggggttcgactggttgactagctattagcatttaatgcttagcaggtgaccgttggacctcgaccaccccttgaccgaaccttgatcgattgaggtgggggtcgacgaattgaggctcaaccttggccggttgaacaaccattctggaagagagagaaggttctttgcacttttcgactagttgagctgagggtcgaccggttcctcatccagttcaactggttgagccgtttttagctcaaaaaccaactttttcaactcaaaaccttttaaacaagtttagaaaacatttgacacaaggttttagttcaaaacatgaaatcatccaattttaaaatatttaaaacaaaataacccttggatgattttggtgtataaataaaaaatgtaatgcatgaaaatcctagtgcaccaacaaccttataaagagattttatgaaggttgggtcttgaaaaacacttctctttgaagtcttcttcttcttcatgatttctctttgacttgatttgtctttgtgattgccactttggaaatcattttgcctaatcacacttgaaataaaatcattagttctaaaccttatttttttatcatcaaaatttagattaaccaaaccttggtttcataaaaatgtttcgaaaccactccgctatcaacactagtattagacatagtatcagattgaagatttcaaactcacattatattttcctaagccttatactaaaacagtatattagaaatggtgtcaaaattggataccaaaagtgataataagtatttctattttttccttcttgttttcatatccaaaccatgattttccaattgttttttcatttttccacttcttcatcccttgcattgcaacatcaagtctaccttactcttgactattgcttctaccaatctcgtgaaatctttgtttctttggaacttgcttaattcttttttattctctttttgttgtattctttattagattaattcattagttttaaaattggagatacctgatattcaagctaagaaggaccaattaacactcaaaatgccttttaaacttatactttaagttttaaaatatctcaactttagtattaatcaacaatctaaattgaatcaaaaaggaaaaaagaatctatgatattattgtgttataaaccaggtcatagattcatgaaaagaaaattgttcatgatagttgaagatgaaaaggataagttgaatgaaggtggcaatcaattagatgaagaagaaaacaaagaagaagttgagatttagtggacaacttaagtggatagaggaatccataccaaattctgacaaagaatttattattaagtacaatgcattgggtgttggagtcaaagaagtgctttcctaagaaggtcgatctatcgcattcataagtaaaacttttttaaaaaaactcatggtttatctaattatgaaaaagaaatgcttgctattatttatgttgttgaaaagtgccatctatacttgtttgagaggtatttgaagattaaaattgataacttcaattttaaatatttttaagaacaatgactcatcatctttaatcaataaaaatggttgatgaaactattaggttgtgattatgatctattatagtggtaggaaaaacaagatagtttttgctctatctcacatatcgtaggagaaaagtagtttattggcttttacaataataataattgactagtttccaaaattagaaaaagtaaggataaggtcattgacattcaagatctaacttcttctctataagtagattaagaattgaaggcaagctaagcatatatttatgagttgctatgttaccaagtctatttagtataaggaattcactagatattaaaaaacaatttttttcacgacttccatgatagcccaataggcagccatttgggctgtacaccatattatgaagcatatagctaatcttattattattttgtttggaagggcaggaaatgagatatctataagtacatctaagaatgtgatgtgtgctaatataacaaaataacaacaatagcaatacttggtttattacaaccactttccattccatattgacttgatatgtattattagtacattacctaaagactttattctaatgtacatgcaaaatgaccatgatatctttaaatgttcttgtatgcacctctatccattaattattaagccaccaactagtcgaggttttgcatgaaagcttcatactcaatgtataaatattaatcatgaaattaatgagtaatgtttggtttttatgactttgcatgaaagctcagctagttgagaaagatcctgaaacagccatagtatt

SEQ ID NO: 10899 - DNA, 3945 bp, Vitis vinifera
  Intron number 2 from transcript GSVIVT01010141001 (locus G SVIVG01010141001) derived from phytozome v7.0 (chr-ID chr1 ; pos 16264514 to 16268458 reverse strand)
tgtttcatctatccacttttttcctcactcatcatgtttatttatgatgttctatgtgatgtttcatctatctactttcttcacacttatcatgtttatttatctgtgatgtttcatctatctactttcttcacacttctcatgtttatttatgatgttttatgtctctactttgttccacactcatattgttttcaggctcttcattctttgtccaccatagagaggtatgacaaatgcataagatctaccctcagaaagtttgatttggtgaaggatgcaactttcaaaatggtaaaaattccgctgccatacttgttaaggttatactgtggagattatttatttgtatttaaaatgctaatgttagttatgtaccacatgccagtcttgcgaatgttgtttatgtttaaaatgctaattattagttatgtaccaagcaccaatcatgcttatctaatttctttaagtagccaggttgcatcttgcctgaatgtatgtccttgataattggtaccaatgattttgctacaaaacgtattttactgcttactatgtatttcaggagaaaaatatgattctagagaatgcaagaaagaaataaaatgtgaaaacataaaaattatgcaccttctatgtccagaattattttggtcattccattttttttttttttttgatcggaaacgaagaaaaatatattaaaagaagaaaagatacaagagaaggaagagatacaagagaaagagaagaaacaagagaaggatgagaggtcctttccacaaaaacaaaaactgaacaaaagagaaaacacccaactttagaacttctaagcattacctaaaggctctcttatgtccatttattaaaacttctaagctaggagtgcatataaggttgcttacattagttcacaatgtgaaggattagcagtttgatcagattgttgactgcaaaagttaatttcatatgacatgttatggtgtttgacaagtctaggatgcttgtctacaatcatataaggtgtgctaggatttcaattttgtttttaaggatttaaggagaggaaatggtggactaaaattatgatggaagggaaaataaaataaaatattttattaaaaaaaaaaaagataaaaaggaaaagataggaaactttagagtctcctttgggtcttttaggagtctcacctagaaaaaaaacaatagaatctcatctaaaagaaaaataatgaattctcactattgcaaattataacttacacaaaaaacttaataccatcaatagcattttacaataattagccttatttataggttttggaaaaccttaaaaactaaataaaatcatgaagataggaaataaacccctatatagtaatttatgaggactcttacttgtggaaatctgacaattttgaaatcccctccaatgcactaagggtcatctcacaacccctcgatggctcctaactcagctaaaagactctctctatccctccttaaaagaggctcgtatactcttgtaaaaacgtagcccatgccatcctcacatttttcaaatgacatgaaatcgtgaactcacccacttccatgccaccactttccaacaccttattatcatagaagaccaagatccctttgataatgcccctaacattcacatcaccccactttaagaatctgcccactccaaagcttctcactcactccgacaacatctttttgattttgtttcttccaggcagacaaaattcgcctttggcaatcaaatcatagattcaatcaccttcctcttatcactatcattttcccctctcacattccggaatagaattcttaacttcgttttcataccgctgtgagctcccatctaaccctactgtttccactcctttttcttaggcaaatcaagttacttaataacctttgtgatagggttaggtatggaaatccaaagtgcacatacctccctagtcaacgaagaaaaggggggtgggggtgttgaaggggtctgaatagaaagttagagagagagagaggaggggagagggagagctagaaagggggaagaggagaagagatagggagagagtgggagaaagagagggggggggggggagaagagagagagagagggatggaggacttataagattcttataggggattggaatagggttaaagagagagagaaacaaagagagaggggggggggggaagagagagagagagagagggatggaggacctataagattcttagtaccaatgaacttccccaactgatccaaaataaaaaaagaaaaaaatatcaaaaagctcttagacccatcactcctaacagaagcttatttgtatgtactaatggtgaattgttaaccacttcttccactattccccaacttttgtggagctgtgctaaaagttgttttctattgttgggatcctatgggtagctctccctataagccattcttattctccggaatcaatactaaggcactgatttatatgtaaatggacttctaatttttgtattaacactcacctcatttaaccttggttgctttatatcttcatattggtgaaatgcctttttgtatgttgtttgttgggttattcagagtccatattaggcaattacaatgttttaaaaaccattatgggttggccggtacaactggtcaaaccatcaaatggacctaaatctggtttggttcacttaattgggccataatagaattgaacctgcatttaatcagtccactcagctgtccaaccgctaaatcggtggactaacttggttggttcatcaattaaaacacctttttttttttacaactcacatcatgggcctaattgaaacaatctttttaatttttttccaaaattcatactactggcccaacattcatgggcctagtaacaccatccatataaactggtcaatattctcatgaatgcccttttatagtttgcttttgtagctttggcttactgaaattctgatgtgggattcactatttttactgccaaaagccatccacaagggagtgggcgagattgaggctgagtctttggtgagaaaaagtcaaaaagttagatgcaccaagtcaacattctttaattaaaaaacatatatatatgttttatagatataattatgatttatcaatatgaataattatgattgaccaatatattataggataataaatatataaataatgtaaataaaataattaataaaattgaaaattataaaatctatagttattaaaatttaatgactttaaataataaaatcttattttaccttaataattaaaatttaaaggtatttaataaaatcagaaatattaataatttaataaatcttcttgttatccttatcataatttaagctattagtattaatgttacaatgataaaatgtatttaaaattttaattatttatatttttttcgaatatcttataattatttttaatattactaatataaattatacatcgggatgttactgatttgacagtggttcaaccatcgatttgaccattgaaccatgaattggtaacttttctgtttgctttgccttgtaataattgcttcacctcatctactaccatcatcatttccccttcaaactagagacatttaaaagaagcttttggatatctagtcattattcatgattgacacacccttccatttttgaaacatgattttgtaggtatacatgaaggcttcctcactgagtgaaaagggtattgaggctgacctaatggagctggtatctctctctcctgggaatttttcatccttaaagttttagctttcaattgtgcttttgtggggaatgcacttattattttttattaaatccttgattggagactgaatttcagctgactgtttttacttcctctattttaaggagact

SEQ ID NO: 10900 - DNA, 5741 bp, Vitis vinifera
  Intron number 1 from transcript GSVIVT01017399001 (locus G SVIVG01017399001) derived from phytozome v7.0 (chr-ID chr9 ; pos 7943255 to 7948995)
attacgcaacaacaaagtttcttggaagacaattggtaccaatatgaaaatgtcaaattctggttactaaatgtctccctattccttccttttgaagaacttcaccatctaaacttgtctgcaaactcatttgatgggtttattgagaatgaaggtatgttacctctcacctttaaaatttcatttcacttatactccaaacattctaaaggaactactagcatatgttcttaaaagtgttcaggtggagaccaaatggtcactagtaactattgaatttaatataagaacaattactaattattaaaatttataatgtaaattaacatttaaacagaacaataaaaaaattattattttagaaaactatagattacattagccttatatatataagcatacttgttatttatgccatcatttcacactcaacccaataagtgggattcaactaagagtgagcaatttcacaattattaattaacaggaacacttagtctcccatatccttatcctttttgttgaattgtctttccttatcttccattcctaaaaagcttgatttctatattctaaattgataaagattggttaaagaaaggtgatcacaaaatttgactattgctgtcaaataaggaatcaccatcttcaaagtttcacatttacaaaaaaaaaaaaaaaaaaaaaaaaaaaaaaaaaaaaccctagccttgggtaaggtccaagccttattgttttaagctgatgtcgggttggtttaataataaacaaaaaaaatcctaacccatgaccatctacgcatttccaaattccacccatccacaacccattaatatgacattttcaaggacaaaatttaatcaattaaacctattagatggattctccatacaatgttaaaatgaatataaaaactttaattcaaaaaataatttcctttatttagttaggattcaaattataggggcacaaaacatgaaaattttcatgtttaaaattcacaaagatcacaaaagctctttgaagctctatggacttttttatttctaacatttaaacacaaaaatcaccatatttaattagagatttggatacatattcttatattaaagacatgtaagcttacatatttaaatatgaagatctcaacttgtaattacatgcttctaattaaagttatattactctattttataggatttaaagggttatcaagtttaaagaaattggagatcttagacataagtggtaatgagtttgaaaaaagtgtcttaaaatctttggacacaataacatcactcaagacattggctatttgcagcatgggactgaatgaatctttttccattcgaggcatgttatatgtccacattgtttctttgaaattaagtaaaatatatttctaacttttaatgttccttagttaatctctcttttgattcatgtttgttgcagaattagctagtttgagaaatttggaagtgttggatctaagctataatgatttggaaagctttcaactattgcaaggtacttcattaacttgctaaaaaaacttatgatattttgttattaaattaaaggtaagattaacaaacaatttcttctcattagttacttttctttgtaatatcattaaatttgatataaagtagtctaaatcatcctttcaatttataagttttaattaaaacgcatcaagcatgcacaagatgtttaatataactaatattttcataagtaattgaatttttttatatgaattaattaacttgattatcaataaatacttacatgtataagattaatatagtttcataagtattttaaaattgtcttacaacacacacacacacacacacaaggaaaatgaaaggtatgtgatatctttatgctatgtttggttcccaaaaaaattgagggaaaatgaaaggagaaaaaagtagagacgaaaagtaaaagaaaagaaaaaaagtaaagaaaaatataaaattgattaaagtaaatacattatttttatatgttactttaacttgtttcacttattttaattcttcaatgtaaagatgaaagatttgaaaatgcataagtttctaattattttttattttattttatagtttttacaatacaaccaaacataataaaatcattttctttaattttttttcttttcttaatacttttcacgaaccctttaagttatgtttgtttgcagaaaatatgaggaatagaaaatagaaaagaaaattagaaggaaagaaaaagtgaagtaaaataaaaataaatttaaatttaataaattatttgtatatgctactttaaacttatttcacttattttaaattatttaaactcatttctaataaataataatggaaattgtagagaagtttgtgttattcaagctttgcaatgactttacaaggtgaaggaaaatattcttgctgaaattgaaaaaagaaataccttcttaaatagcctattgaccgaaaacacattaccctaacatatacacacacctttattatttatacaatcatttaatacttaatccagttagtgggattctagtggttgtttttatcttggtttccaatatttctgattgatagtgttcgattaatgaaatatcataaattttgaccctaataaggaccaatccctattaaatgtaattgggttgacctaagactaaatgttagatccaactaataaaaacccatctatttgttggagtgtaaataacccggccttaggtagggcccatgccttattattttaagatgtagtccaactggtttgacactagattgagtaaagcccaacttatgagcatctatgcatttccatccatccacaacctactggcatggacaaactttggtcaattaaacctattataactgcatacaaaattttaagttcaaaagataattttccttatttagttaggattcatattaaaaaggcacaaagcacgaattttcatgtttaaattcacaaatatcacaaaagctccttcaagctctatggaccattttatttgtaacattatattactcttaattatcaaattaaccaacaaattcttctcattagttatttttctttagtaatgtcataaaatttgatataaagtagtattggtcatcatttcaaattttaggttccaattagatgtatcaagcatgtgtaccatatttgatataactaatatttttataagtaattgaatttttttttctataaatcaattaatttgattatcaatgaatactttcatacatgatattgatgtagtttcataaatattttaaaatagtcatagaagtcttttatctgattcactagaaagaaaaataaactattctaatgaaaagacttgatgatttgaagtgattgcttttgattttatttgattgctaccattattaattgttagaaattggcaacaaatacccattttgcatcacttctatatgcatcgggggaatgaattatatttcatagagctaatagggcaaaactcaaacttttggaattatggaaaaggttgctagaaagctaattaaccatttatattatgattaagactagttgggttagaaataattcatatggagattaaaaaaaactatgtaatttagtttagtagcttgggtgctattgtaatgattaatgatctgcaacttgaacacatctactagtgctttctacttgtatagctaaatttatgttaccactttgaactacagtacttacatgagaagaaagtttttccttagtgataatgcaaaagaaattaagtatcaatttttgttaaactaacaagtgatagtttagatatggtttgaatacacttcctttcttctatatttttattttgaaaaaaaaaaactctttaatgaaatataagaaatcttatatgtataaaaattaaagacttaaacaaaaaaattcttcaaatttgaaaattttcgagaagtatttttaagaatttgtattttcaatataataattcatatattttgtataaaagtttttgtttaaaaaaatagaagtgtgtccaaattacaaattaattgttaaattaagaatgtttctcagatcaagagatgatgaaagttgtagagagtttgcattactcaacctttgcaattactttttgaaggtaaaagaaaataccttcctacataacatacaatggcaggttctggtttgtaagaaactaataaatgattaagaatatgaataagacttcctttataatggatatgtagagaagaatagtggatgataggaggtgaaaatcttgtaataaaatatcaatatcagttataagataatcaacattttctctatttcttgtacctatgtgattaagaatcttgtagctcccttattgaaatataatataaaaatataaataaactatttagaagtgcatgtagttttcaacatgaggaagttcaaaagcaagttaattatgataattttctatagtctatattgaacacaaattatttttactaaaggttcaatcgttctatgaaggttaaaagtttgaattgtttacatatgcaaatggacaaccaaacaagaaaatgattttgaaatcctttttggacctttttttatcattcattttttcccctactctatttcctttccctcaaactctctaggtagtaaacattacctaagataaatagggaagaaaatattttatcatttatttatttagtatttttcttacattttttgtatgttatccaaatataagaaaactatttttctttattttttcttttccttgttgcttttcaagaatcaagcatactttaaactctaattaagagttacatagatttacgaagaaacaatgcaactggtaacaaaaaattaaggaaatttaatttttgagagtaggtataatgagattggtttgtttgatacaaaatttgaataaaaattctttcaatgaaaattcaaggaaaggaaaaaaaaaacaactttctctctagactataatactaaatcacttaaaaaatatcctaacatcgtttatgttcatctttctttttatggatttgaaaaacccaataatttggagaaaactgattcaaggaagaataatttttagaataaaatattattatttaagaagatcataaatattatagtcattgttgaatatgataaatgatttaaaaaaaatggtagttggaaatttagatacttttataagacaaatgaatttttctagtatggtatgaaaaaaggtaaaatgataggctttgatcattttttaaggtagtttgtttaaatcattttaatttattttcatttaagaacaataacttttattacactagttattttgattttcttttgatagattttgcaagcttaagcaatttggagctattggatttgagtaataattcatttagtgggagcgttccatcatctataagattgatgtcttctctcaagtctttatccctggctggaaattacctcaatggttccttaccaaatcaaggtatatatatattgtgattacaggtttttctgttttcttttttaatatcttgtttgttctttatgccaatgaagtcatgcatgtctattaatttttggtatttaataaaaaactttattcttaattcataaagacctcatcaacggtaagtaacagctagttgtaagtttgggggcattgacaagacgaggag

SEQ ID NO: 10901 - DNA, 3907 bp, Vitis vinifera
  Intron number 3 from transcript GSVIVT01027638001 (locus G SVIVG01027638001) derived from phytozome v7.0 (chr-ID chr1 5; pos 14786721 to 14790627 reverse strand)
ctagaattagggacaaatatccagaaagaattccagtaagaatcgattctcagtgattctgaccactttgcttttgatggtgaacaatttgattggagtaataaaattactgtaaaaaggcatggatatttcatggagagacaagtggatgctatacactgaacactaaccactactgtgctgggtagttgggacttcaagattttatgcttcttcttcacttctgcatattcagtagtatgaagttttcttctgaactaggactcccaatttagcactaaatcttctggttaattatttttatttttgtagcctaagttccttagtttgttatattatattaatttatttgttttgatttagtttaattctctgcggtcaacttttttgcttttattgattgaaattatcctttaataggtttaagtggtatcttgatttctagctattgggttttaaatcatgtgcaatcaacctttttgcctttattgattgaaattatcctttaataggtttaagtggtatcttgatttctagcttttgggttttgaatcatgtttttggaatcctgaatataaatccagtgtgcaacctaagtcgattatagccatgccttattgaattgaagagttgtgtagtttgcatatgacataactcattttatgtgtgcacacagtcgtagtgcattagatctccaaatgggaaaacctatttgacattgcctttattttcttgtgcattgactgcacttagcacaacttgtttcaatctttaagtggttatgtggaatagacaccttcaaaggggatccaactccatgttagattaaataacatgtccttgatgtctctaaaattttgatttatttgtttcagaatttcagatatagaatcaatattcattggattctcaattataatataaaaaaataaaataaaataaaataaaattacagtagtaaggggaaaaaaacaagttgggtcatcttttcatatatgttttcttgagtcatttccataatatatttaatgaatggaggcttttgattgagggagaaaatattactttgtataaaccatatgttacatatttaataattgttgtgaccttgcttcaattttgaagaatttgcagggttggcatctttgagttgtgttgatctgctttcctagtctgttcccatgcaacaaacaagagtttgttttgtaaactgcatagtcacatcatgcaaattgctggtgcttgatcataagttccctgatttagttgcatttgcaagtggtcattcgacactatatgggtatcacggatgtgttccatcctaatcttgaagtggcttttctagcaatccttggctcaaccatctaatatttggcaatcgaatccatcctatgtttgtctctaatgatgaccctcttgatacaatttactaagttcattgatgccttcctagtcacctccagttcatgaaaaatcatatttgtcaactccaacctgcaattaaccctcttatgagcagttacaaatttttttagagaattccttattcttgtcctccccacattttatctgaatatgctgtgatttcttacctaccaatctcctaagtgactactgaccttttgtattccttcttaaggactatgtttctcactctcttcaggtggctatccaataatagactattcctcaacatttatatcataatttgcaacaagacctcctgttttgacattttggccctcacatcataaggagaatcctgggaaaaaaatgaaactggccaccatgttttgagttgtaagggccctctcctctcttaaagtactgcaatcacataaaaaataaaaataaaaatgattcacataattgcataagacctttatgcatatcgctagaaaaatgctcatcctcggatggtgacaagatgaatttatcaaagtcctcacatatcactggagcacatgaagggattatgtatcaaataatctctttgccttcacaagatctgatgaggcatgcatggctgatgcaagtctcaagtatttattttttttcatagggaaatagaaagatttgaagtctttctcctacacatcagcaagtgatagctatccacattctcctcatcctgaccaacatcttggccagtcatcatttgctctcatctgttgaggacataacctagagaaaactgccttccgcatccttgttctcaatggaaaataggagataaattgttctgatgaaccttgccaccttaacagccagcctcccgtctcccatgtcaaaatagctcatcttgtttcacacctttctcttaagaatgctaggtacagaagtggccattccaaaaatctaaaatggttgctttacaaacatactccaacttaatgaagttttactctgtatattctactgttcatatccgctcttacattactcaactagattcaagacttaatgaaaaaaggaaatcaatcccacgcaccttccttcttgaactactattgtagtccatgggcctgtcccttcagtttatagaaaagtcaacttctttatctccctatctgacacctcaacattctttcttgcttcttcttactgtccatagttggttagtttcctgtcaacacatctcgatatccttaaaaatgcattcattttgacttgtaaccctcaaaaggtgactcctatatatccagtaacccctctgttttgaaaagtatctgacacctcatcatcttcatcctaatcctcctactgaccttcctggcttaatagtgacaaccttgatagatgaaatttggctaaacatcaaatcagtattttttggccttctagcacattttatggtgcatttcagtaacatagaactgtggctatagctggctggatgagaggatctgtattttcagtttagacataatttatcatttctgtaaaactaacatagggagagcagaaatgggaatggaagcctgagatttctggttctattgttggttttgagtctgtattatctgtttttgtgctactttttcttttccagtttcatacttgtcttgtgtagctaggttgtgccacctttggcatcttgtttttacatgtattgtcattgtcaatcaaaaaggaaaaaagaagggaaaaaggagtggctcgttttaccatgcatgaaaacctctgagtagaggtatttcacatacaaggagatatagagatgttaatggggtgggatcacatagggctcccctactcccatccccgcttctagtatttttttcccgtccctcctacattctttgtcttggactaggatggggatggggaatccttgctaggggagcaagttccccgtccccacccttgttcctgtccctgcccctggtttgagtttattcaattttctccttccctgtccttgccccctattagaggtggatccccacagagacctgacctgatgggttttctttgccatccctaatatatacatttcatgctttactaaagttacattctaaaatgcccattcagaagtgcaaacttgaattcaccctgtgaattgagtttttgatcaagttagatcacttagcagtttagcaattctttttattcattgcatttagatcacttatctgttttcattcttttctcttaaaacttgatatggccaatggagagagtttagtcagatggtacttgcatctattcattgctggaacttccgaaggccatccaatgaactacaaaaaaataaaaataaaagtggaactgcccaagttgcaagcataatgcatgatgagataataagactatccttgcagtatccaatagcgcatctatttataatttgattttatgatttcaaggtgattgtggagaaggctgagagaagtgatattcc

SEQ ID NO: 10902 - DNA, 7369 bp, Vitis vinifera
  Intron number 1 from transcript GSVIVT01017330001 (locus G SVIVG01017330001) derived from phytozome v7.0 (chr-ID chr9 ; pos 6771227 to 6778595)
tggagctgccagctccaccttcttggaagaaagttaatttctctctctaaacttcctatgctttctttctcccgctgtaatgttcggttgttgaagcttcatgtttctctgtttgaattctatgcttttggttttgtgatttggggctttgtttctacgaactgctttctgggttttgtctctctttttgtgaatatgttttgctctgtgctaggattcggattattgctcaccctatgatcctaggatttgaggcaaaaatttttgtgcatatggataattttagttttattttttgaacttgctctgttttggatgaagggtttccttgggaattatattgcagggacaattttcccttgagctaatgggtcctatactctgtttgtttgctgggaaaatgtaggaaaagggaagaaatgataagaaatcaaaatttgagtgttaaattttatccttttgggatctgagcaatcaaaacatctaataaacatgccaacgccatagaggaatattggtttcttttctttcattagcagccaacaaccaaaggtttttttaccctataacagtttttcagaaactattttccgtcaaaacaaacacaaccttctgtgttatgcattttctgcctctgctaccttagatgatacccctgtctctgtcggttattcacttaagtaaaaaagatttaggttcttggccttaatataaaaaatacagagtctggtctaattgaaaaaataaactcaatggagcaaaccggcaagacacttttatattttataaatgttttacacttatccaaatttttttttttttttttataaatgttttatatttatagtttttaaacggtagaattcacataaccaagatgcgggttcttttgtaattttaaattaacattgattttgaaaatttaatttatccatactaaaatatttttaatttttgtttgggtagaaatgttgaattttgtatcatctataattttgattttgatcatttgaatttatatcaccaatgtttaccaaaacattgattttgtaaaattttattgataataaattaaaaaatatttttaattattttataggttagttttgattttaatctaaaatttaggtaaattttgaattttaatattatttgttgtgagataaaaatgagataaatattcaatttaacgtatcatatgtgggttgaagactaatttggaatgaacaagatctggttttcacatttttttttctaaagaggcttagtggctcctaattgcaaaaaagtgcccttcaaatctaagatctatgatatctatctttgttatggtattacatagtacaatgagctaaattcccagtcaccataatcatatacattacaaatcatataccttcaactgttttccataatttttaagaaaataaaattcaaagaatttttgtgaaaagaattattatattaattatttaaaatatacaaagtttaaaaattaatcataaaatggagagttgggtaaagaaatcctatatgaaaagttacattcttgttgtcaaaggccattgtagaagttaagtaaatttagggcaaaattttctgtttctactctgacaaacttggatgggactgttggctgtgtaaaattgaacttccagttagtgggctaaatgtctgtcaggtactacaccttggcaaggttccatgaaaacctgggaatagatttaaaagaaaaaggaaataactgtaaaaattggaaaaggatgtgcttctgttttctaggtgcttagcctttatctgctactgatttttatctgctctgaagatgcgttgaatggtatgccactgatttccagaaaggatgtacttctgttttctgggtgcttagcctttttctgctactgatttttatcatcattactactcctgctacttctactactacttctactaccatgattatttttaaatttaggttactgggtttgaaatcaaaataggtgatcaatcatgatccatctaagtccttccagtcaggtgacattgacccaattaaattatgtttttgggttccgcaaaatggaaaatgttccaaagttgcagtattctggatattttggggccttcattcaaaggctgcatacctgcaacatttgctataaatctactctttaaattattttgttttagcagtatgcgcatattccaaatttcttattggtatgatagttcaattttgtttctaaattctggtttataacctattctggagtctaatttcccattttggatggaataaagctgtgtaaatcccttctccccccaaggcccaagcaattgtagaagtagcattttcatgcttgtattgtaatgaattgaaaggcagaagaagaatttcatttggaaacattggattcttgcagacttctttgtaggagcacctggcaaggccagaaaaataggccatagtttgtgaattatttggtgcaggagattgccttgggatttaagagcacgttagcaaggattttaggataacaaggagagaaattcatgaatgtttggattggaggacatcctggaggaagaagcacatgcttatcattggattatgaggaataagattggaattcaaagagtggtataaaggtacattttgatcaatagaatgtaagtctggaatgggtgcctgactattggttatgggatacctagtaatttgggaaccacaggtacatcatcaaggattgaagaacatggaagaaattcaagaatatctgaagtggaggatttgttagaaaaaaaagcatgtttttgtcatttcagatcatgtgaaataacggagtagtttcacaattatgcatatgggcactcttgataaaagagaatggaaaccagggagtagctatctgactacaggaaacatgatgctattgacgacgaatgagattatgtgtgcatttccctttgattatgaagaatatatatatatatctaaagaatatgaatctagaaagttttctaattacctaaaaccataatctagaatataactaatttatagcaaataggttgtttacaaaaggaaacaaattagtgattgaaagagaatatgttaactttctttattagatgcaccctaatcaattatacggtagttcttatttcacaaattctggggcatgctgtcatcttgataaaagagaatggaaaacagggagtaactatctgactactggaaatatgatgcactttaatcaattatacggtagttcttatttcacaaattctggggcacactgtctttttgatttattgataaggaaacgtgctctgataaaaaataaggaaacgtgctctgataaaaagtaaggaaacatgctgtcttggtattttccatgagaaacagagttacttgcatggaaaaaaatgatcctagtgaggttaagaacctattctttcctctcttatgggtaaagtttcagttcatagtgcatcatatgagtgttgagaagtaggggtaagaacttattctttcctctcaaaaaggtaatgtttgagttcatattgcatcatatgagtgttgaagtcataccaaacgttttgaagatatgtttttgcccaactaagttaaatctagtgaagtgtgaaatgtactctcttcccagcttttgtaatgtaaaatgattttattaagagttttttttgtccttataaattgaattccaatcaaagttataccctcttctccatttcagttctaatacagttgcctctggaaattgaaaaactgtccttccgggtctttatctggtttcaattcacgagaattatacttgagttttgatggaatcaaatgctttttgatttagctctctccctccccttccccctctttctccctatctaactaagtatcatctatctatctatctatctatctatctatctatatatatataattgttactaagtgaaagattactaaactttttttcttttgtctttgacatatgcacccacatataaattagaacttactggtatgtagtttgcttgtttcaacttatgttgtaaaggtctaaacagttcaaagagggttcttagataagtaaaatatgttggattttagagaagaagagctttaaataggcaattaaacttgatggacatgtacgatggagcagtaagttgcatgagaaaagttggttgagagaactaaatgtctgatcacttcaaatgttagcatagggtccttatcattttctgttgggtatgctatggacttgttatatgcagttagagcctagaggctggcttcatggcgcatgtctttgctgatatgtaatgatattgttattatggaaatagagtaggatttaattaccacttacaagatagaactgaatatattgtttttaaatctaaatgttttgggctatgttacgataatagtgtaaatggagaatttttttttagtagtgggagtagaactgaggaaatggctaaaattgctagccaggaaatccaagaagctatcatttctgatgtgttggattaatcatccatcaggaggggaagattgacaaggacatggctcagaaaattaaagctaattggatgaggtggggatgtgtttcttgtgtatgattttggaatacctactaagttgaagggaaaagtttacgaagaaggttactattacttatggcacagaacgttgcacatgaggaaacatgcccataaaagccatgtagctagaccaggaatgttgagatggatgaggggcaattccagaaagagcaattagaaatgaatgcatttgcgataagctccaggttgcatcacttgatgagaagatgagagatggtcatttaagatggtttggttgtgtggaacaaactgcacgggtggtcagttgttgggggaggggggtgatggcttgatgtatgttgaaggatttacaaggacaacaaggagctgaaagaaattgtgggtcaatgtggtgataaagcttatgatgttacatgactcaatggagactataaaccttgatgagcgaaattccagaaaattcttttgtatctttccccaagtagttggtctctaagggaattgatggactgagattcattccttcatgttttgcttatgttagttgtggcagtcatttgttcatgtattttttcccatccatttcttatgggtggcaaaatgcacagttctagtattatcatatttgaactaatgttttctttttctttttccatttttggtagacaaaaaacaaagtgcctatggaaccgagggggtgtgacccctgcatacagggatatacaagaataaaaaaaatcaggagtatagaattttatcttctccttcagaagatttatgacctagaatgatctcaagtggatgatctgagtaattcatcaactgccattttttaatacctaggatcaaaggccaatctagtctaggctaaatattagatgtttatcagattgatgaagcattgataggttgactccattagctggaaagtcttggttattattattcaccatatctattatatagactaggtaatttgataggtatttacttatctgattagctggcgtttcttagttttcctatatgatgtatgatatttgatggactaacatgataacatcattacagaactcctatattacttatatctgaaacaatgtatttgataaaaaaattaactggttctggtcctgtggatgagtatgctgaggctgcaaagctcatgccttggacagtattttattttattgttattattttgtttgggatggtgtgtgttggggggtgggctttgttgtttattttttcagtcttaatgaatagtggataggtggatggtcaaaagaagattgtgttttgctctaaaatggattatcgtcaggactgcctttcccatataccatctagctccttctgtttggattcatttgcaatctgttgaatttcttttgagagttggggaagcagttctggttttgcttgatttgataatcaaatgttggttacttttgctgtattgttgaagatttccttttctcatatggtgaatctagattctagaatgcttgaagttgaagacttgccatcaagtttcttcttttaatatgaagttaaatggtaaggattctaaatctggttccaattttatgctggtacttaatagtcttgacttgttctgttgcttctgagattctgagattatctgtttttagttttgtgtttggggaagattttcagtacatgcttggaagatagaatattggggctatcactccacctagattatcaatgaagaaatatagcgaggagatgatacatgatttatattgatgacatttgtcttggtggtactacatggatgaaatgaactgggaatgaatatattgccatcattgttgagatgtatgcaagagctagtgtgagaacagtatcacaaggagaaatgaattttactgggttgatgcctagggggaaattattcagttcctagtatgcggtttttttttttttttcaactgttatttttttcagctaagctgtgatgcttggctgagctagatggagcaccttatgtgagatttttcatagtgaggatttattatctaaggcataaacaatatccttccttacacataagggatgacctaggtgaatgccatccatgtaagtggactgtgtctcttcagtaaaccatggctggatgttgtgattgatggaccgaatcagtaagaaatctcaaaagacagcaataataattatccatgattttgaagcattgtcaagaattaaagaagacatgttaagattttctagtataggtgagaggtagtttttactgattgatgagaatagcaacactgaatgaggctgagaaaaaaaccaccacctagaattagcttcaggtttaaaaacaattgagagttgacagataatttgatcatatatgaaaaaaaaaaaaactgctgctgctttgtgcaaaattttttttacaattgctagtgtatatctggatgatgatgtttatgatgtgtcattagaatagttccttttgattccatgattctaatacctgaatatagcggacgatttatctaatatatatttttgtctccttttcttatgtgtcttaactttttttcttgattaaatttagcatttatttgttttttaataatgcttcaaactaagaagtatgtcttttagattccttctgattaatgtttgatagttgacaaggacaattttaaaggattgtaactgtacttcatagattttattttatgacatgaatctctttgttcttctgcagttc

SEQ ID NO: 10903 - DNA, 459 bp, Vitis vinifera
  Intron number 1 from transcript GSVIVT01033803001 (locus G SVIVG01033803001) derived from phytozome v7.0 (chr-ID chr8 ; pos 17672928 to 17673386)
gttctgctggtataatatcatccttacatgttatgctataggttcttctgttaggtatcatgtttagtagatattcattttcaaatgagtcattatgtctgattggtatgattgttggatcttcatttctgaaggggttcttgtatttgattagtgttgtgtgtggttattcaatattaatgggttattagatttgattattcattcctattttttcaatttccttagtgtgaatcttatatgtgcaatgctgaatgggttcttattttctatttttatgatttttggctattcaatgttaatcttttgcttgtatactatgagttttagttattcaatgtcgagtgtgttattgtgtttggtcagtatgattctttgtcattcaattatgctttggttgtactagttttgatttgagaaagtaatgtatgtatgcagatttggttaaggcagttcctg

SEQ ID NO: 10904 - DNA, 6079 bp, Vitis vinifera
  Intron number 3 from transcript GSVIVT01028924001 (locus G SVIVG01028924001) derived from phytozome v7.0 (chr-ID chr1 6; pos 17463506 to 17469584 reverse strand)
ttatcattaatcagtgtatgttatcattaattgctagaaagcttatatatgttttatataagatgtgttcatcaaagaaaattattaatgaatgggaaaatctatgaaagttcttaaaaatattaaatgataaaagtttctagcatctaattctatctcttgagctatatcttgaataaagttttcataaaagttttgcatgtaataccttttgttattatgacttagaataagtaatgttggtctaataaagtgtgtattgtgaaaaagtaaatcaattttaggtcatataaaatttggttttagttatctttctatagtcaagaaattggtttagaagaattggtgcttcaaataatgctttcacatgaagtcttccaaaaatgcttttagactttgaataattgttgctttcacaggaagaattaaaaagcatttttaagtctttgatttcacataggaaaagagccatggatgtttgatgagtccttttaagtaagggaaatgtagttgcatcttttaagcttttcctatctaattgagttataatgggtttttaagtctttggtttcacatagaaaagagccatggacctttgataagtccttttaagcaagggtcatgtaattacatctttcaaacttgtcatatcaaattgagttataatgggtttttaagtctttggtttcacattggaaaaaagccatggacctttgacaattcctttgaagtaaaggtcacgtagttacatcttttaaacttatcctatcaaattgagttataatgggtggagaacatgaaacacaaaagaagttgccttgaatgatgatttccattttaaggtattggcttcacatgaattggtatggtataaattaccaaaaaataaataaaaattgtatcatgcataatacaaattttaaaaagtcaaaaaagtcgtttttagatgtgaaaataattaaaggtaatttttaaaatattttagatgtgaaaataagtgaaggtagttttcaaaatatttatctagatatgcgggtttatttcgtgatactaaactaatttctctttccttacatatgcatggtttatttaataatactataactaatctctctctctctctctctctttatgggaaattaagtgatttttctttttcttttttttagtttttaaagtcttttcaagaagttgatatttgacaaaaccaaatatttttataatcaatttaataaatttttaagtttgcttcctactttacaatcataaatgataagaagaaaaatgttaacatctttccttgttacttcattttaaaagagtctgttagagaatttctaaatttaattttgatcttctaaccatggaaaagcaaaaataaaataaatattgggtcatttcatagagcaataaaaaaattagaagactaaaatataaaaaattaatgaaaattttataaattctaaaatctttatctatttgttttaataatataaaaaataaagaaaatacttattattttgtctacatatacttttgattttttgtttttaaaatatgaaaaatagtatttcttatataagatataataactcttataggcttatattaaaaaaaaaattcaaaattgtttaaaaaaaaattaaggagtcaaaaaaattttacttccttaaattataaaatttttggatattttattttaatatataagtttctaatttgaaaaataaaaataatcttcctaagatttatatgcctaaaattcaatatacaagtaggttatacaatcacgtaaccttattaattatggtaaaagaaaaaaaaaagtattaccccaaaattgtggtaataaataaatttcatgattgtgggctttttcaagagaacaaaaaagtatccaaattcaaatagtaaatatcaaacttgtcatataatgatattcatgactttcccataagtcaatttttttaaactatttattacttcccttgcaatggataagattgtggttaattgttagtttctcactaatttattaactatgatccatcctcttcacttaagttgtccaatggttagaagcttcaacaaattatgcatcttcccaggacaaaaacagaccctagaagggcactaaactcctagacctaattggtaggaaactattaatcatattttcttttcattatttaattcaaacttttgcaacttgctagaaagtggtgtgccttattaaataagctaaaatgaactctaaatagacggaagtaggttttctacaacttctaaaaagattttctttcaataattttaagaaatagtaaaataaagttgataataaaattaattattaagacaaaaataatgatttagatgtgaagttttttaaaatgtcagagtctttggtttctcaccaagtgtgggacaattgaagtctttaaagtcttgatgttgaaagaccaaccaattgatgtaataaaatgaaaatggacaagtgactgggcccatttgtctgtccagaagttcaatggattgactatgtctttttatacttgtttttaaaagttgtttttaaattaaagaacaaaaaatgctttttcagtgttttataaaaataagtctgtttgacaaattgtttttaaaataaaaacaaaaacttgtttagataaattgtttttaaaaataatttttctgttttgattttataaaaatattgtaaattcaatttatgtaagattaattaagtttagttcaagtcttattaaaaataaaaatagttttgtaatcactcacaattaaaaaaaaatagtttttaataaaacacaaatagtaatagtataataaaatcataaattatatttttttataaaaaaaatgtactattttattatatgttagaaacataaagatattaatatctttgtaatttttttgttaaaaataaataataatgacttaaaaatactaattgttaataatattttatttaaaatgaataacaaataaggtttgactttttaaacatacaaatgagccaagtgttttattacatgcacacatttagtattcaattatgaatataatattttaaaatgttttgatttaatttgcaattaataagattaattttttgaatttcaaattattcttaattcttaaaaattgaaagattcattaaagaatttaaattattaactatatcttaatttataatatatcaattttgattttattttttttagtgataagatccattttcaaattattttttaaaattgttaaactcattaataaattcaatacaaagtgtagcttaatttaaaaatttataaaaatataattatgttcaaaaaaaaaatagacttattataaaccaatttttatccataaatttattttattaatcgaaatttattatttgagttttaatttatttttaaaaattactaaactttctaattattccaataccttaagttttgtagttgaatttgaagctcattttccaattgaaaagaaattagaaaataatgatattatataaaagagaaacaataaagttgttttagaccaatttttgtttataaatttatagtattaattgtattattatttgaattttaagttatttttaaaaatgactaaactcgtaaataaatccaatgcattaagtgttgcctaatttaaagtttatttacctagtgaaaaggtttgtaaaaatatgatatatgtaaaaaaaaaaactaaccaagacatttaaaatgatttttggtctatgattttctaatattattgagtttcacaatttttttagtactaattaaatctattataaatttcaaattgtttttgaaaagtaataaattttatatatcaaacctaacttgatttgatatttaattgcttaatgcaaaattatagagaaattaaaagaaattttaatttagaggaaaattatatttgaagattatcagatcagatcatgtagagagaaaaagaatgaaaaatcatgtttaattttatttgttttttttatagttttataattttttttttgtgttttccttatatttttaaaaagaggtaaaaagaacttctacttgtttttttaaaaaattcttatttattttactttatttaaaaaaaaaaaaaaacaaagatcaatagccaaatagtattatgaattttcaaaaactgttttttttcaacttcaagttctattcaatatattgaagaggtagcccctgcttcttatatcggctcgaaaaaacaaaaggaaaaaacatggagataaaaaaccaaaattctcttatttgatttgttcaaaaagtcaaaatggaaatgaaatataatgaaacttagtttaatttttttgttatccgatataaaagaaaaacaaagaaaattaaatataactaattaattagaaacttatatattttcaaattatttaatttctatataattaaaaggttaaattccacccaataaaagtccaaatgctctattcccttaaaagaaaaaaatgaagtttgtacaaagaaagaaaatttagcattaatcaactttgaattgtatcattataaacataatgtataagaaaactcccaactagggaaaattggatatgaattcaaaaattccctgactaaaaattaattgaatggcttcgtatgaatgttggtacaatccaaattggaagtggcatcaaccaactttgcatgttatccaatatgagatattttgcaattcttctattctccaagttgaaaacaccgaaatgaaaagggcccccaaagaaattgtagtaattaaaaaaattgtcataaaagtatatagaatttggcttacatcctacagaagttgaagccaagacggagatggaatgattgtctcccaagaacaaggtgacatctcccaagctttttatttcaatccactcacaattcccacgacaatccaccagcttgtagatcttaaattccttagtgatatcatccttatctaatttccttataactcgcaataaatattcttttccttcttcataggattccattaggtagatcatttggatggaatgtgagagaaaattgggggatggaatctttatgattgaatctttaaactaaaatatcaatttttaagtgtacaccaacttagaacagaggtcatctagtcttaagtcatctctatattctatgataatcattcttcatgaaatgaattttcaattagtaatagtgctaataagaaatttacaaaccaaaaaaccaacactataatgactttagttgcaagacataataagaaagagaaaaatatttgaaaagggaaagtatcatcttcctcatagtgaaaaaatattggtttgtcacaagttgagacaaattgctttcatgtatcacatttgttgaagttcatagaaatatcaaaattgttgaaaggtttgtttggatatgtttactaatgagtcaaagtccttgtattttgtattgtagttaagagtttcaagtcaactaattatctttattgatcaacatttcaaattttgtcaaactctattattcatggtctctttcacatttacgttatggacacgttccaaaaatatctaggaatcactttcccaatctaggttccaatgattccaagagtctacatttgacattttctaaaaaaaatctttaggttatatttggttattataaagtttgaggaaaaatgcaaagaaaggaaaatagagtcaaagaaaaaggaaagaaaaaaattgtagaaaaataaaacattgtagacccccggaagcagggacccttcttttgaattttaattttcatttcccggggctcgacatgatgggagggctgtgtttgggggctctgaagctgcaggggagaaggcagagcttttgggggctgcagatgggacgagatacggctggcttgcggcaagaagaggggaacagaggggacaaaaaagagaaaaggaggatccttttgagggtgctggcgggggatctgcagagaggaagggggtgaggaaagcggagcagagtagcaggagccaaacccacgggttt

SEQ ID NO: 10905 - DNA, 6275 bp, Vitis vinifera
  Intron number 1 from transcript GSVIVT01014535001 (locus G SVIVG01014535001) derived from phytozome v7.0 (chr-ID chr1 9; pos 4918415 to 4924689)
tcccctccgatcatttcctgtagctgtctctgtaagtcccctctagcagcccaaaacagcccattctcagtcccatctggccgcccaaagcaggccacacatagtcctctcttgctgccacaacgcctcatcctcggggtggcaaaaaaaaaaaaaaaaactcctatccaagggggtctacatagacattttaaagttattttgttaaagaatttgatatgtatatgatttattatatttgataataatattatatgcatcgataaaaaatatgtattttataagtgtatatttattattaaattacagcaaatattatttcataataatattgtgatattttattataatatatctaattttaaaatatattgaatattaaaattaagacccatttaatttaattatattaagtgatataaagtaaatgatgatatgtatataattttttaatatttaataatctattaataatattaaaaacactatgaagaaaattatgataataatttttatatttttttgtaatcaattaaataaaataatttccatttaatcatatattggtaaaatataattaccaagtgtagaacctcaggcgctaccaactctcctaaaagcaattgttgttaggaaatgcgcataccctaaccttatagtgcattcacccaagtgcctacggcgaacacaaggagagttgatgggcgcggccaaccctccgatctgccaacaatctctcccccagcgacacccctggggttcaaacccgtgacctcgactctgataccaattgagaaaacaaatgttattcttaattaagaaaaacacccaaaatggggggagagggggtgaattgggtttttaaaatcttttcaatcacattctcctaatcgggttttgatgataacaaatcatggttaagtgactaattggtttaatggttaagaatctcaggcataaactcgaaaattcatcaaataactaaatggatacaagatcgagatgcttggaagacttgtgatcataggaaactaatgtaagatgaatgcatgagtgcacttagaattttcacacgtttcatgcatcttagaaaactcggtttattctttaaaacttcgatttcattaaaacccgagtttttaactaatgtactttaggcaaaatatttttcttaattaagtataacctttgttttctcatcaaggagtaaactttccctaggctacaaaaatcaaaggcaagcattttttagcttgactatagtaggcgtcatttaactagacttggagcgcccttttttcttttctttttttttattggagaactttgattggagtagttggagctggtgtcgtttttgagaggtttgaatggaataggaagagtcaatttttttggaaaaaacggtgataaattgtcatctcaatcgattttccaaataaatcgctaattaatcagctatcaccgaaatttcagcgatttttcattgaaatttaacaatttttttatatatattgcctctccaacatatcaacctccattttgcttcaccgatcacaaaaacccgaaatttcagagaaattttaccaaaaaaaaagaacgaaattttcatccctggtcataactcctttttagaattggttcttccttcctccgttacgtttgataacaacttccctcatattctcttttcttgcaagcaaaactccactcatatatttgtaagacatcaatgtaaaaacatagcattttattctcttgaattttcatcactcttgtggtatcgaagcagtgggctctcatgagcaatccatttttttcatgtgtccttcaaatagcctcattgaaaaccatggttgtaagcacctcttctgttgttgtggagaatgttggaactgccaatcccaacaagttaatctccatcaataccactgtataattgttgttgaaactttctcccaataattatccatttttgtgcaatttcactccttactgctatgatgtgatctactagggtatgttgagggaatgtttcattatccactggcaatctttgcatcactttcctatgcacaccattatatctctcatctctactgccacgatatataattaagcatagattgagttggcaaccttgtgtgtcaattggtttaaattccgaattgtggatcttaaggacaagcttacctttgcaaataaatgagacaaaattgttactgagtacatgcatatagtgcacaatggatggattggctgttgtcaatgtttatattaataatgatgatctccaacttcatgttcttcgtgatcttaggaaggaatgcaaagatgtttgcactatagtttgaaatcgtagattctcatgacctttgaagagtttcatgatgcattgattgaacatgaaagctcccttaaaggaaaagaagctcactcaaacaactcatctttcactaccaattactctaaaagataaaggcaacccatcaatccctgatccaagggatcctacaacaaagttggtcaatctaaaggcaccatgaacccaacttctgatcatgggcatacacatcaaaactgcaataagaaccacttcaagcctcaatctaatatggtgtgtcaattatgacaaacctagtcacaatgtcaaacactactattgaatttgagggtatttacttaaagcatcataagctaattataccacttaaattagcaagtcatatccttataattggttgactgactccaaggcattgcacaacatcaccttcaatgccaacaatttgggaactcattctaagtttaatgggaatgatgattgttaggaaccccggattgttccattccttaaccccaaatcatatagggtgcatgcatttatccctaaggctctttagatttgacaaaatggaaaaacatgatgtcaaaaactaatatgattaaatctagagaatgttgaaattatacctacaatctagatgttctcagatccattccaaaccaatgaagtcctcaaaactattatagagatcgtttatccaatgttctttcactcaatctctcttcgcataaatccaagcacgagaaaagtgtaggcttttcttttcttccttaaaggagactaaggtttctctctggtggttctctggtaaacagaatgacgaaaaaattttaaagccctaacccttgagagggtatttataagcatccctatgggcttaagtgacttgaacttaaattgagtttgggtcacctaatccagcccacctaggtcctaattaatgaattagtcatattgaacttcaattaattaattagctcaatctaagaagtcaatttacaagatatagtgaaaccttgcacgtacttttactaaaatgtttttatgtacacttatgaacaagaaatccaaatcctttacataaaatgtctccataaattaggagctcgagcgaggaccactacgacccataagaaaatactagatccctcaaaatccaatcctgaagttgattcaacactgtactaaggagaatcaagtgcactctaatatcttatgaaactacaacaagatgaagtccgagtccatgacttactatcaattgcatgtgggttatccgtcaactagtgtctgtaatctaaaaaagtagtgttatcaaaacctatcaagttggttctccaatctttgagttatagatcattctattatgtgatcaattgatatgctccaacttgaattagcatatgttaaattccatttaaagaatttttatgatcatagtcttcctaatcacatgttcttttgatcacttaagggataccgtctcaattccatgagatatcatggtacctttattaaaaatatctattgtcaccaacctccatcaacaataatccaatccatatggatataaaactacattaaggtcttactcataggtcaaagtctcctattaattttagtacaggttcaatatgccctcaatgttaagattcctttagtagcttggtgaatcatgatagtcaatagtcttatgtcatgattcactgtaggtcatgtctaatgtgtaatcatacacacaaatatactcaccatgggaaatcaaccttgacaatcaagatatgtcatcctttcaattaggaggtagtgtaatatagtctctacttaattgcccaaatccattaatagattatatataaacaacttattatcttgtaaaaaaactcatgacttgtattctttatgcaactcgtgatacatctaagtcatgtacaatgcaaattatatgagtatatatgctcaaataaccaattaatacataaaggaccattgaatagcattccatcgtcaaacacgcaattgtacaactaaaacattcttcacaagtagttgtggcaatccactagtatcaatcttataacaaaaattacctttgaaagggtcatcaacactcttccatgatggcaactacctattcaggcttgttactctatttctttgaaacttcatgcctggtggaaaagtatcgcatggatattcagaactttgccattggaaattttttaggtccctctcattgccatttttcataacaagatttctaaattccaaaagttgactatttagatcctgtgcagaatgtgatgaattagaattccaaagaattctattagcataattgataacaacaagaattcccaattgagtgacctttaaaactcctattgaatgctttagtggactttctctattggtaacccataccacatgcttctaggctttcttgtataatatccccaagtatcggttcttagacctacctagattgaagaaacccagttcaaagctcccaccaactatagtgatgatctcaccatctctaatgagttgatttacaattatggtgcctactacaatggagattcttaagagggagaatacataggaaaagaaaactacaaactgttgtaagagcatagatccatgggtgcttcccaagtctccttatcttttctttttgcctccacatccctaagatttggcatttccttcaaacataacaatcaatctcgtttcctattggtaggccatagctctagatatctatcaatatgaatagtcaattcttttctttgaatgtgtagtcaattttattaggtggtgtggtcccttgaattgaatatttgttacattcaaatcttttctatgattgcgtaatccatactattaggtggtacaaaaataacagtggggtccatctatcagtggattgaatgtctaaatttgattttttatacctcttaaaatggacaagggattagtttataccttgaaggcacctatggactttccttatggccaatctcacctcttctgtagaagaattacaaggtgaagtaaagaccaagaacagaaagactgtttcagggattctctttccttgtcaagatttccaagagataaaaatgcatacagggaaagtttaaatgctacaaacagcttgtattattaaattttaattaatacttatgaatggcttccataatactaaccaacaggcaaagattaatcagctgaaactggccctcgcttgtcagggtacgaatgtggccccaacacattcccttgagagaaaagaccaggctcattaggctgaggacacggttaggattcgagaaaatctaaaatatcacccacaaaaagaaaattttttgcaaatccacctatcatgtatgtagcactattcaccttcttgttcacagctagaaatgatacgcgagaagaaaatgttggttctccaccatctatataacaatgtctacaagttcatagattgtcatcaaatttgaaaagttctttttgtaggtctcaacgttgtgaggtctatccttatatgtaatcactttagtttctaaaaaatttgttttttttttctttcttgtgtaaaggttatcaggttcaaaggaaaatcaatagggtgaaagatggggctgccaaacaagatcaattacaagaagaaatccatttaacaaggaatctcatctttaggacatggtgatttgatttcaaacagcaaacttcctgcacttgtggtagatagcaatagactttgtcaaatattggaaaaggcaattttagaacttcaaggtgtttagacccaagttgtggatctcttagcccctaaagtaacttcaatctcgttatcatagctatggtactcccgaatcattaactggattgaggtaagcttatcaattttatattgctc

SEQ ID NO: 10906 - DNA, 9837 bp, Vitis vinifera
  Intron number 1 from transcript GSVIVT01028752001 (locus G SVIVG01028752001) derived from phytozome v7.0 (chr-ID chr1 6; pos 19181671 to 19191507 reverse strand)
aaggcaattctcaaggaagtcaaggactctaacaaaagtggagagagtacattgaactctatgggaatcagaatgaattagaatagtcaattatcacccattaagaggatttccttcttttaacggggaagagaatgttacgacccaaataaaggatccctaggatccctcaatttttggtttctattcctaattagttaaggaaataaagaatccttagaattagtttttattttattccgtttctatttctatttaatagtttatataaaataaggagagtgcaatgggaaagacaatgaaaaaatattgtcaataagaaaaaattgttttctcaactttgcatcttttctttggtcattagactctcttttctttttctttttttatattttttttccacacccatccactctcacctaccaccaccatcactattgatcgatggcccccactaacaacaatcattttcgatgactcccctccacccctccacccctcccccatttccccccacctctcttattctctcattttctttcattttctatttctttctcacctcacatattttctttttctttttttatttattttatgttttttattctttttttcttctcttttccctcacttctacttctttgccaccttccatccatggtttcctaaagaaattggttattttatttttatattacattggttgttattgattattttcattatttttaagtatgcatttacttgatttagatgttatttgtggactttgggttgagtgcagacccgcatttttcatgatttcttgttggtgaaagactatatatatgccacttatttaaattattttaaaaatgaaaataaatcaagaaagaaaaccctaaaagaaaatttgacttcgtagttttgaaaaaacatatcttcaaaaagcccgagtttgggtctaaggatcatattaccttttggaaggtatctcaaagaagtaacacctctttaatacctaaggaggtctctattagctagattaaaggaaatatggcaattgacttattgacttagggtaccaagaaaagctaaggtgattctaaaattctattaacattaacattccaaacaagaattcaaattgcaatcataaagaagagttagggtatatacctagaatgtttcttaagcgctatcacaagacatcagagttagttcaaacaacaagatatataacacggatctcatcagagaaaatcaagcaagcatcatggcaatcaaagatagcatcaagtatggacataactcacaataacatgcatattcatgtaatttcaaaagttgaagattaggtacgtaccttagcattgggccggcaattacacactacatgagaatcagggttagtgtacaataacaagtatagaataatcacaagtatgtcatagagcaaggcaaagatcaatccatattcactaagcatagcagccaaaagtgaaaggagaaaactcatgttttgcgccccaccaatgactaatttatctttgcatgaattaagtccataagcttcatattcctaatagtcaagaaggagggatcatagaaatttgggggaattccattaattataggatttaaaccatgtttattaaaattgagaaaaatatttttcaagaaaaataaaagaatgcatgccaaaaggaaattggcagcaagttaatttgaagaaaagatttttattaaactagaaaagatttttaaggtggaatttaaaaagaagtgaatttatcaaaaacaaagttttaaaaccaattttaaaaagcatataaaaaattattggattattattattattattattttggttgaagtaaaagaaataaaaaaatgatgaaaacaaatcaattcaataattgggaaaacaaggagctgcatgtttgggacttagaagactgcattgaggtaagaagggtgaacatgcatggccacaactgcatgcacgtggggaggatggtgacggacaggtggaactatgttcagcagtctcaacctagtttctagcttcaaagcatttattggctttggatctttcttattcaacactttctaatccattgtacattcagcagccctgaccttctctcaattcttggaagctgttttcaccaaccaccacttccatattctttggtttctgatcattgtcggctacttgaagctttgtctggaatagtgcattgcgctcaaggaatgctatattatctctcagagaagctatgacaggacttcatgcaaacggcggagctttcagtcctataatttcacttcaagaagagcccactctttctcccatctaatgaatcactttcatttcatcctcgcacactcccatgagctcacgcaccttattttcaaacagaacttcacggacaaaggaaattaggtagattgtggtagttcccctatccctgtatccatgatgaatacattccgaggtgagagtcttctccgttccattgctttctggtacagctgcagcttacggaaaaataagaacctaagctgtgttcagggagtgaaggccccgagatggttcgacactttcatgagcttcggtcagcttacggaacttctttatttgagattcttgttaaagtttgcaagttctccattaccagtaatctgctggaaccaagttcaagaatctgcagttcatgagggagaccatgcacttccgaaactacatgcacgcgaaaagtgaagggaatgaaccaaagacaggttgggcgtacaattggagatgacattctttcctcagcagattcgtaccactacttcattattttaaaggagaatgaaacaaagatggagcttctgaaagtggagccaagacccaaatcagaaccagagaaaccatcaccttcagatgagtatacagatctttgcattgcctgggagtcatctcgtgtatcctgctggcttgaaaggtactaatcatatttacgatattatccctccatgacagtagctttgattgaaggtattgccactgttgagataaagaaaaacccgccagaactacaacccagaatactgcgaacagagaaccccagaagtaggagcaaccgctgcatccaactaaatcacatccggaacgcgttccaacaactttattgccttgaagaagaaatatccaatctgattcaacaaactgcagccatgtgccaaaccccacaagcaacccacaatgtacatggtcctcttcaaagtttcagcttttcttaagatattcatgctattatgacttccaaagattaaggtatcaaagatggaaaagggcagaaacatagacgcagaaagatagcaatgaaatccaagaagaacagagaagaaacaggcaaagtacagcaaataagccacatttcatgctctttcaatggattaaaaacaactgaacgtaccaaggtgagtttaaacaaaatttgaacatgattcctcaaacatcaagcagcaaaagaaaacacccaataatcaacagaaacatcaagtagcaaataacacctaataatcaagaggaaaagagaatagcggaagatgagagatcttctgatcatacctggaaagctttcctctgcttctcttcttttgctgctatcctgctcctccacttccccctctctctccttcttctttgctcttcactgccctcgttttatgttcccccctctctctattctgctcctctctctaagaatcaaccgagatgcatggtctgccctcctctgtttttcttcttttgtcgtccagaatccccccttgcctccaccctttggttccctttttcttttctcacagccccataatctgccctctctcaagaatcagccgagatccttattcttgcataatcctctccttttatgggcgtgggttgctcttgcctttcaatggcttgaggcagccgtccagatgcagccgcgtggtgctatcttcttcccataattagatccacctcccatatgcaagctactgcttttctatttggtttctccatccaccctatgcatgaaaggtaaagcttctctttttgattctcaattccacaaaaaaaaaaaaaaaaaaaatctagcctcttgaccttatttttccttaaaaatttgtgaccttgattctcctttccaaaatatgcaaccaatttgctcatgcaaaatagaataaaataaatataagttagaaatgatgtggttgagaaataagaaaaataataaataataaataaataaaataaaccaaaatacaagtctcatgtatgtaaccaagatattcaaataatgcaacatataaaatcatctcttgattttcttctcatgatcgaaatcaagtccaaatactcaccttaaactcaaaatcatgcagtcaagaacaaacaaacataagtgtgacctaagcctagaaacatctaagtgaaaaaaaaaaacactaaactaaattcaaggggttgccaaggttacagtgtggggtctagatgagtccctgaaccaaaagatttctaaaggtagctcagaaagaagctgaatgagtatcaatggaccaccaaggaattactatgaagtattgaaagagtactcaataggacatgtactaaagaaacaaaataaagggtctacattgaacttaggtgatttaaatatcatttggaccttgattcatatttacgatttgggtttgacttgggttttatttggattcattgattattggattttggttttgtgatattgaatttaggccttattgaatttattttggtttgttacattttaccttgattgattggactcatatattggttattaatttagaattttggactcagacctatagcatgttggatatttctattgggtttcatttattaatttgggctcatttttattagtgagatttattggactaatttgagggttgttttggggcttattgaaagctttgtattttttgatatttactttagactcatttttgttttacattggcccatttcattactcttattggtattctagtagttgagctatgctggcttagcacagatgtgtaacacgtggagaattaaatttcatgaaagaaaatgaggctcaagaagactataaatagagcataagaccttaaacaaaaagagagcattaaacttgttgtaaacctatttaggtacacattttctttcatcgcttctatttagtttcatttctatggactcttgtaaatatctttttatatatatttattggttatgtacaaagttgaaccatgaaccattaacttttttagttcaatgactgatctaatttgaaaaacattgaattttatttcttattttgtcttctcttttaaaaataaataataactccaactttaaaaaaaaaaaaatcaaattttcacataaaaacgagtctcgtcatcaaatagggatgtatatgaaaaatacatgtccataatatgttaaaccaaaaagatacttaaaataaaaaactatctaaaaatatttgatttacgagatttaaattatatctttttacaaaaaaaaatgatataaatacaattacttcccatgcttttttttctcgggtaattgaatttccgcatcaaaattgacccacaataaatagaattatcgttttctcaacaaaacaaataaaataaattaactataaataaataaataaataaaaataatggttcttcctacaaaaatgaatttacatgcaaaaaagtgggttggtatagaaaattactttcatttggttttgaagtccaaataagttcatcaaattactaaaataattggtttgctttacaaggtcatttcttcttcttcttctttttatcttaaaataaattttaaaataaacaaataatgaactaattatatgcaagtaaaattactttcccaaaataattaattcattagaaaaattaaagcctcgttattttattacaaaggtcaatacaaacctgacatgaataattattttattttaacttcatgactaattgacctatctatttaagaacaaatttaaaatgagtcaaatatagattaaatagtttaaagttaatcaataagattattaattgggttaattcaaattatatttatgttacacagattgacccaaaaaccgtctatttattaaatggattatataagtcgacatgaatttgactcaaatttgcttatacttgatctaaacctgtgaaaaaacatcttaagttcaaattatattaacaaatcatattaaactttgttactcctaacgatattaccactatagctagagcaagatcattcctttaatccatccaaaatcattcctgcatcaaaatatatattcatgtcttctcttgtctcgtgtctgcctgattaaatataaaattaattttaaaaattaatttaatttatattttatttttatttttaatatatatgtgtgtgtgtatatatatatatatatataataaattacttctcaataaaaaaaattataatattttaattatttactttaatgtaattaaaaaattaatatttttttaaaaaaaaattcttgcagaaaaaattaaacaagacagataagatggatataggaaatttgcatatcagcctcaccccatgccattttttttttaatagggtagggataaaaattattttaaataaatgggacatgattgaaataggatgacccatctcgttgccatccatccctattaataatatgtccaaaataaataaataaaaatcataccactacatgtaatagccaccccacaatattgcaacaagaataaaataaaggaaaaaaattagcataaaagttaaattagaaaaaaaaatataaaataaaataaaataaagttaaaaagcggccaaaccatattgggccaagagggaacgagtctacattgggccctgcactgggttaaggactgataccatatgatggcatagacctaaaatgagctaagtaacaaatctgggtatagaataggttaagttcaagggaaagaaaatggtaaggaaaaaaattaatgtttttttatttgatgtttatgaaaaaattgaaaaaaaaatcaaggatgaaaatatcagtaatcacggatatattggtatttcgattttacggatatattgaagatatatccgtggatattttgaaaaaaaatatcgataagcctaaaattgatcaaaatttataaaaatacaaaaaaaacttcataaaaaatgtaattaaaagtataatagatatttttaagttgttttattaaagaatttgatatatgtataatatgatttatcatatttgataataatatcatatgcaacaataaaaatatgaattttataagtatacatttattattaaattatatataatattatgatattttattataatatgtttaacttaaaaatatatattaatattaaaattatgatccatttaattcaattgtattaaataatataaaataaattataatatatgtacaattttttaatatttaattaattcattaatgatattgaaaacactgtgaaaaaaattattatgataatttttatatttttggtaatcaattaaaagaaatttttttatttaattataaaataattatatttaatttgccctctaaaatattcttttaaaaatttctttacatgatgactttgaatatatattttaagtacaatctatttaacaaagggcaagcttgccctagtggttggaagcgttgaaccccgaatccctttcaacagcacaaaagaaggagaaatttgagggtgcactatagctcactgtaacgatttgaccagtgattttcatctttttttggcccttttttccattatatcggggatttatcgcaacattttcctcaaaaaaaatcatttggatatttttaaaaaataaaaagtaataataattttatataaaaaatatataaatttactttatattagggttacaatttggacgggttgatcaaattaatgactaacctgaggccaacccaaattaagaaataatcaacccgaacttaactcacctaaactctaacatgagatattcaaactcaagttcaaacttagattgagttcggattattcaaattagactcaaattgatcaagttaaatttaggttggttggactacataattcaaaatctattttaaaaaaaaaaacttttttaatgtatttatacgaaaatttaaataacaaataagataaaatttcaagataataataaaagaataaatataaatttattttttaaaatgaaatatatataatataatataatataatataatttgatttaaaaataaataaataaatattattatataagttaagatgcattataaatattataaaaaacaataattgagattggggtagctttgaattgttacatttcatatattgaaaatcaaaaccattttatttaactatgatgtcatcatcgtaagtaaactgtatttggtgctctttgctgactaccttgtatctggccggcaagtaatttttgtcctctttattttacatgtatgtgaagtttcctcagcagactcattgactcgcagtcaaccaaatcaattttcatatcttcttaaacaaatcatgtttccttcagacaagggaaaagcagagtcgagataggccccgcaccagttgcaacttttgacattttcagaggcattaaaagctcggtggagacgacttcaatggaaccagcagcctgcttcaaccctgctcaacttgattcctttgactgtaagatgaaaaagtcacaggtaagtgacaaaacttatctagaaggtagttttagtctaaattgtttaaaaaaaaaacattaagtgtttaaaggaatttagaaaatatttttaaaaatatgaaaaataatgtagtattgagaaattactaaaattgtgtttaataatgatttttaaaaatgttttgaatatttttaacacttaaaaaattttatttttaaaattaaaaaaactaaaaataattctttaaatgattgttagatgcactataattaaaagtggtttgataatgattctaaaagtatgtttaatttttttaatagttaaaaatttgatttttaagtattagaaatattaaaaatgttttttaaataaattattcttttaaaaacactttcaaataaaacacttctatcaaaaacgcttaatgtaaaaatattgtcaaactcacccgtgtacaaagaaacacttaataaatgaatatgctaaaaatatttttacaatttagagttcgttcgttctgcagtgattttataaagtgcttctaacccttttaatacttaacaaaatttatcatttaaagattaaaaatttttaaaatattttttaaaatcattatcaaatacacttctttttacaaaaagtcatttgaactaaagtcacgcacgttagaatcattccaaaagaaatgtgaggtgatgataatggccagcattctagggaaacttccaggatacagacttgcatcctatgttgattgtctcccactcctcctccatctccatttttctatctctgaaagctcatctcactatcatacacattttaatatcttctttacaagcttatctcaatcccgtaatttgttaatatttatagacctatacgaaaaaatacatgactcagtcaaagtttgcgagtcacgagcccctgctctaaaactctataaaaaggacgcacccccacatacacgttattcaagcacaggccagacagcctcctgcaaga

SEQ ID NO: 10907 - DNA, 1750 bp, Vitis vinifera
  Intron number 2 from transcript GSVIVT01025008001 (locus G SVIVG01025008001) derived from phytozome v7.0 (chr-ID chr6 ; pos 5340683 to 5342432 reverse strand)
acagagcaagaggtgagtcttgagtttatgtctgaacttgccttttttgtgtttgatgatgctcaatcttgtcatataggtattagaagatgaagattagtatcacaacctttgtgttgattctttaatttttctcttttgaaaagtaaatatttgaacatggctgtaatagtggtaacggtgatgagattgtgctagtgggcttaatttatgttaggatcatggttcttaggcaattctattggttttggctgtctgcaataggactggttctcagctgaaatgtatggatacaaaaatgtattttataagaagttctggaatatcatgaaaatatatataggatagtggaaatacacattggaatagttgcatgatcaatttttttgataggtaaaaaagatgtgcattagacaagaaactccaaaaaagcgcccccatggtacacagggggtatacagagagcaccaacagcaccataaataagaaagagggcctaacaaaaaacagcacccctcaacaagtcgctatccaatccacaaaatctataatagaggaactataaacaatttggaccaagcccacaaattacaaaaaaaaaacaaacttaattccctgatccgaaagctctttgttatcaatacaaagacatctgaatgtatgccaggcccttagagtgtcttgcaagttacaagttctagtgaaattatctatagttccagtacatagcatgaacaatttaatctggagttaaatcatggttcctgctaccttgatttttttagttgaagtttgaattccttaaaatctccatactagttctgccttaaaaggaaaaaagttttctatattagctctaccttcattttgactaaagttgttttaaacatggattacaaaagcatacacacacacacttacatatatgtacatgaattcatatgttgcaccttagagatggaaaatctgaaaaaaaaagtaagcactgagcagtaacaattcttaacatttgatgctttgaatagttaatggctattagaatctgaaattaatgacaattttgtagaatttgaacttcttcagttaaaaataagttttaagaaccctttgatgtaagaataaatcatctgctcattgttaggaacaagcaaaacctggatataaccaactgcagtgtgtctactgtcagaatagttcttgttgatgccttgttaagcttgtgtatgatgagatccatggagctttataatcctaaagattacaagacataaccaaaatgcttgttagttgcataattcagcatgatctgtgatgaaaaatgctagttagcttgttgatacgtacttttttgttttatttctttcctttttgataagctcctttatcttagggtttcactcaagcatgtattttgtgcatgtgtgcacaactccttccacattttatagtaaaaaaatgctgagaatggcaaaagcaaacaatcccaattgatctgcctttttggctggtatctctgtattgcttaacacctacttatgtgttgaagtgttagagataaaacgttcttgcctaagtagaatttcattccatgtcccttgcaactatatttacattcaaatactttaattgggattaatttgcattttctcatgcatcattaggatcaaacctagttattgtagttgactcaaagtcaaaaccttttactcttacaattttctaattttctaaatttgcattggaagcagat

SEQ ID NO: 10908 - DNA, 12266 bp, Vitis vinifera
  Intron number 16 from transcript GSVIVT01025216001 (locus GSVIVG01025216001) derived from phytozome v7.0 (chr-ID chr 6; pos 3207839 to 3220104)
cagcatccatattacaggcttttcagatatctctggtgagaacctccttcttcttatttatgttgctgttccatcattagttatttgtgataatatcttcattttctgaatgagaggcatgacattagtcattctggtagtgtgaatggaaaagtaaaagaaaaattctgaaagtatgcttttattccttatattagacaaaaagtcatctttgaccctttgtttccaagtttttcatatccaaaaaaatcacttccattcaagaaaccattgaaactaaatttctatccaataaaactcaatccttaaatttctgataatgtctgtctaaaataggatttattgggactgaattcccattcgaagcataatgaagacccccttttgtcttttaactctaaaactaaaatagactgtacctagactctaggtgatgtccaatttgataaaataagctagacctctacatgtttgtatttctactcctagaacttggttgttttgagcttctttgcaagcaaggaagaaaatatggagactacagcagatcaactgaaggtgggagcatttgttcttgatgaaggccaatgatttcctgtagttctatgtccttttagactgatacatttcatgcaaatgaacaagcaaaggatttccatacttggatatacagaagttccgagctctagctttggaaatgccttttctaagctgcccacctctttgctactctcattgattctctcataagatgatcatacatgcaagtcaagctcacaagcagttgtggaacatcttccctcatctctgctggtgtgtaatgccaatcaaggtatcaaaagatctgtcaagatggcgtatcataatcattcagtagtggaccagccctagcagcaaaagcagttcagccagaacagctgcaggtggcgcactcaatcagcaaaggaagaacacatgacaaaagcgctccaaacaaaggggcgctcaaatgaacttatgtggatccttttcatggaaattgcctctaaaggttttagcactctaatctttatataaattaatttgggtcctcagaaaatacaccctactctctggtatatcctagaaaccaacaaaaccctgttgtatcaggaaagaaaaagtacaaaaacaccagattatgagtttcatttagtagatcaaatatacagaaaatgggggtaatatgatgattttggccagttggttttattctttaaatggggaacattttcgtaatacttctaatggtaaaactcatctaccttaagttatttaccacatgaaacccatctggtagaggattctgatctcccttcgcccctttccctccttttctaatgcaaagttacaagattttattgccttgtcactataggaaagggctcattgaataatgccctacagaaataggtttgactgagagattggatttccttggacaacctgatttttgcccttagagctttacttgataggatgaagttctccacagcagctcagaaatcctgccaaagcagtggcagactcctgtatcctgttggcattttagtcattcagacctaacaattcaagaaagggccttgatgttgagtacaagtcttatttagatgcagattaaccaaagttcaggaatcaagcttattttcattggagcttccttttatgggtctttgaatatgcaaatatatttgtgggtttcatagattaaatagaggcagggagtttgtttttttgtaagtttaatagtcatgattatattatgtccaatgattgtgattatattattttgagcttcccctggcattgcctttggtcaaactttagtaatcatcactgatctagcttcttatttgaatgaagacaaaaaacaaaaatggaaattagcccattatcttttttggtttaggcttttattgtgaaaagagatccaattccctctatatcttttgcaattgctccttggtctagggtttacatgccggctctgaattttatggattgacctgccattgcataatgctttttttttttctgtaaattcaagataaagatgatttttgcttagcccacccccagctctcaatgtgaagtctttgattctctactactttctctaatgctagctctcaattgatatcgtctagtcaaaaaacaaatgaaactttaatggttcctcgaatccataaggtaaataaatgtgtcatggcccctttgaaggcctagtgtagtgcccaaaaagagttagaccaaaaagatttctaactttagacctattagcttgaccacaagtttgtataaggtcatagcctaagtattatcgaggtggttatgaggtgtccttcatgaaaccatccatgctacacaaggagcttttgtttaggggaggcaaatattggacacggtgttggtagccaatgaaatagatgaaaaaagacactcaagagaggaagaggtagtttcaaaattgatttcgaaatggcttatgatcatgtggattgggttttctaaaccataagaaaggggtttagttctggattgaggacttggatgagaggttgtttgtcattggtaacttttgcaatcctagtgaacaaaaatgccaaaggttgggtcaaagcatctagaggactaaaacaaggagagctgctatccccttttctctttactattgtggctaatgtgttaagtaggatgatattgagagctaaggagagtaggttgttggatgacttcattgtaggaaggagtagaagtagagtgtctcatatgcaatttgtaaatgacaccatcttttctagagcctgttcgaaataattgcaaactcttaaaattattttgttagtgtttgggcagatttttggacttacggtcaatcttaacaagagcaccctctctggcatcattgttgatcaagtttagttcactagattgacattattgcttgattgtaaggcttctaactagcctcttccttatcctgatctcccattgggaggaggaagtggtttttgggattcggcggttgagagaattttgcgaagtttagatgagtggaaaaaaacctatttgtcattcagtgaaaggataacttttatttaatcatgcatgttccattttcctaattattttctctccttgttcaagatcctctctttagtggccagaaattttgaaaaattacaaagggatttcctttggtcaggagctaaggagagcaagagaaactatctttttagttagaatttagtgcgtaagtctaaggcagaaaagggtatggggtttgggaagatctccctaagaaatcgttctatattagggaaatggttgtggaggtttcctaggaaaagttttgcttagtggtatcaaattattctaagcatttctaggacacatactaatgggtgggatgctaacaccatagtttggtggtcacattattgcccatggaaggccattgcataggtctttcagaattttactaggtacacttggtttgtggtgggagatgaggcaagaatctatttttgggaagattagatgggggggggggggtcaacctatgggttctcaattcccaattatattcaaaatcgtcacaattaaaagctttcctatttcatcaatccttgggtcttcttattcattctcttggaactttaacttcctttgtaacctctctgattttgatatagaagatctagaaagactaatgtcctctcttacttgtttgcacttatctccatttactccaaatgtgagagcttggtttttatcttcttcaagtttatttatagtaaaatcattttttgtagccttgtcaaatcattctgacctagttcatttcctccttattaattatgtttggaaatctcaagtccctcttaaggtcaagtactttgtttggttagtggcacataagaaggtaaacactaatgacatgctatagttgaaaagatcatacaaagcccttagtcctgatgtttatatgttgtgtatggagcatggtgaattggtagatcatctttttttatattgtttattgactttagggttgtggcacagattatttagattggctaagttggattgggttcctcttaagagtatttgtaacataatgaccattgcatataagggattggggagctctagtagagacttggtactgtgacaaattgcttgtttagctttgatctattgtatggccggaaagaaatgcttagattttttaggataaggcgaggacttcagtgattctttgggataccattcatttccttactttcttttgagcctcttgcatcatggtttttaagggcattccccttaatgtggttcaatttgattggttgttggtgtgtaggtctaaagttgtgggttagcaagtagaagttgttttgtgtactttccatatggtgtataggtttacttagtatgttggaggttccaattgtttcattctttatttttggaaggatttctcatccttcttttgtactttttaaatccttatttactatattacattattgtttctcattaaaagaaaaaaaaagggatcatagcatctaactttcaagattttattttatgataggaaaaaaattggtcttcttatataaaatcatatacaaacacatcatatacaaacatgtatacatctaaactatatatttttattgctacacaagcatatagagcttaactctagataactaaagtgctcatgacgcaggacatataaacctcatgtgggatagcattttgcatagcttttagctagaagtagaaatggcttgtatagagccagttttagcaactatgaacatcaagctagtcaatacaatgagaatgccatccaaaagggcaatagtagggtacattctatgcataaggtttattttaggaaaaagtatagaccttttcctaagtttttagtgattcttaggatttgatgttgttgttattgggcattttagtggtcacatgaagatcattagttggaatattggagggttgggttctagaaaggaaagaatggtccttaaaggttttgtttactatgaaaccccaaatattgtgatgcttcaagaaacaaagaaggagacatgtgataggaggtttgtgggcagtgtgtggaaagttagaaataaggagcaggcgattcttccagcttgtggggcattgggaggggttgtgataatatggggctcaaacaagtttagttgttcagagttggttttaggatctttttcggtaacaattaggtcggtttcaaatgaagaggggattttttggctcaacttagtttatggtcctaataattccaatctaaggaaggatttttggatgaagcttcaggacctttttggactaatgttttctaaatgacatgtaagggggtgggggttggtggtttaatgtcataagaagaatttcgaaaaagttgggtgtctccagattaacccctatcatgagggtttttttgtgaattcataagagaaagtgaagtaatcaaccctccctttgaaaacttgcctttcacttggtcaaacatgcaagatttccctttctgcaagagatgggatagatttttatacttaaaatgagtgggagcaaagtttctctcaaagcctttaagaagcacttcattgagatttcaagaaaagatttattttttttagtggcatgagtgctaggttgtaggatcggaaggtcataaattcatgaagaagctactatttgttaaatctaaaatgaaagaatggaataaggtgccttttggagatgtaaaagagaaaaaaagagaacattcttacagacactgaaaattgatgctagtaagtaggaagagaatctgatcgttgaactttcaatagtgagggccctaaggaagggggaattggaagagttactgttaaaggaagtgatatgttggaggcaaaaatataggggtctaagtattttcataggatggccaactgtaggcgaaaaaagaaattcatcaagtcagtgcttgaagaggaggtaactctagacaatattgaaaactgttgaatataatgaatttatagtgtacaatctttcctttttttaatataggtcacatgtatggtagttaggactcctagccttgtatatatatattttctcaattgtaagtagacactacatgaatgagaatcaaggttttcttctctctctctcttaacatggtatcagagccaagggagaaaacctaattctttccagtttccctgtgttatcaattccgggaaaccttcctgtgaccgtgtttcattccggtcaccttccccagaccccaaagcttttcaatcggtcgaatcgtcgtcagaaaacatttaccaccggcgacttttccggcgacgtctttttccgacaccgcaaggagcgcttgggggagatctccaatttttcccaaagcatcggagcaagaaaaccacccacgcaatggccacgcgcattttttcggccggcaactgcatctcacgcgccggcgcgtgagccactttccggctacgcgcttcctcctccagcctcgcctgacgccgaatagccaccctttatacctgtttctaccatccgagccttgcacgtgcctcttttggggttcttttgcctccgtcggccctccgaacagtttttccggcgtccttcggctattttttctcaaccccaatccctgcacgtgccttgggaagtgttcttctacctttccggtggtgccacggttgtttttcttttctatttggtctctcacacgggcgattcttcggtttttccttcttcagccgcatctgaagccgtattagggctctcttcgatccaaatatacttcattctccaaataagtggatatggctactaaaactttcattttttcctctgtcatatctggatctcctatgattacttcggagaaattggttggcagtgaaaattatctttcttggtctgcctctgttgaactttggtttataggacaaggatatgaggatcacttggttacacaggaggcagatatccctgaggttgagcgcgtacagtggagaaagatagatgcctagttatgtagtgtattatggcaatcagttgatcccaagatccttcttcatcttcaggcctacaaaatttgttttaaattttggactcaggccaaaggattatacacgaatgatatccagcgtctttataaggtggcttctgctattgtccatatcagccaacaggacttggatctatctacttatattggccagattgcctttcttaaggaggagttcttgactgtgatgcctcttactcctgatgttggggctcaacaaacacagcttgataagttctccatggctgctatgtgttcttggcctctttattagttggatattaaaaatgccttccttcatggtgatcttgccgaggaagtttatatggagcaacctcctggttttgttgctcagggggagtctagtttagtgtgcaggttacgccgttctctatatggcttgaaacaatcttctcgagcatggtttgaccattttagttctgttgtttaagagtttggcatgcttcgcagtacagcagaccattcagttttctatcatcataactccttggggcagtgtatttatctggttgtttatgtggacgacatcgtcattacaggtagtgatcaggatggtattcagaaactaaagcaacatctttttactcactttcagaccaaagacttggggaaactcaagtgtttcttgggaattgagatagcttaatccagttccgatgtggtcctttcccaaaggaagtatgctttagacatcctggaagaaactggtatgttagactgtaaaccgatagacacacctatggatccgaatgtcaaacttgtaccaggacagggggagcctttaggagaccctgggagatatcaacggctcgtaggtaaattgaactatctcaccattactcgtccagacatttcttttcctgtgagtattgttagtcaattcctacagtcaccatgtgatagccattgggatgccgtaatccgcattctttgatatatcaaaagtacatcaggccaaggtgtgttgtacgagaacagaggtcatactcaggttgttggttacacagatgcagattaggctggctcacccacagatagactttccacttcagggtactgtgtttttattggaggtaatctaatatcttggaagagtaagaaacaagatgtagtggccagatctagtgctgaagctgagtatcgagttatgactttggcaacatgtgaactcatatggttgagacatcttcttcgagagttgagatttggaaaggatgaacaaatgaaactcatctgtgataaccaggccgcattacatattgcatctaatccagtctttcatgaaaggaccaaacatattaaagttgactgtcacttcattagcgagaagatcgcatcaggatgtgttgctacaagttttgttaattcaaatgatcaactagcagacatcttcactaaatctctcagaggtcctaggattaaatatatttgtaacaagtttggtgcatatgacgtatatgctccagcttgagggggagtgttgaatataatgaatttatagtgtacaatctttcctttttttaatataggtcacatgtatggtagttaggactcctagccttgtatatatatattttctcaattgtaagtagacactacatgaatgagaatcaaggttttcttctctttctctcttaacaaaaacattttggaaaaggtagtgcatttttttggaaagctatactccaagcctataagcgattcttagaggttagaaggattgaattagtcctccatatcatcaaagagtgttgtatgcttggaccacccctttttggaagaggaggtacgcaatgccattttttagttggacaacaaaaagggaaaaacccccactgcctagcgattttaccatagcaatatttcaatagtgttgggatatgattaaggaagatctaccaagggtgtttttggagttccacattattaagggaataaaccaaagtactaatactacctttattgctcttgttctgaaaaagaggcaaaccaacaaaatctcaaatttaagacttatcagcctagtcactagtctgtacaagactatagttaagcttttcttagggcatgtccaaagagcttttgttgaggggagacaaatttattgtcaatcaaatggtggatgagaaaaggcattcaggagataaagggacagtcttaaaaattgattttgaaaaggtctacaatcatgtggattaggaatttcttgatcacgtaagagagagatagagggctcatcacaaaatagtggtcatggatgaggggcagcttctccttaaaaagttttgcagttttagtaaatagaaatgccaaaggatgtgttaaggcaaccagagggttaagacaagaatgggtcatgtactagaagttttttttttttttttctttttgatacattgattatggatttataggaacttagaacttttggcttgatatttatctacaaagtagtggaaacttagaactaaatgtaattttcagaagttttagagaccattttgtagatttatgatggattgatgcatttaaaatattaaatttttgtaagttgatttcattgaaactcgagcattcagggtttgttacgtgagatattgatgaatgcctgttgacctctttttaacctattttctatgaaatttgttttatattgctttagatactccctcaatgtgtgtatttcaataagtatgcgtgttttatttatttagttatttcccaatctgtaaggcaaacttaccgaaactatgcaaaaaaattggaaaccatgtctgatatgatttaagagttgagtatgtccacacagaagtggcaacttttgatggagctgtctccccggggcttttcattcaaatatgaacctccagccacatttgctaaggacttaaaaacatgcttggaacaaagcactccattcagacacttctccaaaacaagcaattcctttttgatgtataccttttttctttcctactgggacttgaacttgagctatctccaatgtttcaacatcataaaaggccatttttttctcctggtaaattcaacttttaatggctaaatttacattttatgctagtttcctgatccctgccctttcccactattttaggtggaaaggcttcaaggggctggaaatttgaaacatgaattcaaataattttttttggaattgtattactatgattggatgttttatggttctaggagtcactcttttctccattcctttcatggtttatcttgtttaggtgtgtgataatcttttgatttccatttcttttctttttgcctcctttttctagaggtgcctcttgtattcctcccatgtaccagcttacaatctgatggtttctttaatacatcttacttatcagaaaagaatttaacaaattgaaaagaaaaatgctttgtaaatgtctgttaagctcattaatggcttacttaaacaatttaaaagcaaaaatgatctcccaacttatttaccttccaagaactgttaatactacttaatttaagctaatacgttctgttttgatgaaatttcgaatcaacctaatcaaattttttctcctcaaaaataaaaaataaaaataaaaaagttaaaatagtctcatcttgctattttaaatacaaaagtctctgaatcagtagaattcaaaaactttatgtatcttctgatgatgaatttgtttcattgaactaaattttaaagcaaaccctgtattagtttacaaattctgggatatggtatattttctttgtgtcctttcctctgccactcatctttcagaaaagggaaacaagagaaaattctcccagttttccctatcaaagagagagagagagagaattgtctcccactcgatataaattttaattttaagaatcctgctcataacttttatgaattcactataaaagactggctacttgtcccagaaatatcgtaattaaggtatgtgctcaaattagtatttgattaattataaaaatcagcatcaatgacataggaaaaataattattaaaactgctgttttctctgtattaaatctgttatcctgtattattgtctttttgtttggcttagtgggttgtctgtgtatggtatgtacatcctgtgtacctcattttcacctccattaagttgttctcattacttgacaaataaagaaaaaaattattacaattcttctttttctctgtagcatggttgagtgggccttctatgtgtgtgtgtgcgcgaggaaggaagggagggagaggaggagaaagagattttaaattcatttggaattttgaatttagatgttcataggtatggatgcaagcaagcatggttaaggggccttctatgtgtgtgcgtgcatatgtgagggaaggatagagagaaggagagattttaaattgatttggaatttttaatttttatctagttaggcccctttctcattcgtgcacatacagatgtgtccaaatatacgagtgtctctatgtgtatgtgtaagctcactcaaatgcatcatgtgcaaaagtattgatgtgcatgcagatactttagtgtttgagaagacgttaaacctagtttggtgcctcacatgcatgtgcaagcagatgtgtgtgagtcagtgaataggtgtgcctctatatatgcacacagctcaatctcttgcttcatgcacataaatatttgtaggggttaatttcattcacctcccctaaggttttgactaaatacacctagctctcattggtttaaaatttcatccaatacctctcttatttgtagacgagaggtgagtgaaagttttgactaaatacacctagctcccattggtttaaaacttcatcatatatctctcttattttgagtagagaggaggtgagtgaaaataataaatgagaaagatagggaaggtgtttgatgaaattgcaagccaatgagggtcaattatatttagccaaatcttgaggggaggtgaataaaattaatccatatttgtagactagctgtgcttgtgatattatatatttgatatttctaatattactggtgtgctggacaatttgcagtgctggactgctgcttctttg

SEQ ID NO: 10909 - DNA, 6241 bp, Vitis vinifera
  Intron number 10 from transcript GSVIVT01008929001 (locus GSVIVG01008929001) derived from phytozome v7.0 (chr-ID chr 18; pos 3498795 to 3505035)
gaaataggtatggtaattgaatgttattttatccatgaatatatgttttctatacagataataatgattttttttattcttttcaactaagatagagaaaatgtggaaactgtacttggtaattatctggtgtctaaacatgttatgcagtcaattgtgagttccaatggtaaaccataagaggctactcaaaatgacttatgacacaagtccaagtgcttattgaaattgcactctttgttactgttggaagataaaatcttctccttatttctttgaaaaattagtacaaatatatatatatatatataactttcaaacttgtacgataaatgaaaatagaataagacaactaacctgttcctaaagttcttccaacaaatcctgtaaattacaacttccctaatttacatagtcaactaatctaaatatgcagaaaatatacacaaaatcaggaataaatcaaataaactccataaaatcaggaataattattggattccaacactccctctcaagttgattcaaagatatcgtccattcccatcttgctaaccatggagttgaatgtaggattttgaactccctttgtgaaaacatcagctagttgtagtttggatgcaataaacagagtgcaaatcagtccactatcaatcttttctttaatgaaatatctatcaatctcaacatgtttagttttgttatgttgtactaggttgtgagcaatgctaactgcagccttgttatcacaatacagtctcatgggattctcaagattaacttgtagttccctcaataaaccctttagccacatgagttcacaaatgccaagggccatggtttgaaactctgcttcaacactagatcgaacaactacatgtttctttttgcttctccaagtaacgaaattgtcatctactaaagtacagtaccctaaagtagatctctcatcaatagtagaacctgctcaatttgcatctgtgtaagcctcaactctaaggtaattgttatttgagaacaataaaccttttcctatagttgactttaggtacctcaaaattctcaagactctatccatatgacattataagggagagtgcataaactgacttaccatgctaatagcatatgctatatctggccttgtatgggataaataaattaatctcccaacaagtctttgatatctccctttgtcaactggtattccttcagtcatgaagtctaattgatgattttgattgataggtgtacctacaggtttgcatcatagcatcccggtttcatttagcaaattaaggatatacttcctttgagtaacataaattcctctttttgatcttgccacctcaatgccaagaaaatatcttagatttccaagatctttgatgtcgaattcttttgccaacttaagattttgcatctcttcgacatcatctctagtgacaattatgtcatctacgcaaacaataagtgcagtaatctttttttcaggtgattgcttgatgaaaagggtatgatttccttggctttggtgataaccaaatttgagcagaaacttagcatatctctcaaatcatgcccgagaagattgcttcaaaccatacaatgatttcttcaatctacaatccttttcactgctgaattttccttcaaaaccaagaggcaaatccataaatacttcttccaaattcccatgcaaaaaaacattttttacatcaaatttttgtaaaggccaatcaagatttgctgttaaggataaaagaactctaacgaaattcatctttgccacaagtgcaaaagtttcttggtagtcaattccataggcttgtgtgtatccctttgctactaatttagctttataccactcaatcaaaccattaggtttgtattttatagtaaacaccacttgtatcccactgatttttttctttgagcaaatcaataatatcccatgtttcatttttagacaaggctttcatctcctcatttatagcctccttccacctaggatcacttagagcctcttttacatttttaggaactgaatctgaggagaaatgagtggtagaggccttatattggtggcaaattctgttgatacgatagaaagtttgacaaaggatgtttagtggaacttctatcacctttgcaaataactataggaatatcaagatcagtgtcaaaaccatgattgagaagagagggattagaaggattagatgtacctaattttggagttgatgactggtcatgtgtaagagagattgattcttactcttgcattggtaaccttggcctcctagagtaaaccatcaagtctgaatcaacattttctgctactgctggttttaagatgtcggttttttttcctattgttggttgcgtgatgtcttcctcctctacatcaccatattcagtagcattttctgctattgttggttttatgatgtcggtttcttttcatgttgttggttgtatgttgttttcctcctttacattaccatgttcagtagcataactccaaatgggtaaaggaagcatccaagattgatcttcttgcaatattttctccccctgaagattacatatctggtaatagggttggttttcaaaaaaacttgcatctatggagacaaatttcctttgtgtaggtggatgctagcatttgtaccttttttgtgtgggggaataacccaaaaaaatacacttaatggctttgggatcaagcatgaatctatttttgtttgggatatggacaaatatagcacaaccaaagactttgggtggaagaaagccaagatgtaggtgttgttttaggctgtctattgaagtcttggagtttaggctttttgtgggctgttgtaagcaccacatctccccaaaaaaacttaggaacgtttgtagcaaacattagggctctagctacctccaacaaatgtttattctttctttcagctaccctattttgttgaggaatgcctactcaagaggtttgatgaataatcccattctccaagaaataatttccaagagtttggtttaaatactcccctcctttatccgacctcacaacttgcaattttgcattaaattgggttcagatcatttgatggaactatttaagagtgaggataatatcggatttttcttttaggagagatccatgtggtttgagtacaatcatcactaaaacttatgaaccattttgctcttgaacaataaggaacttgtaaaggaccccaaacatcagtgtggatgagagaaaaaagaaattcactccttttactactcaaaagtataagaaatatggtggttttttgataactcacaaacttcgcattggaatttagaaggatccaggttgacacacaatttagggtacaaagttttcaaagagaaaaaacttggatgccctaatctttcatgcattgaccagagttcttcttctttttctacatttccttttatttgatgagcttgaatctttcctggctccttagtaaccaagtaattgagaccctttctctttttagcactaccaattacctttctcatagttgggtcttgaaacacacaatgagtgaaaaagaaagttataaagcaattttgagattttgttaatttattgatggacaataagttacaagacatatttgggacatgcaaaacagatgaaagagtgatattgagagtgattgaaacattgcctttaccactaataggagtcaaagatccattagcaacctatattttttggttactaaaacatgaaatgtaggatagaaaaacattactctttggtcatgtgattagttgcccctaaatcaataatctaaatgttagaatgaagaatactagaagttctaagggctattttaaaagtacctaattgtgcaaaaacacaataagtggaggaagaggaaacctcggattttcccataatcttatacgagagatttagttgttcttttgtgaaagggagactgtttgaggttgatgtcgaacctagcatctttgttgtttctaaattgtgtattacccttgtggctgtccttagcccttgatcatggctttccatgcaatttccaacacgtctctctagtgtgtcttggcttattacaatgatgccaataaataagggttgatggcaatagaaggttgtgaatatgataggcaagtcttggcaatgaaagccaagaagaagtaaaaaaactaccataaacctttttccagctctgataccatgttggaaaataaaatcttcttcttatttttttgaaaatttagtacaaatatatatatatatatatatatatatatatataactttcaaacttgtacaataaatggaaatagaataagacgattgacctattcctaaaattcttcctacaaatcctctaaattacaaccttcctaatttacgtagtcaactaatctaaatatgcagaaaatatacacaaaaattaggaagaaatcaaataaactccatgaaatcaagaataattattggattccaacagttacctgtttgagttatattgttttttagatctctccttatctccagaatccaaatttttcattttcacctttaatcacatcaatcaatagtctataatcaaataatggacataaagaaacctcatgtctagtgctagcccgctaggctgctagttccctctccttgaatgatgtgtatctctgaactatttatgtttttgcaaactttatcttatgctgctactttttttttgtttcttttgaattataaagtttcttgcctctggaaactgcatcttgtttttactgagtcaatgatattctttttatctcaaaaacttatgtaaaagattattatgataatcttgacatgacgctgagctggtttatgcattaaactgttgatatgttaatctctctctttctcaaaacgttagagatatgatcttgtactaattgatatgatcatcaaccaagctgacttgctgtgcctgtcttaatgcagttatatctggaacaataacattaatccattctactgttagattggcctttttaactaatctgtgattcacggcttcatacacatccatttatttaataaaaaaatttagtttagataagaaaaagaaaaaagaccagttatgttggtggcctgggttgcattacatcattttgagaataataagataaacagagatgcggtgctctctgggattctcatttccctgacagatccctgagctgctggaagtatctcaagataatagtcagtttggtctttttgtgcatatgactgtcataggacttgcaaataatttgaaaaagttgtttgatagttccattcatagagacactgaaatttggtgctttatgcattcaacaacttcaatacagggtttctgattttcctcctatattgcccctttatttgaatttttacctcttctctcattatggacagctgtgatatgagttggcatggttgaaaagacaccacccggggactatattctcttgaaaccttgttttaatcacaaagaattacaaaaacttgttctgcttcagagcttctgtcgtgttccatcttgcacagtgcatcaaaattatccagttaatatcctcattttcctaaggtcatcatactgggtttgaattcttctgcttgtactatcatcttactcatcgttctgggatctcattttgggttgttggactttgtggcattccagttatgactagtgagctagactgtcctttttgctagttttggatgccacattgcaatgtgattatcatgtttattaaacataatgttgggtgatatgaatactatttgggttttggtctttcttttaacgctttttcttgcaaaagagcttcaattgtgtatatacaccagacctgcagaaaccttttctttttcctataaatgataaagattgtgagaaacatatctccttctgcatttaaagccaaggatggtcattaaacagcctattaagcatgcttttgttggttttcttgaaaattttctgaattttatgttttgcaatgcgatatcttcttaagataagttgctgaaattgtttccagtggtttgcatttggatgccgtggttgcaaaaatacattattgtagtaacctaaccatgatctcaatatacagtaattgtaatagtatttttcatgtggctacagcttcgacttcttcaaaggactgatcaggaggaaac

SEQ ID NO: 10910 - DNA, 12252 bp, Vitis vinifera
  Intron number 13 from transcript GSVIVT01030942001 (locus GSVIVG01030942001) derived from phytozome v7.0 (chr-ID chr 14; pos 19511032 to 19523283)
gcaaagattccttgatcacattggatagcataaaggtgttgtgcatcatcttttctgatggtcttgtggtctagtgcttcaattcgtagttactgaatcatggaaaaatctgcttaaagtcttagattttatcctaaattcttttgaaattatttctgactaaggtgcctgaaatactttaaaaatattttattttccttcctttttaggaatatttttttgaatctttacataggggagatcctcatacactaatggaaatatgttttatgcatgggacaaaaatatagagatgaaagaaatcagtcaggtttcaagtctgaccagtttatatttccattgttgttgaggtacatccaccctacccatctaattgttgtctttggctgtttgcaagactgaaaaagggaggggttggggtgtggtaattggggcgaggggcttgaggacatttgctgccagaagtagccccaacacagttaccaatggaaggaaagtttcagccttctaaggtgagactagtctcagcttaaacaattgagtacggtgtaatgccccaaagtccccagcccctcctaaagatccaaaccatgtactgcagctggttccagtcagtaacatgagattggtcaaacttgaaatctttattatctgatactgtatgtcttgaaaatgtatttttatgcctttctcaaaaatataaagtttcaaagaacaggttgagtaaataagttatgcacaatgtagctctattctgcttttctcttatcaggaaaaaaaattgattcattgatataaattagaaattataaagaaggatgagttatcctcaaacatgattataaaatctgtgactgaagaaaagaaactaaaacacaaacacacagacacagtggctacaactcaaggtggtatgtggagatctagagaaaatctggaatgaactgctgtgttacagttgtgtcacagctttggtatagttgtatttcctattctaattttattccctgattttatgagactttctctcctaaaatcaaggattatatttctcttctaaggtaaatgaccttagctattcatgtatcaatatcggtactataatcggtttgaagatagagaaaaagaagtttttttttttttttctccctcaaatttcttcatcgttaagaatgacctacaaagaaatctaactcaaggcatcgttaagatccactttctgggtatagcgcaaggaacccaagtgtgggaaaacactaacgacatcagttatttggtgtaaccacaccatatattcacgtacttctgctttaacattcaggatatgacagtagctgaatcttccttggctaagatgattgggactcaaaagtctagcctgatgaaggacttcaaaaagtgcaagatctctgaccctacagccactcctatcctaggaggtttgaagaaggctccaaacattcttttttttttgataggtaaaagtaattgtattaaaaagaaaagtatacacgatgcatacaaggaacaaaaaacaaaaaggcgtggacacacaaaaacaaccgcaccttacggagctcctaaccaatctacaaaatcaagcatcaacaaggagttatccccaatatacaatcttacccaattacaaaattgatacaaaaaagaactttttaaagaatgatttgaacattcacaattttgaaaggctctcctctttctttccctccaaatggaccaaaaaaagcataatggagcagcctttcaagccttttttctttttctaccaacaggaaagcctccccaactcaagagaaaacctctcaccgaagagtgcatcacccactgtacaccaaataaagcaaaaattagctgccacaaaatacgagctttcgggcaatgaagaagaatatgaacactcgtttcttcttcctctttgcacatgtagcatctattaggcatcttccacctcctctttttgagctgatctagagtcaatcttggcccaagttgcctcccaagcaacgaagctaactctaacaagggcccaggagttccagactatactgtgagggaaaagatctactcccctactagccaaggaggagtagaaggacctaacaaaaaaaataccactctttgtgtcaagccactccactgaatcctcagaatccatagaaatagaatgatcatacagcctttcaaatcctccaacttgtttgaatgttggtgtgtgggtctaaaggagtgggctagcaaggactgattgctttttgtatattcccatatgggttgtggcacctcatagttgtataaaacttccaaatacaacaggtaagctttctccctctatgagttgtggcccttctaggattccccctcattggaagacccaaatacaagaagggccaatactagcataaaagaccactgttggatgatgtgacaattcaacgatgccaactatttcctttagaaaggcctaatactagcataaaagatgataaagtaaaagtcttccagatacagaatctttaggtttccagcactatagaagtttatttgttgtagaacgagatgaaagatcaaagaagataaaaggaaagaaagaaatccttggcaattacaccaaagtgtgagagctacagagaaaaatattttttctgcattttctatgcataataatttcagagtttacaatcctatttatttacaacacatattatagagtaattctatgtgcatagggaatttagcctaaaaattagctgaaaaaataggaactgctatatttaaaaattataggggataatttccaaaatctctcctaatctattgcaatctatcctaatctgttgctcctaatctgcataactaatcgcctaatttaccacacaagatttgcactcctcaagctggctcgaaaatatcttgcattcccgattgcatgtaagattatcaaatcacccttgcagcaatccttagtaagaacatcgaccagttgttcttcagttagaatgtaaggcatgcaaatcaaatgttaatcaaaagttgcaaagagatttcttgtggggagggggaagttcggaaagaaaagcccacctagtcaattgggagagggtgtgtgtgggtaaggaggaggggggcttggtttgaggaggttagcccccttgaacaaagctttgcttggaaaatgggtgtggagatttgcttgggccaaggacgagatgtggaaacgagttcttgtggcaaaatatgggtaagaggattttgggtggaggactaaaaaggcaaatggggcatttggtgttggggtttggaaggagatcttgaaagaagctgattggtgttgggataatatgacttttaaggtgggaaaaggcaccagaattaggttttgggaagacccttggtgtggggatgtggagctgtctcggaggttccctcaactcttcactgcagctgcccaaaggaacgccacagtggaggacatttgggaccagaattctggtcaaggagggtggaatctgaggttcattagaggcttcaatgattgggagctgaacatggtagataaattactccaaatcttaaggagtcaaagaattacattggaggaagactcagcattgtggaagggaggaaaaaaggggaagtttggccttaaggaagcgtatggtttgctgatcagccttagtgtatccacgtttcctaaaaagggcatttgggtggagaacgttccttctaagctagcgttctttgcgtgggaagctacttgggggagggttcttacccttgataggcttcaaaagagaggatggcagcttcctaaccgttgttttttatgtggtagtgatgaggaaaatgtaaatcatcttcttattcattgtacagtggctagagtgttgtgagggattgttctgagtttgtttggtgcccagtgggtctttccagaatctgtaaaggaggtggttttcagctggaatggtttgtttgtgggtaaaaagagggagaaaatatggagatcaattccgttatttattttttggatggtttgaaaggagaggaatagattagctttcaaggggggggtgttagatatccagaaagttaagaattcttttgtttgtaatgtgtgggggtgggctaaattgtatagcggtgcggagcctcgctcccttataggcttcctggagtggttagcctccagttaagggtcggtgggttttttgtttcttttgtcttttgttgagagccctcgtcgccccgtatactccctgtatgctttgcagcgttttgccttttgataatatatgtgtttatttatcgaaaaaaaatcaatctccacacatttagttttattgtgttgaactggattatgagttatattgatattgatagctgctttattgtcatggtagagcttcataggcaatggactgggaattttcaagtctttaagtagtttttcaaccaaagtatgtcacaaatcccatgagcaacaacttgaaacaccgattcagatctaccctttgttatcaccatttgttttttacttctctaactaagttacctctaacaaaagtgcagtaccctaaattggatcttttatccgttccactacttgcccagttaacatcagtgtaggctttcaatctacaaatggtcatgattctcaaacagtaatcctctccttgatgtcccttttagatatttgagaatcagttggactacttcaaaatgttcatctcctggtgagtgcatgaattaactgactacaccaactgcaaaagttatgtctagtcgagcatgcggaagataaattagatttccaactagcctttggtactgctctcaatttccaattctttctgttcttgttgattgtagtttcacatttggttccattggagtctccattggtttgtagccaagtaaaccagtttttgatggtaggtctaacaaatatatcctttgtgtgacaaatattccttccttggattttgcaaattctattcctaagaagtacttcaaagcccgagatctttaatttccaattcttgtgtgagaaatgacttcaatttgttcaactcattcacatcttctccagttaagataatgtcatctacgtacacaatgagaatgactatctttccattactcgagtgtttgaaaaacattgtatgatcaatctagctttggagacatctttggcctttaacagctcttgtaaattggttaagctatgctttaggtgactatttcagcccatagagtgctcaattcagtatgcagatatatctagtttcataaaattcttcaaaccccaatggcaagtctataaaaacttcttccttcagatcaccattcagaaaagccttttttacatctaattgttacaatgactagttcaaatttgcagcaagtgaaaggagaactcataaggaattcatctttgccacaagagcaaaggtctcttgataatctatcccatacgtctgtatgaaccccttagtgacaagtttttctttctatctctaaatattctgattcgacttatacttgattgtaaacatccatttgcaccccattggcctttttttcttgaggtaaatcaaccatctcatattttattttttttcaagagcccacatctcttccaaaactagtgtcttccactcagtatggttcaaggcttcctgtacggttctaggaaaaaaaacactagagatattagtggtaaaagtctatatgcgggtgatagcctttgatatgacacatgttttgcaataggatgcattgtgcaagaacaagcgcctttcataagtgcaattggaatatgaagatcaaaggaaattctctcactactagacttgggaatcaaagcagaattagggaccgaaataccagattttttgagttgccttttctagagaagtttcttggcatggtttagtcatttgatactctttatcttgatcattcttccttctagagtaaacaccaggttcactttaaggttttctcgataggtttctcccatgatttttcatattctataatatctggacccatagaattaggatcgaacaaagagggatttagtgaagaagcagtaggtaaaggtaaagaagccaacactttccaaaattggtcttcccctcattattctccccttaaagagtattttcggtaaagtagggttggttttgaaagaatgtgacatccatactgttgaaattcggcattcaaagttagggttttaatttagtaaagtattttaggaataaaaaaggagagatcatttaggatattttcttaggattcagtttcctattttttaggagagaatcaagctagatagatattttcttattcagtcatttgtgtatatatatatgtatggtgtgtaccgaataaatcaataaaggaattcagaaattcttcatggtatcagagccagttttctgaaaccctaatcccttctggccacctcttattcaagccatctctcattccggccaagtctctctggccatctctcaatccgaccatctctctctctggtcatctctcattccgaccatcaaaccctgttctcaggcccgtatctctggttttcttctcttccctatttccagcaaccatattcggctgtctcccaggtcggtatctctggttttctcctcttccctatttccagcaaccatattcggctgtcttcctcatctccatgaaaaaatacggaatggcatcatcacaagtatccagcgtcatggcaccagaatcaggggacagttctgaaattccaaaccttggtggcagtgattcctctcctattctcatcacaggacacaaattaaatggtcataactatttacagtggtcacaatctgtgttgttgttcatttgcggtaaaggaaaggatgagtacctcactggagaagcagccatgccaaaaactacagaaccgggtttcaggaagtggaagattgaaaacagcatgatcatgtcatggcttatcaattccatgaacaatgacataggtgaaaatttcttgctgtttgggactgcaaaggacatatgagatgcagccaaagaaacttactcaagttctgaaaatacttcagaactttttcaggttaaatcagccctacatgacttccgccaaggagagcagtcagttactcggtattacaacacactcacaaggtattggtagcaacttgacttattcaagactcactcatggaaatgttcggatgatgcagcaacatacgggcagattgtggaacaaaagagactgttcaagtttttcctaggactaaacagggaattggatgatgttagagaccgaatcatgggcattaaacccctgccaagtctcagggaggatttttcagaggttaggcgtgaagaaagtagaaagaaagtgatgatgggatccaaagagcaacatgccccaacattggatgcctttgcccttgctgctcggtcatttaatagtagtggtggagatcgtcagaaacaggataggccttggtgtgattattgtaagaaactaggtcattataaggaggcttgctggaagcttcatggcaaaccggctgattggaaaccaaagccacggtttgacagagatggcagagcacacgtggctgccaactctaagagcacatctgttcccgagctgagtccattcaacaaagagcagatggagatgctacagaaactattaagccaagttggcagtggcagtactaccgggacagccttcactgctaatcgaggaggaatgaagccgtggatagtggacacaggtgcttctgatcacatgacaggagatgctgtcattcttcaaaattacaagccaagtaatggtcattcatccgtccatattgctgatggttcaaagtcaaaaattgtcgggacaggttccataaaacttactaaagaattgtatcttgactctgtcctccatgttcctccatgttccaaacttggattgtaatcttttgtccattagaaaattggcccgtgatatccaatgtgttactaaattttatccaaactcgtgtgtttttcaggacttgaaatcggggaagatgattggcagtgctgaactgtgttccgggctctacctcctcccatgtggccgattctcaaaccaagtctctcaagcaagttgcgtacagtctcagagtctgttagagtctttcaattctgtgtcaaattctaaggtcaataaagatagtgagattataatgttacactatcgccttggtcatcctagctttgtttaccttgcaaaattgtttcccaaattatttatcaataaaaatccagcatcttatctctgtgaaatttgtcagtttgcaaagcatactcgaacagtgtatcctcaaatcccatacaaaccttcaactgttttctctttagtacatagtgatgtgtggggtccctcacggataaaaaatatttctggcactcgatggtttgtgacattcgttgatgaccatacacgggtaacatgggttttccttatgaaagaaaagtcagaggttgggcacatttttcaaaccttcaatcttatggttcaaaatcaattcaattctaaaattcaggtcctcaagtcagataatgcaaaggaatactttactagtagtctcagtacctatcttcaaaatcacggcattatccacataagttcttgcattgacaccccacaacaaaatggggtggctgaacgcaagaatagacatctcttggaggttgcccggtgccttatgttttcctctaatgttctaaactatttctggggggaagccattctcacagctacctatttgattaaccgtatgccatccagagtgcttacctttcaatccccacgtcaacttctcttaaaaaaattccctcacactcgtgcaacctcttctgatttaccactcaaagtatttggttgcacgacattcgttcatgtgtatcctcaaaatcgtagcaaatttgttcctcgagccaataagtgcattttcttagggtattctccaacccaaaaagggtacaaatgctattctccaaccaacaaaagattttacaccaccatggacgtctctttctttgaacatgtcttcttctatcccaaatctcatgttcagggggagagcatgaatgaacattaagtttgggagtctcttcttgaggttgtacctttttctcactcagagtcaccaaatccttcccaatccgcacccactgagttgtccgcacccactgagttgtccacacccatgccgtcatcagtctagccagcccagctcacaaatgttccttctcccgtgaccatccagtctcccacgcctattcaacctatagccccacaacttgctaatgagaacttacaagtatacatcaggagaaggaaaagacaggaattagagcacggatcatagccaacatgtggccaatatattgactccatttcaagtctacctgaagagaacataggtgaggatagggctggagaggtgtcaattcccagcattgatgattctactctgtcgattgcattgaggaagggtgttaagagatgtacagatcatccaattgggaattatgttacgtatgaacggctatcaccatcttacagagcatttgctacttctcttgatgatactcaggttcccaacacaatacaagaggcattcaaaatttcagaatgaaaaaagacagtacaagatgagattgatgcacttgagaagaatgggacatggactatcacaaattttccggttgggaagaggctcgtggggtacaagtggattttcaccataaaatacaaagcagatggatcagtcatgagattcaaggctcatttggtagctagagggtttacataatcctatgggatagactatcaggagacttttgctcctgttgcaaaactgaacactatcaggattcttctctcattggctgtcaatcaagattgatgcttgcaacaactggacataaaaaatgcgtttctaaatggtgacctagaagaggaagtctacatggaaataccacctggtttcgaaggaagtatggcaaagaatcaggtttgcaaactccaaaaatccttgtgcggccttaaacaatctccccgagcctggtttgatagattcacaaaggcagtcttgaagctgggctacaaacaaggccaggctgatcatactctatttttcaagaagtctcatgtcgggaaaatggccatattgatagtctatgtcgatgatattattctatctgggaatgatatggaggaattacaaaatttgaagaagtatttgtcagaagagtttgaagttaaagaccttggaaatttgaaatatttccttggtatggaagtggctagatcaaggaagggaattgtagtctctcaaagaaaatacatactcgaccttcttaaggagaccggtatgcttggatgcaaaccaattgatactcctatggatagtcagaagaaacttggtatcgagaaagagagtacaccagtagacagggggagatatcagcgactcgtcgggcacttgatttttctctcacacactcggccagatattggctttgcagtgagtgttgtaagtcaattcatgcacagccccactgaggaatacatggaagcagtctacaggattcttagatatttaaaaatgacaccagggaagggtctattcttcagaaagacagagaatcgtgacactgaagtatactcagatgcggattgggcaggaaacatcattgacaagcggtccacttctggatactgttcttttgtctggggaaatcttgttacctggaggagtaagaagcaatcagttgtagctagaagtagtgcagaagctgaatacagagctctagcacagggaatctgtgaagggatttggataaaaagggttcttagtgaactgggacaaacgagttcatctccgattctgatgatgtgtgataatcaagcaactataagcatagcaaaaaatcccgtgcatcatgacaggaccaagcacgttaagattaacagacacttcatcacagagaaggtgactagtgagacggttaaattgaactacgttcctaccaagcacaaaaccgtagacatcctcaccaaagctttacctaggcctaacttcgaagacttaacttgcaagctgggattatatgatatatattctccagcttgagggggagtgttgaaattcggcattcaaagttagggttttaatttaggaaagtattttaggaataaaaaaggagagatcatttaggatatttccttaggattcagtttcctattttttaggagagaatcaagctagatagatattttcttattcagtcatttgtgtatatatatgtgtatggtgtgtaccgaataaatcaataaaggagttcaaaaattcttcacatactaacaaaaaaaatttcaaagatagtattatagcacttattccccttctatacaaaaagtttttctatagtgatttgaagggttggttgagctcttcccagattaatggaatttgaggaattttgagaagggatttattagccctatttgccaaatgtaaatacaacagattttaagaaaaaatagagaaaaaaaaaaaaggaagaagatgaagaccaagatgtgaaaggggttttgcaaaagacacaaaaagaatagagagcccataaacttaatggtgctcagataccatattagtcagaaccaatcctgcattattcccatttcaataagaatagtacatatagttgactacaagtctacaactatttctggggatgtacagagttgttactaaggccatgattttacaattatttctagctataatacagctgcactataatgaataatagcttaccactcttaacagctaattactaggaacatacgaggtaacaaaacaacaatcagtgatatccctagaattaaggaattgtgctgatttctaataggttgagtatattcacctgctcctttcactcaaaattttctctagttggctttttttttaaaaaaaaaaaaaaaattgtttccattgctagtgttgcatttatttatttccgaatgatgtctggtgtcttttttaattatattttcaatccttttgttttctttctgttaactctgctctatctgcttttagatttatcttttaaaatcttctgtccttgcaggttgacatttgtgtctttgtctttgatatc

SEQ ID NO: 10911 - DNA, 8596 bp, Vitis vinifera
  Intron number 6 from transcript GSVIVT01021617001 (locus G SVIVG01021617001) derived from phytozome v7.0 (chr-ID chr1 0; pos 8198439 to 8207034)
ccttactatatcttgagccagacagtgaacttgtatgtctattattttatttatggcattgggaaatgtagtgcaaaatattaggaaaaatgaaagaaacatatagaaaaacaaaagaataataataataataataataatgagaaaaaaattgcatggagactgaggttctagtttgaagttattcatatgattgtaaagtatcattattccttttttctgaatttctgatgacatactttctcttacacaggaaatgagtgaataaaaaattatttttgttatcataaacaaggccaaaaacatgaagataacaagcagattgtacacaagtttttaatttaaatatcatatgcaagtatttgttgattgtatataaatcaccccaccagaaaatggaaaagagagacagagagagaaacacaagccatggtccgtcatagccagagtttgagaaagtgctgaagttaatccagaccttgtgagtaggtagctatttgaactgtcaggagggaaatgaggcaaaactagtatctgaataggataatgatgtgagatttttttaagtattagtatgtttgatctgcttgttgaatagcaggttactagcaaactgattagagcctaacttattgcataagatgggttagatggtagtgtgatttggagagtgaatgagctgttgttagtggtgtgattggatttgaggtttcaggtatgcaggggtttgcattcataaataaatgacgaagatgacatgagaaatgactgcatataactttcataattaagattgaacacattttgtatgtcaagttgataaaggttgtcattgatgaccaattatcacgctaataagcagtttaaccatgataatcttggtgatcgtgaaagtttcttcataattgaccccatatgtctgactaggccatgcacaaggaattttaatttgttttgcttgattgaatgatttttagagacctagtcatgcagaaaaatagaaaggaacctttcctgttcatgcataaatatcaagaataggggtatgagtcttgttgattttcacaaaagtaccaagaacaaggaagattaggagaagaatcacaatactttgtattattcccaaaagttctttcttaataccaaaatacccttaaataggttcacaaatctgaaataagtaaataaataaataaaagactccaaaaaaaaataaaaaagggaaaaagaaaaaactagaggattatggcaagcttgacaaattttgattctgaaatctctacataaagatatggtcaaagaaaaaattatgaggattgcctttccatttatggtggtatgaagatcatttgaagaggattgtggaagtttaggggatggtggtagagatagattggcatactcttagttgtacgatttatcaaaggtgagagtgagagtagaaatgaacacaccgttttgcttgcattgattgaggtgaaagatggggtttgggcgtttactatctcatttgcagtggtggagatgaacacaaaaggtgggttggaaaggttgagttgacttgagggaggaatgagtcattctcaaggacatgtggcaggaatcagcatggggaggtttattaaacggctaagaatgtgtcctattatgggacacatggcagaaatcattgtgttattggaattcaaatggctgtggtggagtcttaaaatgggacacttggcaagagtagagttttagtggaggacaactataatccaccttctctattcttaaatttaaattcaaatgaggggttaaaggggccccaagcaaaaggtagagtaattatgaagctttggcccatttccaagactccatacacctaccaagtatgcatgggggcccttctttcataagaagcccaattaggggacaagccccattctcttcctaaggacaggtcccaagcttaaacaaatctgatggagggttaggtctgttcttctcaagattttagactcttcttagtgagctcattctataaatctctttcaatcactcctgtcttgaccctttttgctcttgctaagttaatttggaactcaaaagttccacttaaggttaaggctttttcatggcttgttgctaatacaaaggtcaataccaataatttgcataaatcaaggagccctacaaagcattcaatttgtagcaatgtgttatgtgtttgaagaatagtgaataatcttatcatctttttctttattatcccatagaactagaactttggcataaattgtttgtatagaaatgttggatcaattccctcttagaggcatggcggagatgttgggaatctcttttaaaagctttggtagcttaccaagaaggtcgctttggcaagtggctatcttatcctagatatggttttatggttggataggaatgctaggatatttaaggatcgatgtagatttgtacatgccacttgagatttgatttacctttcctattccctataggccttggtcattaagcctttttgcagattccttcgtatattctagtgttagattagaagagtgttttttattgaaagaaattcaagagaaagcttgattgattggtcacccccttaagtaggtttgacaaagttaaactttgaagaatgtttgttgggtaatcttggacaattaagcattagaggtgtgataagagactcttaaggtgctatattaagagcttactttaaaccttgaaaagcggaattggctattgagggagatatgttagtgttagtaggaggtttgttgtaagctaaaactttgtgcctatccagtggaacagttgagggagattatgctactataatatcttaggagtctaatagggagagaggtgggctcatggaagtttgacaattggatacgcaaaatcaagatgttgctagtgaagtgggatgctcctgtttggttttcctcattcaactaatcaagttgcaaactggttagccaagcaaggagcaaatcacttagtctcctttgttggagattttcttcctcctttttttttttttgataaataaacacgagatatattaacaaaaggcaaaaagccacaaagcatacaggaaaagtagtttactttcctgtataaagtttctctaatatgtgtacattgtttgttttttctttttttgtgaagatagtctagtttttcttgtctagtaggatagtagtttactttctaatcaacaattgtgtattttcaaaggattgcttgtcctttgttgtatttatcattcaatgaatgaatatgtttgttttttattttaaaaaaagggtaaagacgtttgcatggcttgtagtaaataagaaggcgaatgctactgaattagtttgagtgaggacttaaaaagcccttaatgtgggttaatatcaatgtacgagtggggaatcaattgaccttgttttttacattgccttagagcctttgcttggtagagtaggtggtttagattttttaattgattgggttccacacaaaagtgtgatgtcttatggagaaaaattgtatttttcattcatattttaaaagtatacaatcttagaattatatacaacaacaaaagagaaagaataaggaaaaaattggaaaccaccctattaaagatccctacaaatcagggattatatacacaaatatatattacagttgtaatatacaactgtggaagatatacaattgtgtatacaacgataataatcttaatatacaactatgtatacaactataataatcttcatgtacaactatgtatacaactgtaataatcaagttggtgaataaatattatctattctcaacttgataatgatttcttgaaactaggcactggctaatcctttcattaagacatcatctaaatgacttccaatggacatatatggtgtgcaaattaagccactgtccaactttttcttaataaaatatctgtttatttccacttgcttggttctgttatgttgtatcgggttatgtgcaatgctgatggtcaacttattgtcgcaataaagtctcattagtgtctcccacttaatcttcaagtcctccaagataatcttgagccaaaataacttgattccttaggccattgcacgaaactctgcttttgcactagatcttgcaacaatgttctatttcttaatcttctaagttaccaagttcccttgaagagaagtgcaatatcccatagtagacctcagatcaactactgatcttgcataatttgcatcaatataggcctccaatgatagctcaatgctattcttaaacaaaattcctttccctagagttgcttttcagtagtgtaggaatctatatacaacctgtagatgaacttccttcgggttatgcataaattgactcactaggctgactgtataggttgtgtttggttgcgtatgtgagaggtagattagattgccaaccaatctttggtacatacccttgtctacggctgcatcctcacttgcttctccaagcttgtgattcagatcaataggtgtgtcaactggtttatatcttgtttttcctatctcctgcaataagtcaagaacatacttctattgggagacaaaaattcccttttttgagcgagccacttcaattcccaagaagtactttagtcttctaagctcctttatttcaaaatctttttctaagcattgcttcattgcttctctttcttcaagatcatttctaatcaatattatatcatccagataaattagtagggcaattactccccctgaggctaagtgtctaacaaataaggtgtggtcactgtggctttgtctatagctaacagttatcatggctttgacaaatcttccaaacgaagttcgtggagattgttttagcccatataaagctttctttaatttacataccttttttcctttcaagtgcatattaaaactaggtggaagatccatataaatttcttctttgagctcttcatgtaagaacacatttttcacatcaaactgttgtaattcccagtcaaattaggcagctaaagagagtaaaagtctcacaatgttcatcctgagtactggtgcaaaagtctcttggtaatctactccacatgtctgagaatagcctttggcaacaagcctgactttgtatctcttaagagaaccatctgccttgtactatattgtgaacacccacttgcaccctattggactcttctctcttggcatccacatcccaagtcccattcttttcaagtgcttccatctcggccctcatggcttgtttccactcttagctgtttagtgccttggataaggtcttaggtatggttatggtgttcaggctggtgagaaaatttctataaggtgatgacaatctttcataggacacaatgggaaagtggatataaagggtgttgagtacatgtgcttatgccttttctaactgcaatgagcatatttagatcactaatatcaacaaaatcaagagaaatcttaggagaagatggatcatttacctcataagaagtggtcggttttgactcttgaacttgcataggttcagtgatggttgctttcttccttaaataaacctaagttggccttgtagaactgggaacttatttccctgaaggtggacttgttggtttaggaatttgtgagtgctcagacacaagcttagacacaaatgattatgaatgtgaggatttagacacaaatggaagcaagtcaagtaagaataaatctcctatatccatatcttccatgaatgatgtctccccctgaagataaggatgattgaagtagcttttatgttcaacaaaagatgcactagaagagacataaaattgtcgaatgggtgaatgataacatttgtaacctttttaagtagatgaataccccataaaaatgcacttaattgctcttgcatctagtttatctctattatgagcgtggacatggacaaaagaaacacaaccaaaaacctttggaacaagattgatagatgatgtgaggtttgggaagtattttgaaaaagttttcattgaatttttgaacctcaaaactctagatggcaatcgatttataagattactaacagtaagtattgtttcctcctaatatgatttaggaatatttttctggtacaaaaaaactcttgtaacaacaagaagatgaccgttttttctttcagcaaccccattttgttggggagtactaatgcaagaggattcatggatgataccttctttttgaaaataaggagataggacttgattgaagtaatcctttactttattagacccacatttcttgattcccactccaaattgagttttgaccattttttgaaattgagaaatgcagtactcatctgatttttgtttgagaagaaagatccaagttactcaagtgtaatcatctataaatgaaacaaaccatctagagcctaaaatattaggaattgtggtaagatccaaatatcattgtgaactaatacaaaaggaattgaaactcttttgttacttattggaaaagtagcacaacggtgctttgcgagttcacaaacatcacaatgtaatttttcttcatcaattcctttgaacaataaaggaaacataattttaagaacactaaatgatggatgtccaagatgataatgatgaagtcaaatcttatcttttgttgtagatgggatttcagataggaatgataagggtacctggttcttagtcctattttgaccaattgtagctcaaaatagtaaagtacatcattttcccttacatgtccgatcgtcttccttgtaccctgttcctaaaatatacaatgagagggataaaaaatcacatgacaattaagttctttggtaagttgatgaatggaaacaagattggtggaaagcttaggtacttgtagcacattcttcaaaactatggatttattcaagtgaacttccccttgaccagccacagtggctaaagatgctcttgggtcatcaaatcttatcttttcttattactaggacatgggttataggtactaaatttttgtgaggaatgagtcatatgatttgtagctccccagttgatgacctaagagcctaggaaagacatatctgagacactaaaagtaagagaaggggaatgcttatttgattgagtgagagagcaagcaccactaggactctcaagggttcctaggagattcttcaattgctcaatctattccttattaagctcaacatgttcgttggcaccgaaattcaccctctcttgtaaagagtttttattgatttgagagttggtgaagtgtgcctgagttctttgttgtccacctttgaaattttgttttccatccttgaaacctcaatctttactcaagtttgaggctttccataaagtttccaacactggtcccttgtgtatctttacttcttgcagtaggtacaccaaatggtatccttattcattgttctggacaaattggccatggatggaggaatcatgttgttggagttgtcaacaatctcagacatggtgggtaaaatttggaaacaattttagagaaaaatatagtagagtgcctttgaaatggcaataaaggctgttaaactagggttcaaaaaacagaggaaaaaggttctacaactcaacaaggaaggttgaaaagaaaaatcccaatgagcctaattcagctatgataccatgtggagaaaaattgtatttttcattcatatttttagaattatatacaacagccaaaaaaaagaaaaagaaatagaataagaaaagaattggaaactagcctattaaagatccctacaaatcagggattataaacacaaatattattacagctataatatacagctgtgcatacagctgtaataatcttcaacatgtctgataatttcctttgaggatttttagggacttactagagctaggactttatggcacattgttagcctcactttaatttgcatcatttggtaggaagaaatgaaagaatttgttaggattggtgaaggactttggaggtaattttcaacatgttttacttctcttcttctggtatctgtaactaaagcctttgtatgctcccctttgagccttacactactggattgtaattccaagcaagtctcaaggccatcaagtatttctgtttctgttcctattttctctatcattggttcccctttcatccatccattgtctgtcttttgaatttttgaactgactgctctattaataggttcaacatgaggaaactttggtactgtaattaggggtgaacacttgcttgccgattaaatgcttgaatttcagtaggactggtcattagatgtgagatatcatgtgttagtagtttggttcaccatctaaccactggatgggacccattttatgggagaggatggaggggtgggaagaaatacttgttacatacgattatattatgcctcatatatcttttaattggatgcacaagttctatacctgagtaatgtttttctgtttgtcttggcactaggcaatctcacttgcagcagaatcaaaacgtgagga

SEQ ID NO: 10912 - DNA, 2927 bp, Vitis vinifera
  Intron number 1 from transcript GSVIVT01035030001 (locus G SVIVG01035030001) derived from phytozome v7.0 (chr-ID chr5 ; pos 1021013 to 1023939)
ctctttctaagtattccatcggcgccggcagtacggtacttcggtttctcacatctctaaaattttcattcttctgcttggtagatgagaaaatgaaagaaaagagaagaaaatatgaaaatcttttgttggttgctgtcttgaaagcggggtgtttttctccctttcttaaaaaggaagggttagattcacagtatgggattatcttatccttttaaccaaataatatatattttttctttccctctgaaaataggcggtgaatttaattgattcgtttatttaattaccacgttaattaaatcttgtgctgattgaatatgaatccagttcgttggcttgaatttagaccatttttttttttttttggttgtagatctgatttttttattctgttttttgaaatatagaagtaaaagtaatttttaatcacttgtgtcaaaatcaacatgattgttgtggttctgaatcatttagtctcaggtgttatttattcaaaagttgtggaaagtcttaaaaaagtttattgacattttgattttgaattttcattattactttttccttttaagagttgtttattctagtttcagacaagaggttatgttatcatgctcagtatcattattcctactattgtcgctctattttgggttatttgattaaaagggtttttaaaaacatctttataaatactggaaatgataaagaatatttacataaaaaaaaatggtttactttaaaaaaaacatgaaaatagttagattcacaatttagggattaattgattcattttagtaaaatatttcttatattttagaaattgtttcaggatatacgaaattttggagcatgagttttgagtatgtttatatattttccttttcgatttaaataatatttaatttttttaagggcatgtttgcttaaggaaatcattaggaccatcttaacttgattttaggcatcaaaacacaagatgggtcccacaacccagttgatatttatactaaaatttaaatggaaaatggaaattatggaacaaaattttaagataataacaaaaaaatttaaaataaatttatatatttaaaatataagaaatacaagatataattgtattttaattttggggggttagtttaagttttctgcaggttttccctttagattgaaaaaccgtaaattgggtatgttggagtataaaaaagatcacccaatctcgtccaaatgtcggggttgagtttagattagttcacactaacccacctaagttgtaaggttaggtgttgtttcttttttttaactttttgctaaaagtgacttggttttgttgaactaccaattttcctaaaaactgaaggattttggcccaatatgcatattgacaccttcccttatgtgcagcccatacccacatgtggagagacatagagagaaaggggaagagagacaaacaattgcaaataaccttgtttgggtttccaaacatgtaaatggggaaacaaatatacaaattgcgaaaaggcaactcgaacgcataacctctcacaaaaccaagttctgatatcatgttgaactactaatttttttaaaaacctaaaatacttttgttttttttacttatttcttaaatttttgactgagtagaaaaaaccaaaatatttaattttctttttaatgctaaaagtaacctattagtttttctttactagttaatacttaataaaaataaaatatccaaaaaaacatataacttaatatttaatactattaaatactattttatcttaagtttgatttagaataaagtaagaaaacaagtaccaccctagtttaatccacttatcatacaattattcaaaaatatttagcactttatctacttatttttatttttttcaatggaaaaaccaataaaaatattaattataaatacacaaaataaataatacatatgtttattttttttatgaaagggaaaactaataaattagcaaatccaaaagacggtgatggagataatatttatatataaataataactattttatacaaataatagctattaataagctttgtgttatggttataataattttgttattcttgacaaattatattacaaaaaatagttataatcatggtataatatattatttttttattcccattataagaagttggattattctttaataagtttttcctcaactatgaagagattataatcatttttgctctctgcctgtaaaaatgttagtacttttattatttgcttattaaaatagccaaagggcaataagttgtcttcatctcactctatgtccaaattcactggcaatattattacaagcataagagcaagagtaataaggctgcattttagaaaaaaaattgctgaagatttttacctggcttgtttggataatttagcgaacagatggttctgcttgtttccctcccaaattccatattctcttcggatttggcatcatttagggcttataatccatttcagtttcttgagttacttcctgagttagtttccctttgggaaattattctcattgcttggttgtctggactgcttgaaacttcttgttcacctgactcatgaaatcaaagagtaacgcaattgcctttgtcattgtgtgtgtactttgattttgggatcctcatccctgctcctttcatcgtattcatcattgtaaaaagcatggaattttctaacattgttccactggacctcatgaggttttataatgatggccagaattatgaatcattgatcattctgttttcccttcatcctaactttgtatctgataaattgcctctatgttggattggagctagttggtggctgaatcttagtgttctgattatacttctaggtagcaataattgcaccaaacatccctgcc

SEQ ID NO: 10913 - DNA, 3176 bp, Vitis vinifera
  Intron number 2 from transcript GSVIVT01008893001 (locus G SVIVG01008893001) derived from phytozome v7.0 (chr-ID chr1 8; pos 3210347 to 3213522)
acgtaccaggtgactaatgatctttatctttacttaaatagttgaccaatgatgatgatgatgatgatgatgatgatgaatatatatatatgtttgcaagtgttatactgctgttgaaatttaatcacccctctgcatttaaataggttttgaattgggtttatctggtatcgaatggaattaggacaagtccatttatttttctagagttgggttcaaaataagggtattttaagatttcaggatgaaatttaatcacccttttgcttctttcttggcaattctggtgtcgcttccattttacattgctcatatataattagaaatcctatgtcaaatacaatggactgttcaattttcataggaaatccatatccttgattgaatctcttggagttctatcaactgggattgctatttgggttgtacaacctgaaacagaaattattttatgcttttattattgtaatattaataatttacaagtggcaatctactaaatttatccaattcaactgatgtcaaattttgattaggtgaccattatcctaatgaaagaagtgagttaaccacaattctctaaggatcgcatttgacagctgcatgatatgttctacatgctacacatcaatcttgtaaaaacaaaacatccgttgggttcctacttgtgagaaggaaggccagcacaggctaaatcccttttcatgataacaagggacccccaaagtgatacaactgctaattgttattgttttactctatgcataatggtgtcttatttgatttttgagccttcataattttatcactttgtcatgtctttatcttaaaacctcattttgctttgttgagtaccgatattttgaaacaaaatggtgttcatgtgtggaggtaacaatggaatgattgtcttggaaactaagttgattccacaaaatcaatttttatttgtcttattcaagagttatgatatgtgtatgcttctccatttaggtaattggcatacaggaacttgttcacacatgacagcctgtgcattagtttccaagaagtgtttgtacactttatagaagaatcctttatcttttgcttcaaaatgtataatggaatctattatatagctgttactttcttctttgttttagtttgcagttcttccacatgtgatgacgctgaataacatatttttttattttttatgtattacctttttggctcattcctgctgtggtttaaccgagcaggagaaccgcatctatgatctattcaaccaggcttattaaaccataatcctattcccaaaactttgttaacatattagagtgctgacatttataataccctgcatcacaactattggctgaaagggctttcctagtttatttcagattcctgagattgttttcttgagatatgtgatatggaatgtttttcattctgtgaatggtccttgttggatggcttggagggagctagaaagagccatctactctttctgataaaattggcaaaagtagatccgtagtggctaaaattttaggaattgtgttgcaaatgtataagatcatattttgtggttaatccattttgtttaattattgagtgtcatctgttggaaagcaaaaacttccaccctggaataatctatttctttctcagattttaaaattttcatctctgcaaagctatcttgctttgttttcataattgcatagcttgtccaagcagtttagtcctttgttgagttctttatttgtttcaagttactgtaaattgatggagggaacttcatcttagtacaaattaatggaggtttggtcacttaatagatggaaagaattcttgggagcctatgtcctccctgataccattgaatggtgtgaatgtattctagtccactctttttaacactaggggcacatacactattcaggcttatcattgaatgaggctgaaagaaattgctttgagctttgtttcatttgaagtttgcatatatagaaaggaaactggcatctttctgttaacctttttcctcccatcatcatttggcataaggagagtagacaaacatctctactatttctaaggggatgtgtgattttacagaatctctggaacattgtaacttgtatttttttctaagttagaatgaagaaggggatgactcttgatcaggatcccaatgatagagatagtttttttccaatagccatgctgcttgacttgttttgcagtttgaaggcagcagtttgttattttattttattttttactctgatggcctgtatcattttgtgctttggctttcataattgggttgcaaattcaggttggaagtaataacaaatgttgggtttgtttatgcatgttaaattgaacattcacataaatgaaagtacaaaatttaaatttcattgtaactgacaggaggatatatttctgttcgtcttaagaaatattcttcatacttgcttggctgactggccatcaggctatctgtactgctcttgcaaatgcatcctatggttttcctttgtcagggaaatacacaatatctcacacattactcaactctactcaactaagccttaaatcccaaccactaggatatgatacacaagttaaaggagtcgaagagattttatttatcggtctgaaatttacctgaccaatggagtatgttaaggttcttggtacggtgttccacatctaattgacttttttgctttctctttgttactagaatagaccattttggtttttgtagttggcttctgctccttgataatgggcctgaatagttgcaacttgtgtaccaaaaattactagtcacttgattccaatagaatctttggatgctggagaagcattggagaaccatgttaagcaaataatatgcaaattgaatcatgacattctcatcttgttgtgtttgtccatagtacaatttatctattttctttgatgttgactttgtggatttttatcatcttcaatagtcttgaccaccaaaataattagcagaggaattaaattttctcttacgaaatattccaacatcaatcagcttttaggattctgcttctcctacaacaaaaaagaccataagtgaaagatggctcatcacttgttttatatggcagataattgagaaaggacccatcagagactac

SEQ ID NO: 10914 - DNA, 12856 bp, Vitis vinifera
  Intron number 3 from transcript GSVIVT01012990001 (locus G SVIVG01012990001) derived from phytozome v7.0 (chr-ID chr2 ; pos 10574176 to 10587031)
acttagatcccgctgtattaccagggattgattactactcaaaaagggctatttgatagcttgtaattaactcttttaaacacttttgagtagtaattattgccttttaacccaattaacatattaaggacctttgcaatcacttctaatcactttgtgtaagttttggtgtttttgttagtaatttgatcaccaaagcaatccaagatggaggagagttatttggaatccatggcaaagcaatggaaagctcagaaacatgaagaatgagagctttgaagccttaaagtcctttgccataaccaatccggaatgcaaggaggagaagtaaagagagaatctaccttgaagcattcttgatgacagtaatttcagccacttttggagtacttcctgaagtccaatttatgcatgctttatgtcgtttcgaagatcgggaagtcaacaatccaatgcttcaaacggttcgcaaatcagagttgaaatgaagaagttagagccaatggaagcagatcactccaagccgaaggccaatttcgcagggctgcgaaatcagcctttggctgcgaaatcagccttcggctgcgaaatgatttcgcagccattttgtgcgcctgtgaaattctcctgagtgcttccagatatttgcgatcgacgttttttgatattttacttcagatatttgttgtctaaatcccaattctctccttgtaatccaccaattagatgattccttagttgttaagcaagaatacaggggtaaacaacctgttatatattgttttgtaattttcattttttggcctgtcggggaactttctccaggagaccaacttttgtaaagtttacacttagctaaatacagagtatcttttgctttctttttctctctactattttctattttcttggaagccaaacagcctctgaggatgttttcccagaggatgagaggctaaacttatagtttcttggagtgaaggaagctaggtgaaaagtccagattaaaaggtggaaagtttccgtgcattaaattcaggtagttggagtccataaatggcttctaaatccaaagttttgctttaaatcccttagagtcactttgactggccaatacatggtaagcttcaggtctctgtggatgcttattgctagatccatatcagtccattagttatcatgtacgagccattggaaagtgattcaaggtgatagcccatagtgtcttaagccattaatggaccttgactaccatctctattgaccttttatggattaaatcttcattgtcaaacctataccggttcgggaaataactataggttaaatccccaatgcgaggagaaaaatccggaattttccactttgcatcctgaacttgaacctagcaacctttagctccgggagactttctttcttccattttttacttagttctatgtgagtttagttttaattaccactttcaaaacaattttattttcttttaaacttcaagtttatgctaaaggaaatcatcagactcaatttctaatttagagtctgtcattgataaagtgaaaacccatccctgagttcgaccctagaactgctatactatagtagctttgctacgccagtataaggtcataggatttataaatatttttttattaaagtactcaactgggcatgaatcaaatggcgccgttgccggggatggtgccacaatacaatgatacaaccttttagaggctatttgtgattttcatcacaagtttggtgaattcctttttcactaactttatttcctttcattttccttttgttaagtttattttcgttttcttcctaactttaattttttttttctagttttcttttgttcttgtttttgttgtttgttttcttattattacaggtattgtaacttgtgcatgccctattggattagggaccaatagggaagattagtaaggattgagaatcctcaagacacagagttggatatctgtgtaaacatcatggaccctccactagaggatcagaattctcaacaaggtcaagggggtagtcccaatgcatacctatccatgagggatagaatgcatccaccaaggatgagtgcaccctcatgcatcgtgcctcctcttgagcagttggttataaggcctcatattgtgcccctcctgccaaatttccatggaatggagagtgagaatccatatgctcacatcaaggagtttgaggaggtgtgtaatacctttagagagggaggagcttcaatagacttgatgagactcaagctattctcttttactttgaaggacaaagcaaaaatatggcttaattctttaaggccaaggagcataaggaattgggttgatcttcaagctgaatttttgaagaaatatttccccacccataggaccaatgggttgaagagacaaatctcaaatttttctgctaaagaaaatgagaagttccatgaatgttgggaaaggtatatggaggccatcaatgcttgtcctcatcatggttttgatacatggctcttagtgagctatttttatgatggaatgtcttcctccatgaagcaaattcttgagaccatgtgtgggggagattttatgagtaagaatcctgatgaagccatggactttttaagttatgtggctgaggtgtcaagaggatgggatgagcccaactcaagagagaaaggaaagtttccctctcaacaaacccaaaatccaaaggctggaatatacatgttgaatgaagacgtggacatgaaagctaaagtggcaacattagcaaggaggctggaagaacttgagttgaaaaagaagcatgaagtccaagccatttccgatacccaagtccatgtcatgccatgcaccatttgccaatcatgtgatcatgtggtagatgagtgcccaaccatgccagccgtgagggagatgttaggtgatcaagtcaatgttgtggggcaatttaggcccaacaacagtgcatcttatggaaacacctataattcaagctggagaaaccacccaaattttgcttggaaaccaaggccacctccataccaatcacaaagccaaacccaagcccctcaacaaacctcttcagtggagtaagccattgtaaacctgagcaaagtcatgggtgactttgtgggtgaacaaaaggcaatcaactcccaattgcatcaaaagattgaaaacgttgagagttctcaaattaagagaatggaggggatgcaaaatgatctatctcagaagatagataatattcagtactccatctcaaggcttaccaacctaaacacagtgaatgagaagggaaagttcccctctcaaccaagccaaaatcccaagggtgttcatgaagttgaaacccaagatggtgagtcttcaaatttgagagaggtcaaagctgtaatcactttgaggagtgggaaggaggttggtcaacccttgcctaacatggggcatgatgaagaactcatggcaaagagacccttgattaaagagagcaataaccaagaagagaagagtgggaagaaagtgcatccaaatcaagcattgaagaagaaccaaggatagtgattaaagaggatatgatgaagaaacatatgcctcccccttttcctcaagctttacatggaaagaaagaaatcaagaattcatcagaaattcttgaagttttgagacaagtgaaggtgaatatacccttacttgatatgatcaagcaagtccctacatatgcaaagtttctaaaggacttgtgcacagtcaagagaggcttacaggtgacaaagaatgcattcctcactgagcaagtgagtgctatcattcagagtaagtccccagttaagtataaagatccgggatgtcccaccatatcagtcaacattggagggacacatgtggaaaaagctttactagacttgggagcaagtgtgaatttgctcccatactctgtgtataagcaactgggacttggaggattgaagcccacaaccatgaccctctccttagctgataggtcggtcaaaatcccaaggggattgatagaggatgttctagttcaagtggataaattctactatcctgtggattttgtggtgcttgatattgattccactgtcaatgaagaaaattatgtgccaatcatcctagggaggcctttcctagctacctccaatgctatcgttaattgtaggaatggggtgatgcagctcacatttggaaacatgaccttggaattaaatatattccacctatgtaagaggcatcttcatcccgaagaggaggaaggatttgaggaggtgtgcttgatcaacactttggttgaagagcactgtgacaagaacttagaggagagcttgaatgaaagcttggaagtgattgaagatgggttccctgaaccctctgatgtgctagccatcatgtctccttggaggagacgggaagagatcttaccactgttcaaccaagaagactcacaagaagttgctatggaggaccctccaaagcttattttaaagccacttcctgtggatttgaagtatgcatacttggaggaagacgagaaatgtccagtggtggtttcctcaactctcactagtgatcaagaggatagtcttttgggcatcctcagaaaatgcaagaaagccattggatggcaaatttctgatctgaaagggattagccctttgatctgtacccaccatatctatatggaggaggatgcaaaaccagtgaggcaaccccagaggaggctgaatcctcacatgcaagaggtggtgaggagtgaagttttgaagctactgcaagctgggatcatatatcccatttcagacagcttgtgggtgagtcccacccaagtagtcccaaagaaatctggaattactgtaatccagaatgagaaaggggaggaagtctctacacgtcctacctcaggatggagggtgtgtatagactataggaggttgaattcagtgactaggaaggaccatttcccattgcctttcatggaccaagtccttgagagagtctcaggacatcctttctactgttttctaaatggttattcagggtacttccaaatagaaattgatttggaagatcaagaaaagacaaccttcacttgcccctttggtacttttgcatataggagaatgccctttggtctatgtaatgctcctgcaactttccaaagatgtatgctaagcatctttagtgatatggtggaacgcatcatggaagttttcatggatgacatcactgtatatggaagttcttatgagaagtgtttgttgcatttagaagttgttctccacagatgtattgagaaagacctagtgctaaattgggagaagtgccattttatggtacaaaaaggaattgtcttaggacatatcatctccaaaaatggcattgaggtagataaggcaaaggtggaattaattgttaaattgccacctcccacaaatgttaaaggaattaggcaattcctaggacagccgggttctataggaggttcattaaggatttctcaaaaatctcaaaacctctttgtgaactcttggtaaaggatgccaagtttgtgtggaatgagaagtgtcagaagagttttgagaaattgaagcaattcctcacaactgcaccaatagtgagagccccaaattggaaattaccttttgaggtaatgtgtgattcaagtgatcttgctatgggtgctgttttggggcaaagagaagatggaaagccctatgtgatttattatgcaagcaaaactttgaatgaagctcaaaggaactacacaactactgagaaagagttgttggcagtagtttttgccttggataagtttcgtgcttatttggtagggtcctctatagtggtgttcactgaccattctgctttgaaatacttgctaaccaagcaagatgccaaggcaagattgataagatggattcttttgctccaagaattcaatctccaaatccgagataaaaagggggtagaaaatgtagtagctgaccatttgtcccgacttgtgatagcacatgactcacatggtctgcctatcaatgatgacttccctgaggagtctctcatgtcaatagatgtagctccatggtattctcacattgcaaattttttggttactggagaagtaccaagtgagtggagtgcccaagacaagaggcatttctttgctaagatccatgcctattattgggaggaaccttttcttttcaaatattgtgcagatcaaattataaggaaatgtgttcctgagcaagagcaatcgggaattctttcccattgccatgatagtgcatgtggaggtcattttgcctcccagaaaacagctatgaaggtgatccaatcaggcttctggtggccctctcttttcaaggatgcccactctatgtgcaagggatgtgatcggtgtcaaaggcttggtaagctaacacgccgaaatatgatgcccttgaaccccatcttaatagtggatattttttatgtttgggggatagacttcatgggaccatttccaatgtcatttgggcattcctacatcttggtgggagtggattatgtctctaagtgggtagaagcaatcccatgtaggagcaatgatcataaggtggttcttaaattcctcaaggacaatatttttgcaagatttggagtgccaaaggccattataagtgatggaggaacccacttttgcaataaaccttttgagactcttctagccaaatatggggttaaacataaggtagccacaccgtatcaccctcaaacaagtggccaagttgagttagccaaccgtgagatcaagaatatattgatgaaggtggtgaatgtgaataggaaggattggtctattaagctcctggattccttatgggcttataggaccgcttacaagaccattcttggaatgtctccctatcgccttgtttatggcaaagcgtgtcatcttccagtagagattgaatataaagcatggtgggcaatcaaaaagctcaacatggatttgacaagagccgggttaaagagatgtttggatttgaatgaattggaggaaatgaggaatgatgcatacctcaattcaaaaattgcaaaagcaagattgaaaaaatggcatgatcaattggtaaatcagaagaatttgaccaagggacaaagagttttgctttatgactctaaacttcatctctttccaggaaaattgaaatccaggtggacgggtcctttcataattcaccaagtgcatcccagtggagtggtggaattactgaagtccaacagtattgacaccttcaaggtcaatggccatcgtctcaagccattcattgaaccattcaagcaagacaaggaggaaatcaacctccttgagccacagaaagcctaatcagaaaagggttagatgggcttggtttcaccaaagtccatattttttgtttaagtttattaatttagaagctttattaactcttttgattttaattttggtctaaagttttgttaattataagtaacttcctctttttgaatgatcttttgtaggaacaattgcaaagaatatgaaggaaggtctcagagggccaaaaagagctcaaagctatgaaattttagtggtctgcgaaatttcgcagcccaaaatcggcccctgcgaaaatggccatctgctgcgaaatcatttcgcaacccttacatggcctctgcgaaatcaaggtttggctacgaaaatagccctccgctgcgaaatttaacacccccctctgcgaaaattttcgcagctgcgaaaacacctcttggcacacgagtgccatttcgcagcataggaactccatttcgcagctgcgaaatggctgcgaaatccccaaagcgtgaaatctccaattttcgcagccatagcccaatttcgcatggtgtttcgcagttgcgaaacacccctttggcacacgagtgccatttcgtagcacagtaacccgatttcgtagctgcgaaatgggctgcgaaatgtgctgcgaaaagggcccccttctgcgaaaatgccattttgttgcgaaatcagccctcctctgcgataattaaagtgacccttggtatccaatttttaacggtataaattccaaatttctaatataaccggccatttgaactttaaatagtaccagagaagacccaaaaacaaagcaaccttccatcttctccctctcatctgaacctcgaccgcgcgcacctccgcccatctccgcccgcccgccatggcaagaacccgaggagctaagtcctcctccccgtcaagccgtacgagggcttcatcaaagacccttgtccaaggctccacatccgagcctccgcgaccactacgcaccccacctccagttcaagaagcaccgaggagccctccggtcaggcgctatcatatacgggcaagtagccagccacccaagaagaaagctaaggtatctgagccagcgttaattgaattatcagagccagaagagccagctatagagcctcagtcgtctcagccgtcgcctttagattctcagatccccttcggcatgactcctgagatgattatcaagcgccccatgctcactcagccgcccatagagggtaatttagactgcagggctaggcctttccactctaagctctgttttgacgtggccgctttcagacttcagccccagctcagggactccttccatctgctccggaggtatcatatggaacaattgcttactccaagggatttcttttatccccgtgtggcaatggatttttatcaatccatgaccacacaccatgtctgagatcctactgtcatccacttcaccatagacggacgtcatggtattctgggagctaggcacatagcagaggcattgcgcattccctacgagccagctaggccagaggattatcgagtctggactaatccttccccgagcgacatagttcgtattctgtccagaggggcatccacaggccagtatctacagaggaaggagctccctcctagcatgtttttcatagatgctctcctccgccacaatatctttccactacagcactgggtgcagaggcgaagagctttgctggaggcattatatcggatatctgagggattcttctttggccctcatcatctcattatggccgcccttctgtattttgaagagaaggtccatcagaagaagctgctcagagctgatgccattcctctactgttccccaggttgttatgtcagattttggaacacttgggctacccaactgagcctcaatttgagcgcaaacggatttgtcgagagatattcactcttgaaaaatggacgaacatgacagcctacagtgcagagccagtagcccctgctggagtagagcaactagaagagccacagcccatagagacaccagctgacacgaaagcacctgcccctgcagtgccctctactgatcctaccacaccacagtcttcccctgttttttcagccacatcacaaccctcctcttcagcagagccgaggactaccatatccatttccgagtacagagctctatgtcacactttgcagacattgaccacttcacagagcattcttactcaggagatggcagctcttcgtgctcatcaggagcaaattattgctactcagactcagcatactgccattctgaggcagattcagagccatctgggtattccatcagctcctcagcaccagatgcctgcccccttagagcccacagagccgactccaggagacacacaaacatccacctgagtcattatcttcacatcatcagcacccatctacttgatcatttccatagtttactttatgtattttctttatgcattttcttattatagtagcacttgcaatcccatgcttttgttatgatatatattgggattggttgtattacttgttatcatctttaatgtactttcatgaagtaatacaactctatcattttttgcatactcttggtattattttatttttattcctctactcatatctattttctttttgaaacatgtggtttctccttatctactcaaattacataccactcaggaggcaccacttcctccctgtaatttcaatcgctcataccacattgaggacaatgctcagcttggttggaggggggggacagttgaggaaggaagtttttttattattattattgttaatactaaatattttggtaatttaggttacttttatttaattttaaaatttttctctatggttgttaaagataatttctcaaaaataaaataggataagtcgagttttaacttaattatttaagtctttgagtttgttttatgctttcaaagttgataatctattaaagccctctttgatttcgaacttatttcttccatttcaagctttacacacacagtgcacattagatcccggatatatgatgtaaaactttctcactttctaagcttaggaaaattttgacttggttcattacttaacctctctttaatagtgttgggacacctcataaaggccaatgagtctttcaaaaaaaaaaaaaaaaaagaataagcttctattctttccttgaaacctaagcatgatccgaaggggtggcgaaagcctttaaaacccgatgccctaaaccttgattggttgggagtcatcgatcctctgcttgctacataggtgaattggttaaagtttagtgagtaaaaagaattgtgaataagaaggtgcgttcctaacctattaagagttggttaattttgccattgttcgagaaaagcttaggttggagggtgaggatagttgtatatactatatccggaacctaatctcgttaacacttagctcattatggaagagtttgatttggaaccttgagagtagagattcttttgatacttaattgcataatctccactctttgtactttttgtttaagttttagctttgacaactcctattgcattttgaatcttcatatctttagttcaccatgtgagatgtgttttgatatcagtcatgccactcaattatttttttggaatgatttgcatgacctcttttatgtttattactttatttgcttagtttttctctccttaattgctaagggactagcaatatgtcgattgaggggagtgattactactcaaaaagggctatttgatagcttgtaattaactcttttaaacacttttgagtagtaattattgccttttaacccaattaacatattaaggacctttgcaatcacttctaatcactttgtgtaagttttggtgtttttgttagtaatttgatcaccaaagcaatccaagatggaggagagttatttggaatccatggcaaagcaatggaaagctcagaaacatgaagaatgagagctttgaagccttaaagtcctttgccataaccaatccggaatgcaaggaggagaagtaaagagagaatctaccttgaagcattcttcatgacagtaatttcagccacttgtggagtacttcctgaagtccaatttatgcatgctttatgtcgtttcgaagatcgggaagtcaacaatccaatgcttcaaacggttcgcaaatcagagttgaaatgaagaagttagagccaatggaagcagatcactccaagctgaaggccaatttcgcagggctgcgaaatcagcctttggctgcgaaatcagccttcggctgcgaaatgatttcacagccattttgtgcacctgcgaaattctcctgagtgcttccagatatttgcgaccgacgttttttgatattttacttcagatatttgttgtctaaatcccaattctctccttgtaatccaccaattagatgattccttagttgttaagcaagaatacaggggtaaacaacctgttatatattgttttgtaattttcattttttggcctgtcggggaactttctccaggagaccaacttttgtaaagtttacacttagctaaatacagagtatcttttgctttctttttctctctactattttctattttcttggaagccaaacagcctctgaggatgttttcccagaggatgagaggctaaacttatagtttcttggagtgaaggaagctaggtgaaaagtccagattaaaaggtggaaagtttccgtgcattaaattcaggtagttggagtccataaatggcttctaaatccaaagttttgctttaaatcccttagagtcactttgactggccaatacatggtaagcttcaggtctctgtggatgcttattgctagatccatatcagtccattagttatcatgtacgagccattggaaagtgattcaaggtgatagcccatagtgtcttaagccattaatggaccttgactaccatctctattgaccttttatggattaaatcttcattgtcaaacctataccgattcgggaaataactataggttaaatccccaatgcgaggagaaaaatccggaattttccactttgcatcctgaacttgaacctagcaacctttagctccgggagactttctttcttccattttttacttagttctatgtgagtttagttttaattaccactttcaaaacaattttattttcttttaaacttcaagtttatgctaaaggaaatcatcagactcaatttctaatttagagtctgtcactgataaagtgaaaacccatccctgagttcgaccctagaactgctatactatagtagctttgctacgccagtataaggtcataggatttataagtattttttattaaagtactcaactgggcatgaatcagggatctcaagtggggggttcctgttccac

SEQ ID NO: 10915 - DNA, 2042 bp, Vitis vinifera
  Intron number 2 from transcript GSVIVT01030916001 (locus G SVIVG01030916001) derived from phytozome v7.0 (chr-ID chr1 4; pos 18938447 to 18940488)
gtttgtttcatgttctttctttccttttccttcaatgacatcacttgaattttttccccctcattttaagtcacgagtatttggagaatagcttgagtggtttagtagttgagtaggtagaataaagtttctttgagcagttgcaatgccctagtccatgttccagaaggtgtggctatgatcttggaaaaatcaaatatggactggttgaatataaattagtcactgttacaaaagtagatcagtgagagctttaaaattcaaaattgcataaaaaagcacatatatttggttccttttatgttttgcatgatataaaacttttggagcgtattttgagatgactaacattccaagaatcattataaaaattatcatgaggccatgcaaataaattctaatttttcaggattatctctttctttagattcacctaagtttttgtgctatcataatatggaagcaataagaatgcagaattcctcaatgcatttctagagtcaaacaaaattaaactttcatataaccagtagaaaataaatttgcctgtagagaacataaaaaatgtccactattgcacattcacaacctcatacttcacatgataaagaaccgatatgcaaattaaacaaccatttggtgctggataagtaatcttggtgagaaagaagcaagggaataatgcaaggatcaattgaattctcatagcgcctaaacaattatggtatttctgaaaaaagaagagacttcaaatctcatctcaattattataaagtgcaagtaaaatatgtatatatatattgacccaactattgaaattcatgagaatttggcatgactaagcactaaatctgaagtccttatttgccactttctgtaaagaaagtcccaatatctagatgaactttataaatataacaaaacaaatcaactttgtgcttgtttagataaacttcctgttttctgtttttgaaatcagaaaatagtggtaacttttatataaaatacaaaaacacttagagacttacattgaaaaagtaatacttttaaaaactatttaaatatttgaaaatgatttttaaaaataaaaggtaaatctatactttttgtacaagatgttctatttctatataaaagtttctgattttaaaaacaaaaaacaacaagtgtaacaaacggacacttttaatcaaatgcatgtaatgattaggatgtctcattagagtgatcgaacactttgcaatcaaatgcatgtaatgatcaagaagtctcattagagtgtataatctataatttttttgtacaagatgttttatttctatataaaactttctgattttaaaaacaaaaaaaggaagtgtagtcaaacagacactttgtcatcaaatgtttgtaatgatcagaatgtctcattagagtgtatagatgctccagtgacaagtatatctcttcttaactttgttaaatgcatctttatccaagcattatgattcaatgacagagagacatccccaattttccataccccattttttggctcatacattatttatgattttcatttgtcatatttatttcttgacatgaggcagctaaaaacctttttcacttgttagttccaagtattgttctttgtttattttgatgacattgttctatacattataatctactcaccctaaaaaatggattcattcagggataaagattcaactaaattaattctacatggatgaaatttgtgactatcaaaagggaagggtatgtataacaaattccataaaatcggagttccaattccaacagaaggacttgtattacaacatcagatgataagtgttatagaactcaatagttcaggacccaggatgaccacgtaatttcaagcaatcaaatgccagtttgatactttctaacaattcaatctttactagtacccataacactttccttcaaggacgtttgtaaaaagcttaattcaatattgtaaataatcaatatctcattttatcagtagcgttagtactcacagtgtcctaaat

SEQ ID NO: 10916 - DNA, 1450 bp, Vitis vinifera
  Intron number 5 from transcript GSVIVT01017239001 (locus G SVIVG01017239001) derived from phytozome v7.0 (chr-ID chr9 ; pos 5801782 to 5803231)
cattgaagagattgagagagtcaattcgtgacaaggtatatttaatgtattgtaaagaatccctatttaaccttgcacatcttgcttaagagaaaagttaaagtgacatactaggggatactatggtagacataattaaaatcatttcagaaactagctaaattcttaaggggattttttattatttttttattttttctatatttgatgcttgatctacatattgaagccttctgacatcaagtcacagtgtgcttacatgattgaagtaaatttattggaaattttttattaattcaatatcaactttatattttttaacattaaattttaccaatgaattttttttcaaattttcatgtcaaatttattgaagttgtttatatctgggtatttgactctgaacgtaatgcaatttaccagatttgattgaaaagaataggcatccaaacaatggttgtgcgtgtttcagtaatagaaaatattttgacatttgtcaatcctcagaatgaagtctccacttatgcataattttcaaaacccgacatgcttggaaaccattcagctcacattcaatcaacagtgtttggaatatccttttgttgctcataaatatataatggtatgttgagtgaaagtaaaaatgcaaataatgggattactcacgttgcactttttggtagctcaactaatgattaatataagttggctgataatgttaacatcactgtagacagtctttctggctttctggccgaaagaggagcaaagctaatggtgtctcattactccaagagcatctacataatttcctgttacaatttcaattacgatgtaaaagctttttggaacctatgaatttcccttgatttttcattgagttaaccttatttttgactaaatccattacttttattatcataaacataatgttcatgtgatgtttcatatcggatagaggagaaagtttcatgtgctatatatgtagaggtttttcttaaccctgtagatgcgttttaaagtcgtgagggcccgtttgggtctagagcgaacaatatctacatggttgggtacaggtcgttacaaatggtatcaaagttaatccccgaccctggtgtaggggtttgtttagccccataggggatgtttgtctgtttggccccacaatcccatagaacataacgagaacgttgtgtttgcatggggtgagagttgtttatgatggctcacattggatagaggagaaagttcctgactctatatatgtaaaggttcctcttaactctatagacgcattttaaagtcataaggacccctttggtttagagcgaacaatatctacatggtttggtgcgggtcattacagttcaagtttttgcctctcattttctactaagaagcatgtagtagtgacactgatatgactttgtctcatctttctaatatagga

SEQ ID NO: 10917 - DNA, 4800 bp, Vitis vinifera
  Intron number 1 from transcript GSVIVT01033693001 (locus G SVIVG01033693001) derived from phytozome v7.0 (chr-ID chr8 ; pos 18595338 to 18600137)
gcgtttcgatcgatccctgagttgaagccttcaaggtacagttccaatctctattaccaatttgttcaatggagttctagatcagaaaataacgagaaaacgaaagagaagtttgaatcctaaaattttcaccatctagggtttgagatagtaatcaaaatgtggttttcttttagtgttatttattttattggcaactcaaacagagggtcggatttcactgagtctttacatttgggatgttttgaattctagggtttctctttaaacagttgtggaactgttgtcagtttggattagagttcacaatgaaatttttgttagattaatggtttttgctattcgggaatgtcttctttgtataaaaacagagttagcttagatattgggaaaatatgaaaaaagtaattaaaaatttggattgtaaacttttcaccaaagatgattcaggaatacaggaaagtggctctgttaaggggctttttcttttttcttttttggaagcaaatgagagaaataacctaggaatgaattcatttaaagggaaatcattattggaaaatactttacaaatgtaatcagaaaagtataaatataagggtaagattttctataatcgaaaattacaataaataatttttttcctaacagagtttgtaaagtcattttttagaacaaacttaattgttgcccttatttattgaattgtatactgtaggagaagctaaaagatgcctttccctccatgatccttcatcatatgtatgatgacaagggtagcaagaaaggatgtaaagcccttgatacccttgttgcgggtgttatttacacaactcaaaaaatggttttagcatcatgagggaaatggttggtaccccacccccgcccaaaaaacccccgatcatttggcattttctaagtagtctagaatgaattcctaggatttaaaattttcaacaatagctttgacggcttaaatgcattccaagaaaaacctagccctctgtttggtttccaagaaaatacaggaatgaaagaaaacaatattttagagaaacaaaagtttttgttattaaattggactgcatattgttatatttgagtagaattttaagtaaattttggaatagaaaggaagggttttgctagaaagagaagggacatgaaaatgttgattagtagagaataaagtggtgggcatttttgacaatagaaaccctagctgcttatctgtctcttttattattattttgtcacctccaaaaacgtaaggagaaagggttgatttgtaagttggacattgaaaaagcctatgacagcataagttgggatttccttatgaagattctgcgtaaattgggctttgggtctaggtggatggagtggatttggtggtgcatctctactgccaagttctctgttcttgttaatggtgtgccagcaggtttcttttcaagcaccaaggggttgcgtcagggagatcccctctctccttacctctttgttttgggtatggaagtgcttagtgcactgttaagaagggcgactgtcgggggattcttttcaggctgcaaattttgggggaggggcaggatggagctaaatatttctcatttgctttttgcggatgacacaattattttttgtgaagcaaggaaagaaaacatgacttttctaagctggattttggcttggttcgaggctgcgtctgggttaaggataaatctagccaaaagtgagttaattccagttggcgaagtggaagagattgaggagatggctgtggagctaggttgtagggtggggtctttgcccaatgtgtatttggggctgccgttaggggttcctcacaaggcttcctcgatgtgggatggggtggaggagaagatgaggaggagattagccttgtggaagaggcaatacatttccaaaggcgggagggttaccctcattaagagcacgttggccagcatgccaatctaccaactgtccctgtttcgaatgaccaagatggtggcgagaaggcttgaaaagctccaaagagactttctttggggagggggaagcttggaaaggaaagtccatttaattaactgggaggcggtgtgtgctcaaaaggagaaggggggccttggcattaggaggattgcccgtttgaacaaggttttgttgggaaaatggttatggaggtttgcctttgaagaagataagctgtggaagaaggtgattatggagaagtttggtcaagagggccttggttggaggactaatgaggcttgtgggacgtttggagtgggagtttggaaggagattctgaaggaagctgattggtgttggaataacatagagttcaaggttggtaaagggaccaaagttaggatctggactgaccattggtgcggcaatgcagcgctgtcccaaactttccctcttttattcgatttggcagctcataggaatgcaacggtgaacgaagtttgggaccctagctttggccaaggaagttggaatatcagtttctctagagactttaacgattgggaggtggatttggttggtaatttgctgtacatgctaagggattacaaaatctcttcagaagaggattcggttttatggaaaggtgggggaagtggcatctttagggttaaggaggcttacaacctccttgttgcttcgaatgatattgtattcccgaataagggcatttgggtggacaaggtcccaactaaagttgtgttttttgcttgggaggccacgtggggaaaggtcctaactttggataggctacaaagaagggggtggcagttccctaaccgatgttttttgtgtgggtgtgaagaggagactgtaaatcatattcttctacattgtacagtggtccgggtcctttgggagattgtcttcgtcttgtttggcattcagtgggtgttccctgaaacggttaaagatatgcttttcagttggaggggttcttttgtggggaaaaaaaggaaaaaggtttggacttccatcccgttgtgtattttttggacggtttggaaggaaaggaatagattagcttttagggggggattcttatctatacagaaactcaaaaattcttttgtatgtaatttgtggagttgggctagggtgtatattggagaggagtcctcttcactcataggctttctagagtggctcgcgtccaattgagggtaggtaggattgtgggctttttgtggcttttgggtttggctgctttgtatacgtcctgtatgctgtgtggctttttgcctttttaatataacatctgcttacttatcaaaaaaaaaaaaaaaaattattattttgtcacctctccaaacctgaatcttcaatcaatttctattttgtggaaagcaaggctcgccctttttatttatttattttatgttttgttcctgaggaaacggaggaaaggtgaaagtaactgacaatttcagtcatttgatttcagtcgccttttttttctcttgttttcatgtccttgcctttttttctcagcaaccaaatggaagatagcttttttccatctttatttgaaataattttaataagggatgctgtcctagtttgtgtttttttcctctggttgctcagaagacagtggaaatgtgaagaaagtaaaaattgtgaatctttatgcattctcaatgcctttgtgttgttgctgaggactcaaaacttgggagcacattgtgattttttaactcttgtagctcatttttgctttatagtttatatgtttttacagttttccgtagaatccataagtttcaattgaaagtaattcccaagagaattttctgctagactctccatggagattttatcttctcatatattcctaatgcaaagaaaatttatctatttttttggggaaaattctttttcaacacaaaaaacttagtcacttgtaaaactcaatagagtgaatgagttaatgatgccgcaatgcgaaactcagattttgagttgacaattttggttgggagttctcagtggttgctatccctatggtacttcattatgtctagatttgaatatgaggtcagtataggtgatattgaacctgtactgtgtaatgatatgtgacatttcaaagaaaaaaaaatccttttttttctttggtaacaccatatggaatatttgtctcagtgaataaaaccaaaatgattccctgcttgttgaaaaatgtattcacattactcctttaattttgaaaggagttgaatctattggattagaaatggactgacaagtgacaagtcagaatttcttttggtaattgcatgagatgatctgagttgccgactaaaggcaaatatcttgcatcacaatgcatcatgagacatattcatatggttactaactgtattgtattaggtagtttagctaatgaaacccaggatttgtgccaaagaaactgttatatgcatactagatgcttgattggctgaggcactattggtaatatcatgaccaccttttacttagttaccaaaggtgttggattttggttattttatgattatacttgttttaaaaaaaatgaaggaaatgtttttgtcatatagcatgatatctgatttatttcttccattttgtgttcttatttcacacgaattattctgtgtaatgattgtaagtgatcttgaatccaggtttttcttttttccctccttctttgagatttattaaacctgttcatcataaaaattcttctgttagagatatctgatttggctctggtttcagcaggtgaattgatccaaa

SEQ ID NO: 10918 - DNA, 4363 bp, Vitis vinifera
  Intron number 6 from transcript GSVIVT01021851001 (locus G SVIVG01021851001) derived from phytozome v7.0 (chr-ID chr1 4; pos 6520310 to 6524672)
ttcatccaaaattgtaagtaactattagttcacttattttagattttttttccctgcaatctatgtgattgaaattagggccatgtttaatgatgtagctaattatctggttctttttcattctgtgaataaccttttggacattttcttctaaatattttcacttagaattttttgtgcctagtatttgaggtagttaatgagtcaaggcaagtggaatgctatctggaaaggataaaaaatagaatataaaaattacatgtaattatggccattaacagtccaatggacagatgtgttgatacataaagtgattgaaagaatttttttttttttttttgatgagtaaaagagatatgcattagaaaaggcaaagcatacagggagtatacaaggcggctacagcctcaaaaaaagaacaggaccaaaaaaagactacctccccttaagtggaagctacccactccaaaaagcctataagggagaaagactcctcgcctaagtacataaagtgattgaaagaaaatagaacagttttattaaaaaaggaaaagaaatgggaaagtacactcatcaaagtatatgttgaaagaaaatgtaaggattctatatatatatatatatatatatttgtaaaaggagaataaggaaagggtaaaaagcactcacttctagtgaggtttgattgaaatggtagggacctccactcaagtttgaagtaggatattgaccttttttgcgctttcattttccaaatcaacttctcatgctggtataatggtttggccttcttaatggtgtaaaggagatgtacttatttactggcaaattagattctgcagaattggatttgggttatttatttattttgaaatatggtctttgataaatagaacttgaaatatataatttatttatagattaattttttgtataacttatttttaagacattattttcatatttattgacttggattacatatcaattaagttagtggctaaatatgtgttttttcactggttgctttcttcaaaaggtaaaattggtagtattttttttttttctcttttcaaaacagaattggatgatatgtgctaattaggttgaccaatgaaaggaaggccttgtcataaaatgaaaccttaggggaagctgtcctgtttcaaacttgagtggttagtaaggtatttccaaaaagaaataaaactcagcagtggggcatatcctagtaaaaacttgaatttcagtgtgcactcactgctggaaaaatatgaatactttctttttcaatttcatgaagcagctaacattggcaaattggaaaataaggaatcttcttattcactcattgagtatacacacacacacacacacacacaaacacagaactttcagacttgtacaataaatggaaattaaataagatagctgacctatcctaaaattcttcctgctaatcctcttagaaagcctctaaattacaacttctctaatttacatagtcaactaatttaaacacacacaaaataaggaataaatcaaataaactccatcaaatcaaacaattgttggattccgatactcccctattagctggtttaaagatatcttccattcctagcttgccaaccattgagttgaatgtgggattttgaactccttttgtgaagacatcaactaattgtagtttggatgcaataaatagagtgcaaatcaatccactatcaatcttttccttgataaaatgtctatcattctcaacatggttagtcttatcatgtactaggttgtgagcaatgctgattataacctcatcacaatataatctcatgggatcctaaggattcacttgtagttcccctaacaaaccttttaaccacatgagttcacaaatgccaatggccatagctcgaaactcaactttagtgctagatcgagtaactgcttgttgctttttacttctccatgtaaccaagttgcctctcacaaaggtacagtaccctcaagtagatctcctattagtaattgaaatggcccaatttgcatctgtacaagacttaactctaaggtgattgttctttgagaacaataagccttttcctagagttgacttcgagtacctcaagattctcaagattgcattcatatgacattctaagggggagtgcataaattgacttatcatgtgacatcatatgctatatttggtctcgtgtgggacaaataaattaatctcctaatgaatctttgatagtttcctttgtcaattggtattgatggcgcttaattgatgattttgatcaataggtgtacccaatagtttgcaccctagcctctcgatttcttttagcaaattgaggatatacttcctttgagtaacataaattcccctttttgatattgccacctcaatgtcaagaaaatatctcaaatttccaaaatctttaatttcaaattcttttgccaacttttccttaagattctagatcttttctacttcatctttagtggcaattatgtcttccacataaacaattagtgtagtgatctccttttttggtgattatttgatgaacaaggtatgatctgcttggctttggtgatagctaaatttgagaagagacttggcaaagctctcaaatcatgcatgaggagactgcttaaaaccatatggcaatttcttcaatctacacacttttccattgcggaattttccttcaaaactaggaggcaaatccataaatacttctttcaagtttcatgcaaaaatgcatttttttacaccaaattgttgtaaaggccaatcaagatttgttgcaaaggataaaaggaatatgatggaattcatctttgccactggtgtaaaagtttcttgatagccaatttcataagtttatgtgtatccctttgctactaacttgactttatacctctcaattgaagcattaactttgcatttaatggtgaacacccacttacatcccattgaatttttttctttgggcagaccaacaatatcccatgtttcattcttattcaaggctttcatctcttcatttctagcctccttctcctatgatcatttagagccttatgtacatttttaggaattggaatcgagggcaaatgagtggtaaatgccttttacatgtggcaaagtctatgataggatagaaaatttgacaaaggatgtttagtactacttctaacacctttcaaatggctataagaatatcaagatgaatgtcaaaaccatgattaagaagagagagattagaaggattagatgtacttaattctagagttgatgactggtcgtgtgtaagagagattgggtcttgttcttggattggtagccttggtctcctagagtgagccatcaagtctgaatcaacattttctgctgttgctgcttgtatgatgtcagcctcctctatatcacatgttcagtagcatgactccaaatgggtaaaggaagtgtccaagactggtcttcttgcaatattttctccctttgaagatcagatttctggttgtagggttggttttgaaaaaggctgacatctgtggagacaaatttcctttgtgtaggtggatgataacacttgtactttttgtgtgggaaaatagcccctaaaaaatacatctagtggctttgggatcaagtttgaatcagtttttgtttgggaaatggacaaatatagtacaaccaaagacttttggtggaagggagccaagacaatctatgtgaggtaggtgttgtttcagaatgtctactggagtcttggtgttaaggctttttgtgggtattctattgataaggtaggcagttgtaggtactgcatttccataaaagaactgaggaacgttttcagcatacattaaggctcttgctacctccaacaaatgtctatccttgctttcagctacctcattttgttaaggaatacctatacaaaaggtttgatgaataattccttatgtactacatgtgatcaagctcacttaataattctgaagaatatctttttttcgttgccattaaagaggttgacttgctggcatcagatttccggcctttctattggctattttcatatttctgttaatttcaacatctggacattaaaccaaactgaattattcaagtggaaaaatttctgaagctctattgaagtataaattagttgggggttttaaggttattttatttgcaaaatggtctttaggaaattatatatgctaattcaaaacaggttgataattgctctctagacacatgaatatgtttgttggaaatagtggttactatctggttgctatgtcagtaatggaatgctaattgtttatcttcttttag

SEQ ID NO: 10919 - DNA, 4812 bp, Vitis vinifera
  Intron number 2 from transcript GSVIVT01007898001 (locus G SVIVG01007898001) derived from phytozome v7.0 (chr-ID chr1 7; pos 7778599 to 7783410 reverse strand)
aagatcgaaaagttggtctctggtataaaagcaaatgcagagaagttgaaggaaatgactagaaagagtgtaagcgaaggcggatcttcttacaagaatttcaaaacctttattgaagcaatgaaactctgaagatgcttcccaatgttgccacattcaaatgtgtgaaaccattctctcaataaaagcgaatgcattcatgttgtgtatgcatgtgcaggggttggtatgtgatcttagtgaacaaaaatcatggcaattgctgcatgaaatttgtgtggtagagttaattaatgacagatattgatgtaatgcattagtagtggagcaaagaattatgtatgattgggggatcaagaactatactgttgtctacatggcaacatataaaaaaagtgcacgaacagagcaattgaaaatcgaaagcagcattatttagagcttacacaaaaattgggcaacaaaacatgttgacggaggccacaagatggcgctgttttgaatcttttgctgaaacccaggagctaagggccgtttagccatgttttgtaatgtttatctttaaaaactgttgttaaaagagcaaaaaataactttttagtattttataaaaataggggtgtttggcaagttatttttaaaaatattataaattcaatttatgtaatattaattaatgttttcagaatcggattggtcattaaattagaaaagttatcggttcatgaatcatgaattggattggtgttgaaccgcgattgaataggtgacatcataaatatataatatatattatgtatatatattattaaaattaaaaaaatattaaaaataataataatatcataaattcaattgataattgaaaacataaattcaaaatattagaattttaaaaaatcataaattttttataaaatcatatatttatttaaaagtcaaaaatatgtttgataatagaaaatatatttgaaaattagatatttattttaagatcataaaatttattcttaaatgaataagatgattcaaatcaaattcagaaatttaaattcataaatataaaatcacaaatttaaaaaatcagaatttatttgaaaatcatatatttattttaaaattaaaaaaatttaaatttatttttaaaccaaaaacttattttaaaaccaaaaatttattttcaaataaataaaatgatttaaatcgaaattaagaaatttaaattcataaatttaaaaattaaaatcataaatataaaataacatatttaaaaatcagaatttccaaaaattagaaattaaaaataatacaaatatcaaataaaataattagataaatcaaatgataaatatttaaatagtaaacaaggaagccaaacaacatttacaactccagtcagtggagtcgtcgacgtcgcattcgtccatcggcgtcactgtcttccattggcgtcggtgtcggcgcaagcctgctggctagaggtgccgaaggtggggggctgaggaaggctcctggagagggcaagggacggttgggcatgggggcaaaggggagaggggttagggcttttcatttccgtgcaaaatgcatctgtcttggatttaaaaatgaaaaaaatattaaccaaagaactgttcggtttatggcaaaccgcctggttcaccggttcaatcgtggctccgccggttcgcggacggttcaattgtcaaatggttcaataggtagaccaaaccggtttggtcctcggttgatggtcacagattaagttcggtttttaaaacactgatattaattatattaattaaatttaattgaagttttataaaaattaaaaatagttttgtaaatacagataaattaaaaaaataaatagttttagtaaattataaataataatattatactaaaatcacaaattatatttttttataaaaatattattttagtatatgttataaaaatgtgaagattaacatcttaagcataatcatttaaaaagaaaaaagaaaaaaagaacaattataatttaaaaataataattattaataatattttattttaaaaaataatttttaattttttaatatataaatgagcaaagttttcgttagatgtgcatgtgtagtatataattgtggacaaagttttaaatattttgatttaatttgtaattaattggctttattttttgaattcaaaattattcttaaaaattaaaagattcataaaaaaaatttaaattaattattaattatgtctcactaaatttagaatgtattcacctagtgagaaaattcataaaatattagaggataaaaagtaaagtcataacttataatctattagtttcgacctattagtttttgtagtggatagatctattttagtagtttcaaattattaaattcaatacatagtgtagttttattttgaagttcatttctctaataataaaattcataaaaatatcattacatgtcaaaataatagtaataataataatagtcattatggaccaatttttgtctataaattttttgtattagttggtcactgattgagtttcaaattattttttgcttaaattattacactcattaataaatctaacacatcaagttttaatttgcttaatttaaagtttatttttcaatgaaaaatttgaagaatatgattctacatagaagagcaataatagtcattttaggccaacttttgttcataaaattttcatgttaattgattcactttttgagtttcaagttattttaaaaaatttatatgcttagtaacgattctaatgcattaaatatttcttaatttaggtgatgttttttttttacttaattctaaatagaactttaatgtttaatagtgttaagtattaagttatttgtttttgtagtattttatttctatttagtattaaaaaataaagaaaaactaatatgttatattttctatttagaaaaaactaaatattttgattttttttattcagcaaaaaatttataataagtcgtgaaaaaatagaaaaccaaataacctaaattctcaaaacaaattgctttaagcaaaaagccaaaaaaacaaacaccctcttagagtatatttgtttaatgaacaaaatttataaagtatgattatatgcaaaaataaaataaattagccaattcattcaaaataaattttactcaatgactctttaatattattaagctccatgactttctagaactaacaattaaattggtttttttagtttcaaattattttaaaaattaataaattttatgtatcaagtatagtttgatttgaaattttttgcttaataaaaaaattttaaaaaaaaattaaaagaaattcaaaaattatttgtagctttcagcaatttctaaaattcatccaggattatttgtagcttaataaaccatagctctctatgccaagggtttgcccttgctggtttcttaatccactctgcttggaactcaattatgaaggtttgtccttactttggcgaccacttccatatctgtgatttacaaaggtgggtgtagggctgaactcagaggaaaattggatcatctgaaggtataagatagagaaaaaaaaaatcaatacaagggaaaagaaccaagagctcaaaaccatagagaaagagacaagcataaagccctacataaaggacaaagtaaactagagatgactacccaagaatatatgctaaagcatctgctgattcagaggaaaatgggaccatctgaaggtataagatagagaaagagaatcaatacaaggggaaagaaccaagagctcaaaaccatatatacaactagagaaagagactagctgcataaaggcctacacaaaggacaaagtaaactagagatgactacccaaaaatatattctaaagcgtctgctgaactcgaggaaaatggaatcatctgaaggtataagatagagaaaaagaatcaatacaagggacaagaaccacgagctcaaaaccatagagaaagagaccgcataaagccctacataaaggacaaagttataaactagagatgacttcccaagaataaatgctaaagcatctggagtaatgtttatatcgaagaattaattgagagtgatgctactaaggtgaaatctagccattgtccaaaatttcatttcccttcattgtccaaatctagcttcaatcaggctcaacaaaaatacaagcttgtttaataaatacatgctgggatgagaataaagagctcaaaccattcatgcaacaacaaaaggaggctagctacataaggggttgtaggtgaagacaaagcaaacaaccaatgataacttcctcgtaatataccttgaagcacttgagaataaaatacacagcgaggtatcagcaacttggtggaaaaaccaagtagaaaaaatggctacaatccaatgactgcaccaacaaaatgtttattgtatatatggagtgtgtaatgcagaaaccaaaagtttatcagtgcaatttaggttttaaaattaaaccaaagtaaccgagagccacacaagacacttcataaagacaaaataggtaggatctagacaaaaccaattaaagtgccaaagaacttgagccacaacaccgtatctttcagataatatatgaaattcatgtgtaggagatgggctgcagctaaaatttagcaaataggtttacgattcacacaatagagggcttaggctaataaagagaagcagtgttaatcctgaaacttgggatcagaggaagcagaagtgtgtggaagtgttggcagcaacc

SEQ ID NO: 10920 - DNA, 4739 bp, Vitis vinifera
  Intron number 1 from transcript GSVIVT01019544001 (locus G SVIVG01019544001) derived from phytozome v7.0 (chr-ID chr2 ; pos 1482373 to 1487111)
gcgctgggagggctcgcctggtgcgattccctgccgtgtacggaagaagaaaggtagagacgatgaagagtaatcacacaggtatgaatgaagtgaccttgcgagtcctcaaagggtgttgaaaggacaatctaaaatggacgacggtgctgtgaaaatgaactcagagctttcgacgtcggattcttttccactggagtcgtcgaaacatgcgtcccagagcggtggggcaccggagggattagtgttcgccggaagtgacagcaaggggggagaagaaggggagaagcggagctcgacatgtatacctcatggatcagcgtcggcgattgggcgcaggagggcgatggaagacgcctagactgtggcgccgggagagctcgctttgtaccacttctacgccgtgtacgacggccaaggcggggctaaggtggcgcacgcgtgccgtgaccggctgcacaagctactcgcggaggagattgaaaacgggagagatggcgtagaaggaaccaattgggagaatatgatggtggcgggcttttcaaagatggatgaagagactaaagacgaagccagtgaggaggaagacagttcggaatcttccttgttgaggtggataggatcgacggcgacggtggtggtggtcgatgaagagaagcttgtggtggccaattgtgaccattcgagggccgttctatgccgcagtggcgttgccgtgatgtgtcttttactcgattgcttctcctcgcacgagaattcgcagcatcgtaaaactagatattcaattttcctctgatttttcccttgccaaacacactgataaaaaccgaattttgatgacctcattttccatgttgtgataaattgaagctattttttatccttttaaaacttcttttatgtttataggaattttttataaataatctctcccagaattcccaaacttcacctctcccaaagggactttatcctcttaacttgtgaccctttgagcagctggacaggacttctctcagtaacttttgcctcttcgaagactgaaaagttgacagagatttttgtttcattcaagcaggtacaatattgtgtttcaaaggattttttttcagtctggaaacttatagaatccttataaaattttcttctctcttgggctttgcgcatcagaggctacacaaagtatttcttaccgtcagagattcttgtctttttatcttggggcttcacggttgagcatatccacttcacgtgattacattaccaaaatttaatttgattaaaaagctatctttgattatagaaaaatttaagaaaaaaaaatcaaaaatagatttaaaattaattatttcaaactcattttatttatttaattcttttatttgtagattaataatttaaaaatatataaaatttcaattatatttaatttgtttatcaaattaatcataataaaacaatttttttggttatcgtttaatttgctaaatttggattggggaggatgaaaaaaagggaaacatggtggatgatgtgatattattattcttattattccactcatgtctttcaaatgataaatgtcaaaattaattctatcatttattattttattttttttaataaagttaactttttattatttcaaaattatatattactttttaaattttagtataaatacacagaatataaaaataaaaaggttattaagagtggattcaattcatatgcacattccgaatttaaatcatagaacccgctcatctaacttgagtttgactcaattaattcaagtttaatccgaacttaacttgacttttgaaaaatgagaacagtttcattttattgtttattttcttattttaatataatttccaatcataaaatccaccacttattggattttgaaaaagtaagaaaattgatgatttggataaaaggtttattgattcaaaattttcattgattaattttttttcaaaaaaaaaattgaattcataatcaatcattcaaagaaaaaacttagaaatttatgtaataataaaaatgcatttaaaagtgaattacaaccaagaaaaataaattaattagttttaaaaatgtgttaatccttaattccatattattccatataccatttacaaaaataaatatatttttagtaaaaataaaatggatattcgagacccactagtttatgagctcaattttcctatgttgtggtaaacttaagcgattttctatttagaaaatgttaaatactttctacatgctgtttacaaagtctcagcactttcatttttgttgagtttacggttttgtcattgttaacagggacaaaaatcctaaagaaaaattggaaaaaaccttctctatactctctctaagtgtaactgagagtacgtgactttgaagcatatttcattgttgtcttcaatttctccaccctcaagtttgagttctcttctatgaaatggatatgcttgtaacatggatttatgccaaaaaaaatactatgaaatgagatatgaatggtaacaacccgttcttttctagataacatatggagattagaaatctagtttaatatcatttataacaaattataacattgaagttagagatcgactctaatattatttataatagtaaaattaaagatcgattttaatataatttataatagtttataacaatgagaaagatgatcaattttaatgtcctttataacaacttgcttcttcccatatgaataatgtttgctctttaacatgcatctacacgattaaatgtgagaatttttttatcttatttaatataaaatatcacatgaaatgttcatcttaaatgaattagtcattacatgtaacgaccactctcaaccacattgatattgtggactataaatctaataaactttcacgaatttaaaaatcatctacataattaaaattagttcatacacatgagaaacatctttccctgtttcacatatttcattccaattcttgaaggcattgacatatttttgtgaaggaccttgatcttacgaattttttgttttttgaactttgaataggctgacagagaaagggagatggtagaatcagtaataattacgttaatgtgtaatttttccactatggattcttcttcggtttttcagtagaatataactaaagttgttctaaaacaattagtccaaagccttgatcatctctttgttaattctatgttactgcccatggggcaaagcagccttcttttgtagatgttacttgcagaccccccgcatcacccttggccgacactaatagagtaatctttattctttatcactattaatccaataaattacttatttcttttaattattaattatttttatttttcaaatatcgatgtctcttttaatctttgttttttgaatataatataatataaattatacttctattttatatgaaaaaaatatataaatcaaaaccttgtttgtcaaatataatcatttatttaaaaattaagaaaatatttaatataattaataatagtattcatatatttttttaattttatattttaaaatcatatatatcatatcaaatataaaataaaaattagataaattaaagatgtgtttaaataatgatttaaaaaaatatttttgacattttttagtacttaaaagataaacataataggtagtaaaatgattaaaaacattttataaaatcgtgctctaattttcatttttttttcactatcaatcactatcgattgcactttataaaaaaagtcctttataaaaattttgataacccttcaaaagatactcaaagccccgtaaaaaaagagatttgtgaggaatcttttgtaatggaaagtaaagaaagaagattgcggcggatccagagaaggaaaggacaattcttgagacttgaaattacaataataaaaaagtgaggagacacctttcgcagaagaggacgagacaatccacctgaactctgggaaactctttttagaaaaaaaaaacaaaggaaggttgcattaggatttgatgatggccaccaaaatcagggacatgggaggaaagtctaatgattagcaaatagaaatatattagtctaatgggtagaaaatgtaaaagcattggtttagtattattttgacctccgtggaaacgtgaccgactagcgtgttttgcttctatctatactaataaatcttgttcaaaaccagtggtacgcatacctcacatgtggacctcaaccaatgagattggtccacgtgtcccacggggccaagagcagtcacacagagaccagggtttccagaatcacatggtggccatccaatgctcatatcgctctctatttataccatctcggtggaagatggtttccatgctaaggttgttgttcgagtagttaccgagaaagtgaaggaaattggtatgtttgatagagacgatgcagaagagtcacacaaatatgaataaagtgacctactccgactcctcaaacggtgctgaaggacggtctaaaatagatagcggtgccgtgaagctcaattcagagctttcgccgtcggattctttttccatggagttctcgaaacaggcggacggattagtgttccacggaagtaacagcaaggggggagatgaggcggacaagcggagctcgacatgcatacctcatgggtcggtgtcggtaatcgggcgtaggagagcg

SEQ ID NO: 10921 - DNA, 19387 bp, Vitis vinifera
  Intron number 1 from transcript GSVIVT01034291001 (locus G SVIVG01034291001) derived from phytozome v7.0 (chr-ID chr9 ; pos 14124613 to 14143999 reverse strand)
tgtatattgtttttctaaaattaagtacaatatatttctagcttttaatgttgcttagttaatctctcttttcatttatattaatttgatgtagaattagctagtttgagaaacggaagtattggatttaagctataataatttggaaagctttcaactattgcaaggtacttcattaacttgctaaaaaacttatgatattttgttattaaattaactatcaaattaaccaacaaattcttctcattagttacttttcttttgtaatgtcataaaatttgatataaaatagtctcaactaccatttcaactttatttcaagttccaactagatgcatcaagcttgtgcaatatattttatataactaatattttaataagtaattaaaaatctttatttctataaagcaattaacttgattattaatgaaaacttacatgtatggtattgatataattttataaatattttaaaatagtcatagaagtcttttatctaattcactagaaagaaaaataaagtattctaatgaaagtacttgatgatttgaagtgattgcttttgattttatttgattgctaccattattaattattagatattgtcttcaaaaacccattttccatcacttttatatgcattacgggaataaagtatatttcaaagagctagcagggcaaaccttttccttttggaattatggaaatggctgctaggaagctaattaaccatttatattttgattgataccagttgggttataaataattcatatggagattaaaaaaactaagtaatttagttcaacagcttgggtgccattgtaatggttaatgctctacaacttgaacacatccattagtgcttcctagttgtgcagttaaatttatattaccactttaaactatactttcatgagaagaaagcttttccttagtgataatgtaaaagaaattaaatatcagtttctgttaaacaaacaagtgatagtttaggtattgtttgaatacacttcctttcttctattttatttatttatttattttacaaaaaaatctataatgaaatataagaaatcttatatgtataaaaagtagagacttatataaaaaatcatttccaaatttttttaaatttgaggaaacaaagaatttcttttcttcaaattttaaaaatcttgaaaagagtttttaagaatataaagtgaatttgtatttttagtataattcctatattttaaataaaagcttttattttaaaaaatagaagtatatcttaattacaacttaattttgaaattaagaatgcttgtcaaatcgtgagctaatggagattgcaaagaagtttgcattattcaacctttgcaattactcttcaagggtgaatgaaagtcttgttgttaaaaatgaaaaaaaaaaaaaaaaacattcttgaataacctacaaaggctggttctagtttgtaagaaactaatatatgaataagacttcctttataacaaatatatagagaagaatagtggatggtgggagatgaaaatgttgcaataaaatataaatatgggttataagacaatctaaattttctctatttctcatatctatgtgattaagaatcttgtagttccttaattgaaatataatgtaaaaatataaataaaatatttaaattagaactaagtgtatgtagtttttaataggaggaatctcaaatgtaagttaattatgatcattttttacaatttatttttgttaaagtttcaatagttctatgaaggttaaaagtttggattgtttacatgtgtaaatgtgaaatttttatattttattttattttatttatttatttatttttttttgtagattcaaaaagcttgtccatattcaaaaagctagagaccttgaacctcaaccaaaacatgttcaagaatactagccttcaacaattgaatatattcacatcccttaaaaatttgtctctcaaatggaactctttggaaggattttttccaatcgaaggtatgtgtaattattattatttttaatggtaaaatattaaaattttcaacatctctaatctttttttccccttcaatggtactgtaggattatgcactctagaaaacttggtgttgttggacctaagtgggaatcaccttataggcatgcaaggtaaatacaaagtgaagttttggttatatacatcatgtaagaacataattaaaatcaacattctttgtctatcaatttgtgcatgaccattatttagctattcttcgtaacataattgaaagaatgtctagattccaacatttagcaattttacatgggacaatgaaaaacatgataactatttcatcatattattggaataaaaaaattcagatagttatatgggcttttgggtttcttaagaatttaagcatttatgggtcaaccatatgtaagaaaaataacgtttaaaactaaaaattggaaaatgaaaaattaacaaagtaaaactaaaaaaaaaaaaggaataaaaaaaatattatatggagacaaagatagacacccataaatatacatataattatttaaatataaatatcaataagaaacaatatataataaaatagaaaaaagttaatctttttaaaatttaaaaataaaactaaatgaaagaaaaaatttaagtaaaaacagaaaaaaaaaaaaaaaaaaggtcaacaatacaaatagagaagtaaacaaaactaaaaaaataaaataaaaaaaatttaaagaataaaaaactatacatagactaatttggacactaaatgaggtttttctaagatagacttagttagacttgaaccaaatgatattaaaaataataattttgaagaaataaaaatgaaacaaatgttaaatattggattaaatccattatcataaccaaatgaataaagagtaactattattttttaacattttttattccttagaattattcttttgtgtatcaaatgtattataagcgaagtggcataaaaaatgttattaagaaaactatgaagaaataataatggtaatgaaattaataccttttattgtacatttggttatggggaggtatttataggaaaataacttgaggaggttcggcatgaataggtttccaaatccaatttgcatgaaaatcttgaaaatattcttcaaatctcaatagaaaatgcatgagtgctcaagcacacttaaccatagtttgagtgcctcgagcacttgagtgaggctaagcacttgagcaatcctagtgcttgagcgctatttcctgttcaagttgttgggaatcttggatttctccattcccttaccctaaatcatataggtgcatgcaaaactaccctatgcctctagatcatatgcaatggaagtaaaaatcatatttttacaattctaggatcaaaaggaaagccattagagaactttacctttgatttggatgttcccaaatcaattccacttagagaagatgaagaacaatgaatccggatgtctcgtacactcaaaatcttctgcctgatgactcgaaccatgattttgatactccaaagtgtggacttgggaaaggatgatctcttagctctcagtatttctctctatccctggaggtggaagacaaagtctctctcaaggttatggataccctagcccttgtggatatttatagggttcccttattaggtttaagtgacttgagtccaccaaggcttgggtcacttaatctaatgcaaaatgggtcctaattggttaattaactatataaggccatctaattaattaattagcacaatctagagaacttgttcactagtctttatgcaatcttgtgtaattaccaaaatgcctttcaacataagaatgaaccaagggttaattcatcccttataagctttgtcatcatggtatttgagctcagagggaggaccattgggacctatagaagtacaacttcctcataatccaattttgaagttgattaaacgttccactaaagagaatcaactacactccaatatcctataacaacgagacaaaactaggggtccgtgacctactatccactgcatgtagacttcccatgaattggtgtctataatctaacaaggtagtgttatcacctatcaaggttacctctccaatccttaagttatagatctcacttattatgtgatcaattgacatactctagctttaatgagcatatgtcaaatttccaataagggaaattctatggtcagagtcttttaaatcacatgtcctttggatcacctaaggggacactgtctcaatccataagatatcctggttcctatattgagaatgcctattgccactagccttcataaaaaatgacttaatctataagaacatatgatcactctagggtctcacatataggtcaaagcttcttgttagctttggcatgaactcgatatcctctcaaggttgagattccatgcaatatagtagcttggtgaatcatgataattgattgcattgtgtcatgattcactgtaggtcatatccaatgcatatcacatgcactagtacactcaccatgggaaaacaatcatgacaaccaagacaagtcatgcctctaattaggaggtagtgcactacaatctcatatggatagcccaaatccatgaactgactatggacaactcatcactctacaaggaacccatgacttggatcttctattcaactcctaatgcaccaagtcatgtacaatgtaagtaatgtggggcatgtatactcaaataactaattaatacaaatgatatatttaagggaaaccaagaaacataaataaataaatttataaatgaatctcaatctattacatcatgtcatgctttccagggcttaatcccaacatatatatatatatatatatatatatatatatatcaaagaaaaagttattatggatacaaaagataagcaaagaactaaataactaaatgactggtggcagcgaagtggaactcgaaacatgtaaccattatatggtcaagagaaaacttccatgcgtgaagacaataaatactctagatagggcgatgttaaagtatatgcatgaaaagagctagcaacactcatcctccagtgaagcacaagtctttcttatagaattcatctcatgcatcaaaacttaagagagttgaccttcactgacaccatctttgtaggatatgattatatgaggttttaggattagaggaggaatggatcatacaaacataatgcgttgataataaacagatgaataatatcaaactaggggattttgacatagtagataatccattagtagagccatatggttaaaaggatcctaaagcaaaaaaccatgaaggggtttaggtgtcctatagccatatctaagggaacaccaaaggacatgaaaactaagaaaaatacgaaaaaatctaaacgactagaaatgtcctaaatgatgcatagaataatactatgaagtcaaaaacttgaaaaacgaataaaactaacctaaaaaatcaaagaaacggagtcccaaagcgtttgagagaataagaaaacatttgaaattcaaaaaggcacgttggatgggggtggatttttatactcaaatgaacagctagatgcagattagctctcaaacaggatgtttgctagatgtgttactgtatgcaacttagaacacttgagtagtaaagatatttgatgaggcttgagcactggatgcaacactcgagcgatcagagtctcatttcaattctaacaaaggatagaatactcaattaactaacttaaaaactaggattgacaccaattgaaacaaattttagcaatagactaaaatgagtagataattaagttcatagactttcaacattagctcaattagtaatagattaagtaagttactttagatagtacacatcaatccatcaagaatgaagtttcaagattagaggtcaaagtttattataatctcaattttgaaaacccaatgcataaccatcaatgtataagaaagccaacatagaaacgtaagtattgattttcaagggaatacaacttactatctagttctatatttcgaaattgatcacttagaagagatctagtcatgtctttggtcaaattaaagaacacatccaatcaatttgaactaagatagttggatttctatttaacatgacctcattgatctacatatagcataacttgactcccatttaatctaatatcgttttctttttctttctttctttctttcttttttctttttctattgaaagtgaaggcatggtacaccatgatcaatattaatttttcttttcgttttcattcatggttgcctttgtatccacttagggggtgtttccaaatgttgcaagtgagtaccatacatttaagagcatgaatcttggaaagagtatgagagttatgtttaaccaaggattcaatattttgcactgactcacttcaagaaacaaatataatgatcatagtcaaacaaggtacatggataagaagatttgagaatgataatgaatccttccaaagcaatcaaagtctactttattgaggtccacttaagaagtctccctcttaatcaagtataagatgtaactaatattaaatttctcacataaaaagacatttaattatcatgaatcaaatacatcaatattgattaactatatctatgattcctttcacatcaaatcttgtagatgtagtatatttctccaaatcacaaactcaaggtattacaaatcatgctaatatatcaggtaaatagacaaaaatcatatgcccaaaacaaaataaggccaaaggaaacaaaaaaatataaacactaagttcaaaacatttgaagcctaaacttatgaatatcaatcgattaggcatatgcccagggatttcctaaagtactcaaacctaagagaatccaggggtttgataagaatatctaccaattgatgttcagtggggacaagctctagagaaatgacattgtcttgaacaagatccctaatgaaagaatgacggattccaatatgcttagtacagaaatgaagaatatgattctttgagatatttatagccctaaatttgtcacaatgtatgcacatggtccataattccatagtctttaagtattttcttcatccataagagttgcgtacaacagcttccaacagtagtttactctgttttgatagtaagtaaggatatagagttttgtttcttactaatccaagccataagacaatcactaataaaaaacaagcactagatgtgttttttctatcctcaacgttttcaacccaatcagcatcgaaatatccaacaatcacaagagaagaatcataggaataccataaaccataatcaaaagtcccatttatataataaatcattcttttaacagttgttaagtgtgactctttggggtttgcttgatatctaacacaagctccaacactaaaagatatgttaggatgacttgcagtgaggtaaagtaagcttcctatcatacttctataaagcttttgcttaatattttttctagatgcatccttgctaaacttagtggtagtgctcattggtgtcctagagtgtttagaagattctaaaccaaatttcttaacaacttcccttgcatatttggattgagaaaaaaagattccattttttagttgcataatttgcaatcctaggaagaaggttagttcatcacctaccatgttcatcttgaaatcagtcttcatatcttctacaaaactaagggcaaggtcactagaggtagctctaaaaacattgtcaacaacaaaaatcaaagctactaacaactcatccttagacctatttataaacaaggttctatcaactcccccactttcaaactttttccctaaaagataggttgtgagcctctcataccaagctctaatagcctgctttaatccataaaaggtcttctttaacttatagacatgattagggaatttaggatcctcgaatcacttaggttgctcaaaataaacttcttcacttataatcccatttagaaaagcactcttgacaaatcctcaaggagcatgttattgccaaaagtatcctaattgattcaaatctatctacaagtgcacatgtctctttataattaatctcctctatttgtgagtatccttaggcaactagtcttgctttgtttctcacaatgaccctattttcatcttgtttgttcttgaatatccattttgtacctatgacatgtttatctttaagcctagagactaaatattgcacatcattcctagtgaattggtttaactcttcctatagtgtgctaatttgattttcatctcctaaatcttctcccacattctttggctccaattgggaggtatagcatacaagacccatctcatttaatctcgattgtctcctagtaaccacatgttcatttacattacctataacatttgagattgggtagatcttaggtattttggatctatgcttatcccttatttctttaggagtgtcatctaaaggtacaacttcatcattgttaaggtcaatgtctcttttaaggatatcattagggttatctttagtagtctccaagactttaaggttatctccaattgattcttgggttaaaatttgattatcaattatatcctgatcatacccagtatcatttataaccacattagaagactcttggatgacttgtgaattttgattatacactttccaaggttctctccattcctgagtatataacactcattgccaaaagtcctaaaatacttaagattaggttttctcacagtccataattcataagatgtcttctttattcctagtttaagaaaaatcctattagcaatataacatgcaatattaatagcttctgcccaaaattgcatagggatgtcatgcatgtgtatcatcaccctagccatctcttatagcactttattctttctttcaactactccattatgttgaggagttctaggaaatgaaaactcttgtttaattccttttaattcacaaaagaagtcaacatccatactatcaaactctctctccctatcactcctaatccttataattagatggccaatttccacttgtattctattaaataaagacttcaaattttctatggcctcttatttccccctaagaaaactcacaaaggagtatcttgaaaactcatttactaccacaaggacatatctcttgtcacctttgccttcagtttgtattggacctataagatccatgtgaagatctaaaggtttagtggttcttatcttcttaacctttttgtgtgaactcttagtttgttttcctttcatgcactcaccacaaatgggtttaggttcaccactaagtctagggacacctctaactttttcaatattcattaattgcataagatctctatagtttatatgacctagtcttctatactagagctcagtaggatcaatttttgtcctactatgcttaagaggtgttctagacttaagatttatagcataaaaattatcaactgtcctatgtcttatgataactacctttccctttttattaactaccttacataagtcttagtgaaaattcattgcatcgtctttgtcacacatttgactaatacttaagagggttgccttgaatccttcaatatatagaacttcatctagtttaggacaaccagggatagctatactaaccttgcctcttatacaagccaggcttccatctccaaaagtaattttcaaaataagtaagagaggatttgtctcatgtcatgtatctaaagcacccactatcaaggtaccacttactagaatatttaactttaagagcattgaacacaacttgaccttttgacctatcttttctcaaccaaacttgcttagtcctagatggtgacttgaaggaacaagattgacttctaggtttctaattggttttattatctttcccattattcaagatgttatttttaaaggaattaaagtcattcattagtctattcatttgggtttcaaacctttcaagaaacttaattagtgtagcatctaaattgagaatgtctagttttcttatagtgtgtgcatagtgatgtctttcaagagattctacttggttaagggtatcatctttacctttgacaaacacaatttctccactagagggagtttcatctatgtcaatgtaccccaaacctctattatcaccatgggttttgtatttatcaagaatttcattaagcactttagtgctagggtgaaaattttcattcatagatgaagaaggcttactattattgatctcttaagtgagagcattattattctcaagaagagaatgatgcttagattcaagaaatctaatctttcaagaaaaatagatttttcaacatgaagcacatcaatcttgtttttatgagcttcaagaacatcatgatttttcatataatcttgtttgaatgaagcctataagttcatcaactctcatggaatcaatgtccttgctctcctctgtggtagttactttaagtctaaatctctcttgaagagatctcaatattttcctaactaccttagaattaggaataggttctccaaggttaaatgaagaatttacaatatcactcaatttggaataaaaagaagaaaaagtttgattttcatgcggcctaatattctcaaacttagtagcaagcatttgcaatttaaaaatctttacagtagatataccttcataagtgacttgaagaatattccatgcttcctttgcacgtttacaatttgctatcttgcgaaactcatttagacaaactccattaaaaaatactaaataaagccccagcattgacttcactaccttcattgtcacctttgttccattcattcttaagtttaagttcttctattgatttcccttgagcatcaaggattaatggtggtccctaaccatattcaactaagttcctccacacccttttaccttgcattttggggaaaaacatcattgtgctttccaatgggaatagttattcccatcaaaatatggtggaccattcaaaggagcatcacttttttattattccatatcaaacttacaagatcaataaaaatttgatgtttatcttatgtgatcaataaaaaaattgatttttaaacaatatgatcaataaaaattggatttttaatcaataggataaagaatcgattttttattccactcagataccaattgaaaaatgggtattgctttgaataccacttgaataatagttgaaagcccaataagggaacacccaaagggggttgaatgggtgatttaaagtttttaaaacaatatttataaattataacaagcttctcttattccaatagacatcaaagatgtcctaaataaataaatggttatacctagaatctttaggtctataaaaatatgatttttaactttttgggataccctacagttggttagggataaagataatataattattaatattgaaatatatgttgagatatgttaaggataataataatcaccaaaataaccaacctaaaaaacttaaaaataatcccaacaaatcaattaataattggttatatgtataaccactaagataaccaatccaacaatcttaatgatcaattaaccaataaattcaagatgatcaatgtcatcaaccagaatataagtcgaaataaatagatatgcacatttttaagaaagttgtgcaatatattagaatgaatcaatttgacctattctaggcaattcaatcagaatatcaaatataaaatatatggacaatgagacataggatttttatgtggaaaaccccccacaaacttatggagataaaaaaaccacaaggtctaaaacctaccaatctaaattcgctatttgaaatcaagttacacagatttacctagccactttatcctaaagacttactctccaatacctacatcttggtccacctccacaacaaaactacttcatgtttggttcctagtagatccttcggtccctcaaaagggattaaggtcttcaacccacaattcaaataatcgaattcttgaatgagagatcaggaattgtgtgacaataaggctttctttgaagaagcccctctaaagaataagaggtctctaaactcttagatctctacaatctctaatcacttggactgaatctctaaccctcaaggggttattagagaggtatatataggcaaaatccataaggaattttgtatcttaagtttccaaatttgagtttgagtgaaattcattcaaactacgtttctaaactccgtagaattaacatgaccacttgagcggacttagatcgcttgagcattccacttgagcagtccttatcacttgagggggctaattgcttgagcaacgcctactacttttgaaaaatcattttacaatattttaagttcaaaaatgatactgaaccttttatacctcaaataagccttacatgacacaagccaaacctttttaaacgtacatgtgacttcccgattggacgaacaacgaataagtcataatctaaaaagacttttatgagcaaacataaatttgaataaaattgccaacttataaacaagagtcaatgtccttacatttttatttaaaattcttatattttaaatcctcaatttaaaattcatttccaaattatttttattatttgaaaaaaaaaaatctcacttatttctatggctatgcttatttctttggaaagtgctaaagaaaggaaaaaaaaatgttcttgagtttggatacaaagaaaattaaggaaaagaggaagatgttaaaaaataaaaaataaataaaaaaatctctctataaatatgtttaggaagaaaaggttgagaaagtttaggtaatatgtattcttcaaaaaattaattttctttctataagcaaccaaataagacaatttatattttttttctttccttattgactctttttattttattttcattagattttccaagaaccaaacacaatttaaggaagatgagaggaaaatcttttagaatttttctcatttttttttttaaaaaaaaatctttattttttttcccttgtatctatctcaaaattttcaagaatcaaatattttctaagagaaatgagaggaaaacattttagaatgtttccttttgtttttttgaattcttctttatctttttctcttgtatctatttgtgtgtgtgtgtgtgtgggtgtgtgtgtgtttttaaatattttcctttcctttagttattattaaaaaaaaaatgaggagaaatggtgcaaggaataataaagaaaaaaggaaaaacaactttgaggagtaaatatattaaaattcagctaataaaaacttcataaaaaattcctcattcttataagctatatatatttgttttatataaatagaaaactaataaaacatttttcacaataacagtaagaagcaaaggatatactttctatttttttatttattattattgataaacaaaccgcttataaataggctcatacataacagaaagcaacatgaaaatagacactatcccacgttaaaaacaaactcctattactaggtaaacaaacttactaaagactaggacaacccgcatgaaaattattaaatttcctcaacaatgcctctcttaaactaatgttccagacataacatttgatttaataagagttaaactttgaaactccatccctcaaattgaaacgtttgaagtacaaacaccaagtagcttcctgagcttctgaaatgcaggaaacttgagaggcttggttagaatatgagcgacctagtcttcacttctacagaaaataagattaatgactccatcatttgtgaaacccctcaagaaatgatacttcacaattatgtgtttgtttttaccatgtaaaagtggattttttaaaatctttattgttgaactattgtcacaataaatctatgtaggtccatcctcctttaaatgcaactctttaaggattttctttaaccaaatagcttgacaagtaaaagttgttgcagcaacaaattcagcttcaatggatgataatgtgacaataggttgcttctttgatgaccatgaaacaactcatgtccccatcatgaaagcatacctagatgtgctttttttatcatctaaatcccctacagaatcactatctataaagctaaacaaatctaatttttcttcattcttgtagaacaatccaaactccttagtaccttccaagtactgaaaaattctttttgcagccaagagatgaatctctataggacattccatgttcctgctaatcacacttacaacatgcattatatcaagtcttgttgccatcaaatacattaaactccccattatttgtttgtaaagagtgtcgtcaaccttttttcctccattatctttgtttagtttcataccaaactcaaatggagtatttacaggattacaatccttcatctgaaacttgtccaagatttctcgcacatacttcttttgagaaataaaaattccaatagaaggcagcatcacttcaatgccaagaagataggccatgattttttagctaccatcgcaatcaccaatttgattgtatcatgccttgtaaccagaataaagacttctttataatcaacaccaaactcttgcttgtagcccttagctaccaagcgtgcctcgtgcttgtcaacgtcaccattttcattcaactttgtcttgcaaaaccactttacaccaattgtcttctaccattttggaagatcacatagcgcccatgcatcatttcattcaatggctgtaatttcaacatccatagcctcacttcatttaggttctttgacagccacttcaaaaatggtaggatcacaatatgaaaacagagcaaaatgtgtaagtgggtcatcaccttggtcaactccagttacctcataattagtcatccatgctggtcttcttcgaacacgttgaggtctttatgactcaactacaagtgggctttgatcagctattggaacgttttaaatgacttcctcttcttgtttattccccataagttgcttcactttttcatcatcatcaaaacctactagaatattttctttaacaccattttgattccatgaccaggtgtctttttcatcaaataccacatcacagctgatgacaattttcatggtgctaggattatatagtttataagcttttgacttatcactaacaccaagaaatatgcatttttctcccttattttctagcttcctcatcttctcatttggaatatgagcataggcaatacacctaaaaatccgaaaatgatctacagtaggtttccttccgctccatgcttcctctagtgtcatattttgaacagtaagtgtgggacttttgttcaatatatgaatgctccaattaactgcttaaggatagaaacttttgggaatgtcacttattgtcaaaaggctttgcaccatattcataatagtgcagttcttcctctcgcatacaccattctgttagggtgtataagttgttgtaagttgtcacttgattccatggttctcacaaaaaaattgcaaattcatgtgagttatattctccatcacgatccatgtgaagaacttttattgggttgccaacttatttcttaacaagcactttatagcttttaaaaagctacaaaggcttcagatttttcttgcaaaaaataaaaccatatcttaagactataatcatcaatgaaggtaattatatatcttttacttccattagaatgtggtttttattggcccacaaatgttagaatgaacaatctccaatgtcttcttcgttctctaatattttccttgtgggaattgattatagtgttgtttgctaacaacacattcttcacaaaattgagaagaagctgtaatttgaggaagcctcatcaccatgttattttgttatagtgttttcaatccaccaaaatttaaatgcccatagcgaaagtgccatatccatgcctcacattttaatttttctgagaagcacaaacgagcagtgttgtggggataaagtgggaacatacgattcgtcgtaatgttaactttagcaattaagcccaactttgcatcttgaatctgacatactccatatttgataagaatctcgtattctttttcttgcaattgacccacactaagcaagttggtttttaaatctggcacaaaaagaacattagcgataatgtgggtggaatttcctttggtttggattgttacctttccttttcccataatagaaattgtggagttatcaccaaacttaatagagctatgaaatgactcatctaagtcagagaatgcctcatctccacatatgtggttgttgcagccagtatctaaataccacatgttttactgagtttcttccttcatataacataccatcaaaagagacaccccttcttccttttctgcaaagttagtttgatctccactttgtcattctgatttataatggccatacacctatgacatttgtaacattcaatattgaacttgtctgctgactttgatctataagttgttgagtgatggtctccacgtcctttgccttttccttgaaattgactttcttggtgataatgattttgttgttggttcccacgatcattgttatttctgcctcctttacctcgacctttgcctctttctcatcctctatcacttctactgggtgtagagtgattttctgataaggccttcaatgcttattcttatttttcctattggttaatttttttctcataaaccaacaaagaaatttgtaattcatcaattgacagtaaaccaacatcattagcttcttttatagaataaacaataaaattaaaatttggtgtcaaggatcgaagaatcttctcaacaatgagaacgtcatatgtcttgtcgccatggatccacatcttgttaacgattgccatcgttcttgaaaaataatctataactaattctcctgacttcattcaaagcattttaaactcagaatgaagtgcttgaagctgctgcctcttagcccttgttgtaccttggtatttctttttcatggaatccctaatatgcttggcggtatccatgcaaagaatggtttccaagattgagcgatcaatagcttggaagagataattctttgctttaagatcttttaacttcaacccttcaagctctgtcttttgcgcatctgtcagcacaacaccttctattggttctgctactccagaaacaacaatcgtccaatattctttagacctcaagaagttctccatgagcatactccaatggtgatagtgaccatcaaagcatggaatggctggttgtacaaaactttcggaagccattaatttcacttttactcttctcgaaacctgctctaataccactgatataaatagaaaactaataaaacatttttcacaataacaataagaagtgaaggatatactttctgattttttttattaataaacaaacaactataaatgggctaatacataactaaaagcaacatgaaatagacattatcccatgttaaaaacaaactcctatgactaggtaaacaaactcactaaagactaggacaacccacatgcaaattattaaatttcctcaataattttttccaatgacagtaaaaggaaatgaaaaacatctttctctctagatcatagtatttaatcacataaaatcatttaaaaaaaatgtttactactaacattatttaagtttatctttttttttttttttttttggagttgaaaattcaacaatttggagacatgagctagatgttattattgttatactttactatgattagttgattgtgtgtcttcattcctataagtgtaattaagtaatttatgtctattaagttttattgtttaatgacaaaacaatacttcaaaatatgtctctatctgttttacatatactagatgaaataagcattccaactaaggtttttttggatttttttgttcctttcctggtggaatgtacatgattataatgttattgatcatcaaataatttaaaccaatttatggagaagttttcctctttctctctttcttggaaacttcttagaaatagtttgggcattaggtgtttgattttattgagtgaatagatttaaatccattgaattatgcaatagtttagttgtaaatcatatgacatactactgagtaatgttagattgataatccaacaattcagtcgacttatataatcctctctttcacttcatccacatttggatctatcttcaaatgtgtacttcagacaacccatatatgagccccatttcttgctaggtggttttaaaggtcaacaattttactatcttctatcccttaggtagatgaaaactcttagatttatccaatgataagtaacatttttgcaaatgcttttatttgattttgtttaattgttcttaaaaataagtgttaatgaagatcaacaatataaaataataaattacatctcaattgacctcaagatactatttattttagttgactcattttagtcatttcttaaatgtattttaaaatatatcatatgatgcacctagttaaaaaaaaatgctattatggcaattatatatagaattcaagttttaataatgcaaaaaatatataaaagtttttaaaattaatagacaaagagtttttgataaataataagtagattgatgcatttatttccaaaagtagatatggaggatcataaaagttgaaagaaaaatactttggaagtcaaatttttggaaagataaaaaaaataaaaaataaaaataaatgtaaggagattctagaaaattaaaagaacgtcaatttttaagagcaaccaaaatttgagaagaaagtaaaataatgtaaaatttaaaaataatttttttaaagtgaataataattattataaaaataaatcacttaaaaaatctcctaacatcatttatgttcatatttctttttatggatttgaaaaattaaacaattggagtaaaagtttactatttaagctcataaatgtcatagacgtcgttgaatataataatggtaaaaatatttgttgggaatttagatacttatatagaaaagtagacgaagtgttatggtttacaaaaacaatgcatttctttagtttgttgtgaaaaaagtaaaacaatatgtttgggtaatttttttttttaagtagcaaacatttt

SEQ ID NO: 10922 - DNA, 12946 bp, Vitis vinifera
  Intron number 19 from transcript GSVIVT01020920001 (locus GSVIVG01020920001) derived from phytozome v7.0 (chr-ID chr 5; pos 17148454 to 17161399 reverse strand)
ctcttccaaaggttagtttactaaatttgtatgctggaattattcctttagtcatgatgatagaagttatagctgactcctgtaaggccaataccatctattcaatatttgtttgataagatgaagttgtttcggttgttaattctcttttccaccttattcctattctttcttcttctcaattttcatttccttttgaatgagaccctcccccattcatactgttttgcttcccttagcaaaataatttttaagagaacatgttgtgaacattttagatgttaatggtttaaggtggaatgtcatctgttgtttgaactgttctatttgttgtgtggatgacccaggagttggttttcatgcagggatgaatcctagcattatctttcttccacatgtccacttataatagggataacataatattattcaaaactttctaatttggtctaagaaaaaaaggtttaagttagagaaggataagcaaatatacattcagccagtccaaagcttgattagatttattatgatctaataaaatcttcaaacttgaatttggcttaaaaataataattttgaatctagagaatgatgaacaaaagtaccatggttttagtgttaatatgatactataaggttctaacagatttttattatcttgtaaaattctcttttggattttattacctagcttccctatattctttcacaagtcaattctgtgatctatattcttgcaaaaaggaatttgcgatctgttggtaggggcagtttgattgtttgcctttttcatgatttaatttcttcattttcttgtgtttagaccttagtgtcaggctttgttaattataatggttcctatttgagctggggataagttggtgtgtggaatatgatgcgacttggagccttcatgagcaaaagtgatacatgaatctgaaactagcacaaacctctcacaattctgttataatttttatcttgaaagaattgagagaattaagccagatgtctcatggacaatgttaggggaagggagaaagatattttataggttgcaagtgcataggccgaagtgtgaatggattgaattggggaaaagtttatttgggcaaacatcctttccaaatggctctagagatttcttagtgaagtggtgttttctagcacaaggttatcaaaagcacctataaggaacgtttcaatccatgggatgctaatattccagttaggtggatgcattgttgtccttcaaaagcaattgaacattgtttttccctgtttttttcatcaatcatatttcactgggagatggtactagaactcatttgaaaagattcatggtgaagtgactagcccccgtgtctttaaaccctaatgtctttttttacttgaaatcccatctctctcatgctagatcattgctttctctccatattgtggaactataactttagaagaaatttgaccaacgaagaaattaatgttctctcttctttagtgccttttgctacctataacctttcatggggaagaagtgaaagaaagcttggagggtctttcccttgtgcttgattttgactttatgaagggaaagaaataggaggccatttcaagatgcaaaagaatcgaatcaagcattcaaatcttctttatgtgtaatttttggacatgggttagagcatacatagatgactattctatgaacatgatatgttttttttttataggtatgatcaactaatatatatatatatatatatatatatatgtatatagaaaaagaggcgccaaaacatcatcccaaagtatacagggaagtatacattggccgcccaatggctcacccaaaaagggagagggggagaaacaaaaaacatcacctaccctcacttagaacctagccaatcaataaagctaacaagggaaataggtctcatatctataaacgctctagaccaagaccacaaattatatacaaaagaactttttactctatggatcgaaattgtcgtattatcaaacactaacaagttcctttctttccacactatccaaaagatacataagggggccaccttccaagccttcttatgggctttaaccacaaaggaaccatgccacctaagtaatgtctccttaaccgagaaggagagagcctaagctacaccaaagagagaaagagcaactgtcataggatctaagtctttgcacagtgaagaagaatgtgatcaacaatttattcttcaaagtggcaaagaaaacatttgtttaccaaagaaaaccccctcctttggactttacccaaagttaagattctcccccatgttgcctcccacatgaaaaaacaccaccttaggtggtgcatagtatctccaaatgatgcttcttgggaacgatagagggtcaccgggctccaaagcatggtaaagagatttaactgaaaagctcctgttcctcgaccctgtccacaccaacctgtcattctcatccctatacacccttcttccttggagctcatcagaaagcgctccacactttccacctctcaatcattaaatgacatagagaaacgaggagcccatccacccccttcacttttagagttccaaacatctatcacccattcctccttagaaatggctaaggtgagcgaggaagagaagaaaacacaaagtggcttgtattcacaccacttgtccttctagaatctcactttttgaccatttctcaccgagaaagaaattctgctgctcaatagaccccactcctttcttatggttttccaaaggccaacaccataattgtctctcacctcaccgtatctctaccacccccccccccccccccctctttttcatcttcaccgtacttttgaccaatgactggcttccaaagtgcccttctttcaatggcaaaatgtctactccacttacaaaggagagttttgttcatcgctgaaagacacctcacacccaatcccctctcatttctctccgaacaaactatctttcatcttactaaatgaggtttttgcacaagcgccccaccaccacaaagaaagtccctctgaaccttcttcaatctcaatctaacttgccttggtatgcagaagagagacatgaaatagataggcatgctagagatagtactttgaatcaaagtgagtctccctcctttcgagatgtctcgtcttttccacatggctagccttttgtgaaatctctctttcaccccatcccaaattgccacagatttaaaaggggccaccaaaggaagacccaaataagtggagggtagtccacccactttataacccatctcctcggtcaaattgtctatattgtccactccccacaggaattaactcacttttttccacattaattctcaatttagaacaagcctcaaaccacataagtaaccaacacagataagtcatctgatcctgtgacgcctcatagaatatgtgagtatcatcaacaaataataagtgagaaatctaaatctcatcccctcttctgcacctcaccccctaactagaatgatatccaccactcactaccctcttcaagagacaactaaaaacattcatagctatcacaaataaatatggagagaggtccccctgtctaaacccctagaacttaaaaaaaaaaaaaccgattggggatccattgacaagaacagaaaactttgctattgagatgctccaatttatccacctctccccaatgcccatctttcttaacaccgaatgcaagaaatcccagtttacatgatcatacgtctttttaatatcaagcttataaagaacaccacattctcattacttttcaaccttgagtctattgcctcattagcaatcaaaattgcatctaaaatctgtttaccctcaacaaaagcattttgggattcagagatcatttttcccatatccttcttaaatctattggctaaaactttagccaacggcttataaaggctgcccacaagactaattggcctaaaatctctcaaatcatcaacaccacctttttttagaattagaactagaaaagtagcattaaatgacttaataaatttgcccccctcatggaaatcactaaaagaacccatcacttcttccttcacaatctcctaacaaaaaggccaaaacaccatagtgtacccatcaggacttggtgctttctccttgcctaaaaagagcaacaaaaacctcctcttccgagaatgagaactttagccttgcaacctcatagccttctagactctcaaaagtcaaaccatcgatactgggcctctactcccctttctcagtctacaggttttgaaaagccccaaccgcacccacttttatagcatcctcctcaattagccaattaccattcactttcgccttggccacccactttttgtgggcattttccatcttatggaaaaacccagtgttcctgtcaccctccttcaactacacgtcccttgatttctactgccaagaaatttcctcctcccttacctcatttctaactttaacctcttctaaagacaaggctgtaaccctctccttatcatgctaaaatgccacttggttgagagtcgctccctttctagcttcaattatgccaaacacctctttattctaggttttcaagactgcttttaaggcccttagtatagcaaccagaacaaaactataggacccaataaaattaagacccacccaccagtttttcagcaactctttgaaaccctcctcctccaatcacatattctcaaatttgaatgaagaggatcctctccgcagtccacccccatctagcaaaatgggaaagtgataagaaactagtttaggtaaaacacactgttgaataggttatctcaatcttctaacaccaagaattgatcaagtctagaatgggattgattattcaacccgccactccaggtgaatgggcccccttgcaaagggatatctctcagctccagctgctttataacctctgaaaatatcctcatatatggggaaaggccgcctcccctactacgctccctaaggaacctaatcatgctgaaatctcctacagtgcaccaaggatcattccataggcccctaattgccctaagctcatcctagaaactctctttgctcctcctacacattgggccatacaccctaataaaaatccacaaaccaccatcttcccaattcttaaaatgacatgaaatcgagtagacctccgcttccaacccaacaaacttaagcacccttttatcctagaaaaccataattccacttgctgctcccctcaaattgacaacacttcactttaaacatctacccacctcaaggctacgaacaagcccaccaaacatctcctgaattttagtttcttacaaacaaaccacatccaccctttgtgacttgacgaaggatttatcgatcttccttttgccactctcgtttgctcctctcatgttacaggacatgattcttatcttcatttgcatcttgaaatagaggcaccaccagattttcccaacccactaccagtgcttgcttgaacccttataattcaatgtccattcaagcttcttgagttcccttttaaacctagagggcaaggaaatcgtccttctattagtccccgcctgacccctttggtcaattctcgtttttgttctcttgagaaggtataaaatctcttctttaaaaccctctattggcatgcttaagcaccgactaaacttagttaggcaactggaggaccacccttttggcagctccccttcgtcctcttgagaactagcattcacctccaaagccttttgggaatccacccattcgggacaagtgcaagccctattgcaaaagtgcagtccaccaaactgaggatttgctcctctaggctctcattacccaaggcactctcgttggccaagactactcgtagaggatcatagtcgtcgccccctaatgaatcctccaaaccacaaacagcactggatcccccctctcactcacccaagggtcgagcagacaagaagaaacgagtagaagagagaacccataaccccaaagaaaagagaggacgagaaagaggaatgtggtacctggatgccttatccataagagcctcatcaatgatttccggacgacttgctactagtccttcaacacgtgattccatcgattggcaccttcttagtcctccaatctccatcaacgaagggatctgcaattgccctaaccttttttgagataaggggtagtccactatcctcttttgagagagggggcagtccactagcatctttaagtgaaaggcccactgagagctcagacccaaacttaccaaccaacatctttgccgtccctacgcccttctctcctaggctttagaaccctcagcccaaaacactcagtctaggggcttcacggggctgaacatctccttggcccaactcttcacccttccacaccaccatgttgccatctgtctcgccacaattgccacctttctctaacccacttgcagtaccctttgcaagtctgccccctacactatctgcaaaccccttacttcctccacaatgaagcagcccatcagtgtcaacaatctacagaaatggctgtctttctgtcacacatacaccggcacatgaactatcctcaccttcatccctaacctccaacccaaagctcccacacaacctgatcatcggaaccacctaagagacccaaggtggtgcttcccaccataaatgaacgacaaagcaagatgatcctaccaccacttgtagcgatccagacagatccttccctttggatttcaccaatatttgggcccactatagttgagaaaaacaggaagtctcttcatccaccgccataaagccaccacaactatccccaagcttcttaaacacctctttactccaaaaatgaagtgggagtccaaccaccctcacccaaacttccttggcatggttgccattccagaagcatcccacctcagcaactgcaacaccttccccataaaactcctaacccctcttaattacaccctgtctgcctcacatttattctcaaacccaaagagatgaagagccccacccaacctagcaactcttagcccttttcaaagcccattgggaagaaggccaacctctcaaggatgacaacacaggaaccgaatatgaggactctctaaagcgaccaaccaaacatcagtccaactgctcagccctacactaaacctctttatcccctaaatgcatccaaatagtctcacctataccccccaacttcacctttgcagcatctacataagtccctttcatgctccttagagctgcaaacttacttcgcagagtaggtggcaacgggaacagagaagacttaactgtctacaggggtagacactcctagaggccacaacttctcagccaacaaagctcatcccccaaggattcccttgctctcagggaaaactaggcaaaatttcttggcctccaaatcccacacaaagcaaagcaagtacctaccaacctcatttgatcgaaactctagtctaaacttctgtcccccatcttcccaaacttttaaacaccttagccttaactccccactacaacagacttccactctttcatgcaaacaacacaaactcaactctccgaatcttatccaagaagagaaaccgctactcctctccagaacaacccctctaagtttctctccaactactttagttgagatttcaaacgtctttgactccaccgcaaaccagcaacttcctcctctcaaacctcctcttgacttagcagacatctctccccttcccatgcaagcatcatgtcatacgacaaacaccggaaatccttattactcaaataatctagtcttctagacacctagaagagtgctagatatgagcagaactctaaaaagttcctagcataactcaaaggttgcttaacactctcaggtaaacgatgctgtaattcttgagtagggatttgaaggattctgcatttacggaaaccattttgatttctatgaacatgatacgtttgtaaattggttaagctttaagtaaagagagagtggtttttgttttctcttcttttttgtttgcccattgacacctattgtattcatcatgtgtcctttgatacaccctttcttaggtgctatatgtatattttctgttttcacttatcaaaaaaataaaataaaaaattaacaagagggtagtttggtcatggactagcttaggtttatttttcagttattccttcttttaagcttaaacccaaatgccatttttgtttttgttttcctttttcatcagttaattttatttgagttcaaagcttcacctaaggttatgacttttgttcccttgtggctaattagaaggtcaataccaaatgataaattgcagctgagacttcatagagcacttccttgctcatcatgcgatagataaaggggtcatcttttctttcaatttccagtagcattggcttatggcataaacattttcagactcgtgggtttgtattgggttcccttaaagaggtagccaatatcttatgtgttggatgtacttctatttctactatttttagaaagaaagaacatacatgtctttctttatgagtacatgatatatatatatatatatatgtacaaaggaagccgcatcgaagtacaaaggaagtatacaaaggaagcacaaatataaaaagataaggttagaggaagtagacttagattttatagtggtttggcaccccttacctatattcactctcctcaagctcctaaccgagtgagggttctactatatttgaagcttcaaccaagcttccaacacctttacacttgattttcagctccaatgggctcctacacaatctcttcaagtctttgctcacttgaaacttttaacactcaaataacaagctttaatctcttaacctaacaagggatatgctaggaagaatcacaagggtgcactaaggaatatgcaaatagagatttaacgcaccaagaaaagaatgagagcttttgagtcaagaataagtaggtagacaaataaatgcaggtgttctttagctcataaatgaagtggagctctcaatttataggtttctagcatcggaagccaaaaatgtcaaaaaaaagtcttgaccggtcgagttgggggtcgaccagttgactagccgttgggcaataaatgcatggcggtaagtgatcgttaggcctcaaccggtcctcgaccaggaaggcatatacctcgatcaggaatgcaaggttattgaaagagagagaaggttttttgcatctctcgatcggtgacactggacctcgactaggaaggtgtaaccagtcgaccagtacccgagctggtttagctagttggccagtgccttgactagttcactatttttttgctcgaaaacctatctttttttgtttttttcccttctaacacttagacaaggtctttagataaactaatatgccaaatttgaaatgatttgcctaaggtttatttgataaaacttgggttttgatggaaatgtgacttgaatgcataaaccgagtttctaaagatgcatgaaaagatgtgaaaatcctaagtgctcccatgcattcatcttacatatatttcctatgattaaagagtcttccaattgtcttgatcttgcatccattaagtcttttgatgaatttccaaactaacacctgaaattctttttaaattcaaaacgattagcaacttaaccatggtttgctatcatcaaaacgtgattaggagaacccttgggctaacactccccttgttcttgaaacttaccaatgataacccatttccctgccccacttgcccaaaagaccagttaactagatgagattttttatcaaaagctccacccctccataggaagtctctttggatcttctcaagtcttaaactaacccttcttgaaatcactaataagaacatgcaatagattggtatgctagacatggtgcttttgattgaagtgagtctctcccttttcaatagatattgtctcttccacaaggacaaccttttttttcaaatctctcctccaccacttcattccaactcagtagccaatacttccacattatctaccctattgatatgcaacccaaaaattgcttcaaaccacatgagaatctgattcaggaaaatcgattgctcctagctagtctcatagaaaataatagtgttgtaagcatacaccaagtgaatcatctcaacacgcttgtaatccctcctaaccttaaagccaaatatgaaatctccttccctattcttcattaataaacaactaagagcctccatggccaaaataaataaataagagaagagaggatcccttgcctcagtccctagagctttgaaaaatatttgtgtgaatctcattaatcagaacaaagaaattagatgaacatatacattattttatccatcccactcccttttgactaaaacctattttatccataactactagtaagaaacttcaatttacatggtcgtaagctttgtcaatattgagtttgcaaataaccttaggggagttacttttcagcctttagtctatggtctcatttgctataagagttgcatccaagatttgtttacccttaacaaaagcatgttgaacatcaaaaacaaatttgcccaccaccctcttcaacctattcactaacatcttagcagataacttgtataaccttcctaccaaactaatgggtctgaaatctttcacatccatttcaggccctatgtttgggattaaaaccaagaaagtaacatttaaacttctacaaaggagtcatccttgaaaaactcattgacaaatcccatcacctcaaacttaacaaatttccatcaatgctaccaaaaagccatagtgaacccatctggcctaagagctttaaccccactcaagttgaacaaggtagaaaacactccctcttctaagaaaggaacctccaaactccttgaatctgcattctatgaaagagcaaatgacatcccattgatactaagcttctagtctccttcctcaaaaagtaaacttggaaaggcaattgcaaccccctcttttatatctgcatccttgaagagccaagtcccattcaccctaactgcaaccatgaagttccttcttctacgagaatcaaccattttgtgaaagagctagcattcttatctcactttcttaaccaaagctctcgtgatttttgcctccaagagatttcttccattatcacccaacttccacaaccaaccatctagcttcaattgcttgtagaaagggtggtgtccctcttaaactaccataagccaatctccttcaaagctttgctttcctaaatgagacattcctggacacctccttattccacacttttatgtcctcctttaagtgtttcaacatccaagctaggagggcctcttgacacaatagcctgttcaccagactttaagctgctctataaatccctctgctttaggccatatgatttcaaacttgtatggggttttgcccttcctcatcactccatctaataaaattagagcatgatcagacactagccttgccagaacactttgaagatccctaaaatgactcccaatcttccaaaacaaggaatcggtccaaccttgatgcaaattgattatttaaacctcaacaccagctataggggcctctcattagaggcagaatatgtttgtaatttttataaattataaacatgtttatggtttaaattttatttttagtttaaaaacaaaaaatagagacatatttggtaaccatataagaagtagaaaaaagattttttgttaaatttccaacaaattttcgatgattttttatgatttttggatgttcttaatagggcactgatatagtccttctagtaaagaataataagatgaaggtgagttgtaggtgttaatttctcattttaaaattagttttaaaatttttccaaataaaaaaatttatgatgcctttctttttttgaaaaaaaattgctattaaatttaaaaaaaaaaaagttaaaacaggttataaacacatgattttaaaatttttctaattttgaatgcaaaattggaaacacaaaagtgcaaccaaacataccctaagtgattttttcctcgaatttggcagctgcacttagagcaaggtgctgtggtgggtgccttcactctcttcttggtgcaaaggatctcagacatctctgctgagatggtttgctactccttgtgtattaaatgctcagttaataacttagtgaatatgttggctaattttactggagtttttgcctaaatgtttgggcttttgttttcatttactgtggttctctgggtgctttattttgtgtactcttcaatttttttctttttttccccctgttgtttggctcttctttatgtgcttggtcttgttgcctttgaaggattgtccattttcttgtacttagattattgaattatgaaattgttgtttctgattagaaaaaatgtaaatggattaagatttagtgtaaagaggatgctttgcaattgtcaatcccttacatgaatactagatgtcttgtacaaccaccccaaaataaattgagcttatttgaaatggtgcagcatgctaaaattgaagtatctgtaacatttttgcaagcgacatcttatttatttctttatttctacacatttcattgtacttacaacttcaacggtcttactgtgttaaattatcgcttagtcctatgaaatggaggaatttagctggatggcatagatttctaatattttgatgtgttttccttattgaaataggtaaggagtggaaagttagcttgtgatattgggtt

SEQ ID NO: 10923 - DNA, 8096 bp, Vitis vinifera
  Intron number 4 from transcript GSVIVT01012880001 (locus G SVIVG01012880001) derived from phytozome v7.0 (chr-ID chr1 1; pos 6474954 to 6483049 reverse strand)
acaaggaggagcaattcagtgtaaggttagattggtagattagggttttaatgtttaaatatgaaggaatggaaactctctgtgtggttttaattagataagatatattagatgttttttgaggtactagtggtacttagacaccacttgattactagttaacttagttttatctattgggatttaagtccaaagctaaatctacaagatggactaatgacttgaatgaatgaacataagacctaatcgatttgtcaatttgatttagtgattagaatataaaagaatcaatttaggttttggatgcgaattttttttttgatagacaaagagaaccattagattaaaaaacgccagaaaacagggggtgctccctaagtacacaagctgtatacaaagaaggcccaaaacaaggcaacaagagaaaaataaagtctaaaaaggattagctaagcaacaaccctatcacccatcaaattccgaaaagatagatagtccaaatccaagtccacaaattgttgagaccattcaagcagggaccgaagaaaaagtttcctcaagctcgtatttgtcatctcttcctctaggaaggttcttcaatttcgctctccccaaatacaccaaaacaaacaaataggcgccattttccaaactacactccttttcttccccatgcctttcattttccactcaagaagcaaatttctcactgaatccgggagcacccacaccaccccaaacgaagaaaacaataagttccaaagatcccttgtcttaccacaatgaattaggatgtggtttgccgtttcctcattttggatgcgaattgttctctagacttaattcaatcttgaatataccttggatcctaaaccttggatttagatattgctctctcccgcgtcctgggtccaaagctggattgtgaaaacttcagagctttagttatagatttgacttaaaacaaattttcatcataatttgattttttgatatgaaattattctgttagatttaaagctagccttttgaatattatagacaatacattagtagtcaactatgttggtcccagagtatgacatccagatactacacaccatagttatcctctttgtggtttttcttgatttttataaaatcaaaacaatttcaattaaaacagagaatattggtcagatgtcttgttaggatggcacaaagattttttttggggaaaaacatagaaatcttggaggttagtcccattatatttgttatggattatttggtaggagagaaaccaaagaacttttaaggtgtggagacattgatttaattgtttttttttctttctttatttttttctttttgataggaaaataagaatattattaacaacactaatcaaaagagggtgcaccaaagtatacaaggagcatacaccagtaccaaaaaggcaacaaaacagagagaggagaagttgatttaattgttaaaggtttcttttatttagacattccttttttggttcagattttgtgtgggaggggatgcttatccgtgtatgattttgtgggttgggtggggttgcattagtgtgtttcctttacttgtttcccaacctttgttgacctttgcatacttcctatgtatttggattctgcccccttttttataaattattttttgcctatcaaaaaaaaaaaaagaagcaattatttaactaattattgaaaagatatggaattagtgaatttgttgaaggtaatttataattcttaaattgcattccagccttttttccccaaaaaaatatagctttttgttatttatgtagtcttactttgtgacaataaatgtggagcattttgcattcacatggttctttgggttatttatctccaattatttgcagcagttgcattgtccagaagaatgatattggcagttccactgagaacatagaatattggtgaaatgtacagtgcacacctggtctttttgcaaaaattgtcttgaatctattgtgcaatttatttctcagtaatcaatttattcagttaagtttttttgggaatccttaactgattgcaacatggacagttccctttgtttgatccttgggattacggatggaaatgaaacatgttattttttttaccaataaactttgaagactgacatctgtagccacagttataattagggttgttagaataaaatttgaagattgaagttgtggagaaacttagaaaaaagtcttcaacactcacagggtgtggaggaggatgactcctttatcactctgtttgtagagatttgggtaagtgaagctgtagtagtcgtttttgctcaagccttgatattaggtttgttcgaccttggccaaaaccagggcatgttggggaagctccggcagatgagccttgtatgcaaactggagatggagtctactgataatttcttatgcctttggtatcaagcgatttaggaaaaggttaatgtagaaaagaaaaaaaaaatgtcgtatattaaattgagtaaggaaggtaaacatgcttccttttatagtgaagttacaacaaatcaaattaaatctataactatacacccaaatttctaggaacaaaataaatttaaaatatacagcctatccctaaaaaacagcaacaaattatccctaaaaaataggtaacaaccagatcagaaaaattctgatatgattgagattttcaacactcccccttaagctggcttgaagatgtcattcatggccagcttgcttacaaaatcatcaaactgcttctttggcaatcccttagtgagtatatttgcaacttgttcaaccgtaggtatatagggcataacaatcagtctattttccaatttctccttgataaaatgtttatcaacctcgacatgtttagttctatcatggaggactgcattaagtgcaatggcaatgacgtctttattatcacaaaagaccttcataggtaaagggctagcaaccttaagttcttcaagtgattgtttaatccacaaaacttcacaaatgtcatgggctacgactctaaactcagcttcagcactacttctagccacaatactctgctttttactccgccaagtcacaagattgcctccaacaaaagtacaataccctgaagttgatctcctatcaattacacttcctgcccaatctgcatcagtaaacacacccacttggagatgtccttggttctcatatggaagtccttttcctggagtcccctttaagtaccttaaaattctgtacgttgcatcaaagtgtccttgatttggtgagtgcatgaattgactaaccatgcttactgcaaaagcaatattgggacaagtatgagagagataaataagtatcccaattaggcattgatatttctctttgtcaatcacctctactggacttgctggttggagtttcaaatttggttctataggagtttctatagccttacattcaagtaaacctgtttcatttaataagtcaagtatatattttctttgagaaatgaaaatacctttcttggatctagcaaactccataccaagaaagtatctcaggggacccaaatcttttatctcaaattcacaagttaaagctttcttcaatctctcaatttctagactatcatcaccagttagaataatgtcatccacataaactatcaacacaacaatctttccttttcttgagtatttataaaacattgtatggtcaacttgactttgaatatatcctcgaagcttgattacttttccaaatctctcaaatcaagccctaggagactgcttaagaccatacaaggacttatttaatctgcaaacctttttttttttctagcttttcttcggaagccgatggtaaatccataaacacttcttcctccaaaatcaccatttaagaaagcgtttttcacatctaattggtgtaaaggccaattaaaatgtactgtaagagaaagcaaaatccgaatggaattgatccttgcaacaggtgcaaaggtctcttggtagtcaattccataggtttgtgtgaaacctttggctactaaccttgctttatatctttcaatgctaccattgggcttacacttgattgtgaaagcccacttgcatttcactgtcttcttctccttaggtaaatcaacaatttcccatgttctatttttcaaaagagcattcatttcttcttgaactgctgatccccactctgagtgtcttagtgcttcttgtatagttcttggaatgaataagtgagagatatttgaagtgaaagttctatattttcctgagagtctttgataagatagatatttggcaatgggatatttggtacaattcctaactctttttcggattgtagtaggaatatcaagatcagaaataggtaaaggagtggagtccataggaagattacctggattttgagaactaggagctgatgattgaccatgctcgagattgacttgattattctcagtattagaaataaatttgcgcctaatataaacatggaactcagtggacataggttgtagagtttctccccctgtttgtgatgcaattttgtttggcatagataaatcagtatttcctcctttttcactaattaaaacatctgttttttgatttatttcaggaaaaaaaaaaactaggttttggttgttcttgttgccaaaaccgatcttcattagagcgcccccccgaagagtagttttgttataaaagggaatattttcaataaagttgacatccatactaacatgaattttcctagtggtaggattaaaacacttatacccttttttattaggagtataacctagaaaaatacattttttggttcttggatcaaatttggatcgaaaatgagttggcacatggacaaactctgtacaaccaaagttttttaagggtaaatccgaggtgaggcatgtgtttggaaaagtattcttaagagtttgtaaatgtgttgcatagtttagaacccttgtaggcattctattaatcaaatgacaacttgttaaaattgcattcccccaaaggtgtgtaggaacattcatataaaacataagagctctacctacttcaagtaaatgtctgtttttacattctgcaattccattttgttgaggagtgtccctgcaagttgattgatgtaaaatacttttctttagcaaaaaaatcacctaaacaatcattataaaattttgttccattgtcgctccaacgaatatttattttggtttgaaattggttttcaaccatagaataaaaatcctgaaagagttttgcaacctcagaattagagttcatcagataaagtcagcataggcgtgtgtgatcatcaataaatgtcacaaaccattttttcccagttaaagtagtaatcctagaaggacccaaacatcacgatgtatcaaataaaaaggcttttattttataaacaagtttcacaatcaaaagaagtacaatccattcctttaaataaacttggaaacaaatgttttaaatagaaaaaactaggatgtcctagtctgttatgccatagcattatttgatcatgcacagggattgaacgaacacaactaataaaaccttgagcttgtttattctcaaaccggttatcatcaaaatagtagagattgttaatcaatctagcatagccaatcatcatccccgagttcaaatcctaaaattcacaaagagaggcacaaaaaacaacacgacaattagaatccttagataaacgacttatggataagagattacaagagatttttgggacatgtaaaacatattgtaaaacaatcttatcagacaaacggatagagccttgcccaacaatagaagataagcttccatttgcaatacgtacttttttttatttccagaacaaggtataaaaaataaacaaatgagataaattagtcatgtggtcaaatgcgcctgaatctatgatccaaggtacagataatgaaagagaatatgcacacgaaagactacctgactaagctagagatgctataggagtaccaggagttggcagagcaggttttagcagctgtagcagttggtctaattgttctttgctcaatgagggtgtctcggtagcatgtgcttttgcagggaaacgattatagtcgccttgcttattagtcttccattcaacgggcttccaattagttggctttccatgtaatttctagtaggtttcacgagtgtggcgtggtttattacaatgatcacaccaaactcttagcttgtcatcctgacaacatcggttattaggattgcgagaagtcactgttgtagtgctcaacaaggttgagttttccacaggtctaaggagcttcttcccaagcataacattcctctggctttcctcatgacgcacttaggaaaacacttcacctagaaaagggagaggttgccaaccaatgattctaccccgaacttaatcaaactcaatattaagcccaagtaaaaatttgaatatctgtgaactttctaccatcttcttaaaatagttaaaatcatccgtatttttccactcatagtcattgaataagtcaagatcctaccataaacccctaagcacattaaaatatttggtaaccgaattctcaccttgacaaatatcgcctagtttgagttgtaactcatagatttgggactgatttccaaggtctgaatacatctgaataatgttgtcccaaagagctttggcaataggataacacatataatttgagctaatctcctcctccatggaatttaccaatcatgtcatgatcatggaattttccgcatcccaagtggcatagctaaggtctgtcttcgctggttctttggtgtcaccaatcaaataaccaattttgcctcggcccctaatgtacatctgaacaaattgtgaccatttgagaaaattgttctcattaaggcagattgtggtgatttggacagagtgggagtgagaattggatgtgggtaattttgaggaattgaaaccaacagtaatggaaggagtagattcggaaatttctgacatggtaaagagatagcaatagaaacaaaaagggaagaagaacagaactggaaagaatgagaggaaaaagaaagggaatagtcaattaacttggctctgataccatgtagaaaagaaaaaaaaatgtcgtatattaaattgaataaggaagggaaacatgcttccttttatagaaaagttacaagaaatcaaactaaatctatagttgtacacccaaatttctaggaacaaaataaatttaaaatatacaacttaaccctaaaaaacaacaacaaattattcccggattatccctaaaaaataagtaacaaccagatcagaaaaattctgatatgattgagattctcaacagttaatgaggatatattgtgttggaagggttctgaatgagggaggtttatgtgaagaagttttttttatcttctgtgcaggaggtgtggtatgcctggagaaaagcttggtgtagtttggtcctttcgaaggtttctttttttttttttttttttgagcaggcttttcaagcagtatactcacagttaataattaaatgctgtttgtgtggagaagtagaggaaacagtgaattatcctcttctccattgtagctggtgtttgctctcttttttttcttttcgtagggtcgcaatggtgaatggagatttttaagaggcgtcatgggaggttgttaggaaggtaagaggatattatggaagacagctcctctattgaaatagagtagggcttttgagctggtggagcattctttccctagaaataaggatatctctctaatactctctgtttgtgtcttgagctcttcccagttctttagggccttccttttgtagtttagttgtgcaatttctgttttttgtgctgggtttgtgcttttcattttgtttccctattttcttgctccagaggctggagcattcccaaccaatctgtttttttcttggctgacccaggtagtaaaactggtgcagttaatgatggtttggttttgtttgtgtagggtggtatat

SEQ ID NO: 10924 - DNA, 2754 bp, Vitis vinifera
  Intron number 1 from transcript GSVIVT01028521001 (locus G SVIVG01028521001) derived from phytozome v7.0 (chr-ID chr7 ; pos 9112509 to 9115262)
atatgttatatatatatatatatatatatatatatatatatatatatatatatatatatatatatataatgtaggtttgtttatgtgccttctccatagacaaaagaagtttttgcagatgtgtcaatggattctttgttggattggaatatggatagaaaagtatctacaattactgtagataatagctcaagtaatgacataatgattgatatccttgtggaaattgtcttttagcagttcacttttactgaatggaaaaaattttcacatgcgatgtacgacacatgtcttgaacttaattatgaaggaatgtttggatatcatggagtagaaagtgaaaaaagtttgtgagagtctttattggttgaaaacaccatcaagagtggaaaagtttgaagatgcaacttgccaattgcatattccatgtaataagaatttaactcttgattgtaaaacaagatggaattctacacacttgatgctatcaataactataacatataaagatgtgttcccatgtttgaaaaacactacatgtttgtgccatcagaggaaaaatggaatatagcaaaagaaatatgtgggagattgaacttgttttacaacataacagagttgttctcaaggcgaaattatcccattgcaaatactttcttcatcaaagtgtgtgagatcaaagaagcattgtatgattggttgatctactcaaatgatattgtgagaacaatgacatcaagtatgttgcaaaagtttgacaagtattacaataggtgttatattatgatggtaatagcaactatatttgacctaatacaagatgaagaatttagagttttacttcccaataatgtatgtgcctaaagcttcaaatgagatagaaaaaatttgtggaatgtgttatgagttactttttgattaccaatcaaagtctaagttggagcaagaaacttcatcctatggtacttcatcaagttcaactctttcagagtttaactatgatgaacaagatcttctttcaaaatttgacttatttgttcatagtaccattggagaaagttatacgaagttggagttggataattacttagaggagtctattttgcttaaggacttcaaattttgatgttttaagttagtggaagacaaatggtataaagtctccaactttgcaaatgattgttcgagatatccatgatatttcgatatctacagtggcatcagagtcaacgtttagcaccaatggtaggatggtatcaaaacattgtagtagacttcatctagatactttggaggtctgaatgtgtgttcaaagttggttatggaaggaaatggaaggtaaccaatttacagaattatcaattttatgaatgattttatattaaaatatttaataaagtgacatttttttgggtgtatttttttattaggtgattctccaattcatgactcacaactcccactcacaattatggatgaaaatgatgattcactcgtgctttaggttttttacttgagatgattttagagacattttttgtgacgttaacgttatctttgtattttttttttcaatgttgttaagtttatggctatctttaattttgcatgttgtattttaggatgtcctatatgttgaattgttaatcattgccaatattaattggactggtttcataagtgcaatggttgtagatgttgtttttacttacaaaagtctacatttaaaaagtagtaagatatttcttgaaaaatgcaatgataagaatgtattcaatctttttaaactgaattcattataagaatgtagccttaatttagcattgtttatgcatcaggtaccatggaatttggcattgatttggctctaagaagtaccatgatatttcctcacacttatctttggttgtttctactgttggttagttttattcactctaatcctataccctgcaaattggtaattgtttcaccaatggtgattttttactttctcaaacgagaagtaaacaaatgtcaagtttcactatggatacattgagacattttaagtgtcattgaataatacttaggttttatggatacttgtttttttcttactttttgtttactttattgggatgattatgtaaatgcatatcatgtcatgagattttgggaagtatactatgatatgttctttgttggtttactgcatgtcattacagatttttgagaagaacccaaccataatgaagaattacgggatttagtactactctaaaatggtgttgttaagcaaatgtacactaagatgccttccttcatttttcatgcttataatctgcacatcaacatttttttggtctagttcaatctttgttgttttgtttaggccgcagatattacaatgataatagaaaggacaaaatgacataggggtggtgaaaaaaattatgataggataggtctttatttaattgaaattatggtaatgagcctaaaggctttacatggataatgggtagccacaagagaatgggattgggtagtaagaaacaataaaatgataatttaatggtatatgagcttagttaggttggaattgccaaaataggatttgtgcagatgataactacctattgtgagagtttttgcttaactttgttccacctagttgcgtgataaaaaacatacatatttggtgcttgtagcttgcttagtaaactatgctagctagctttttgcatccataacattgtctaccaaggcaaa

SEQ ID NO: 10925 - DNA, 14932 bp, Vitis vinifera
  Intron number 9 from transcript GSVIVT01030942001 (locus G SVIVG01030942001) derived from phytozome v7.0 (chr-ID chr1 4; pos 19474671 to 19489602)
cagttgttgaagcatataatatacttcccaatttggtaagtttctgtctcttagagtttaaagttcattgcatcttcttctacttctttagagagtaaaacttttgaacttcatcagctaaatgcaacactgacatctagtttttccttttttgacttatcattggaagaaaatatgttgtactgacagaaagtgtattctattcttgtgagggaatatctacaaaacatatttgtgggctgttagccatccctgagaatttctgggatggaactgatgctttttatgatttataaattaaaaatttttaaagatgaaaataaaaatgtggttttacaactgcaatcaaatgaaattttgactaatatcatcagagaaaaaatgctataactcattctgcattttatgctaaaatgcagcaaaatgtggtattttttttctttttttgatcagatcaaaatgtgggtttttgagtattcggagtgctacctagtattgtttttcagtactttttttggcattattgaagttttcttcatttatccaactcatattagatgtaggtttactattcaaattatcttttttatatatggcgtaataacaagataatattaaagccgtaaaagtttgaggtttatcaaaatgtaccattttaaggcagctgttgagggtggcttctatttatattttatttcttcatgtatcggtcataaataggaatgaaatggtttttttttttttttttttaattttttttattagaaaccaaaagatgtattaattaaagtgaagaaaaacatgagaatgatgagaaatcctccccatgatataaaaacctgatcataagattcaataaaacctccactttacaaggagagttgtacaaaaggaacaaaaaaagcctatacaagtataacatctcgtgaaactcatttggggtcctcctcatgtaggcccaaccctaaggtgtatataccaaaagccaactaagttgaatgacactcaatggaaaaggtttaaaaacgttagtacggtaggcccaaatagaaacataaaaatgaagcaagtcccacatcatcttaggtgtcttccaagtatcctaaaaagtcctagtattaccctctctctctctctctccacataatccacaacaaagtgagacaagcaatcttctaaagattcttgtctctagtagagttcctaaaacacataaaagaaataaccatcatattgcaaatactacttggctaacctcacacatcccagtctatgtgaatatcctatgacataaccttaaagtaatcggacaatgtaggaagagatgatcaattgtctctccactccctctacatagcaaacaccaattaggactaaggtctttgaatgatcttttcaattgtagcatgtcattggtatttatcttcttatgtgccactaaccaggtaaagaccatgaccttagaatctgataaattggacaaggctgattttttatttattttttaattgagaatactcttgaagaagaaggtacccaagcttttgcatttggaacaaatgaagttaaatgtacatgggaaagtgaagtcattagtctttcaagatccttaatctccacatcagttaggtttcgacaaaaaatgagatccctagacaaaggggtgtcaatacccaaaatggctaagatggataggtttctagttgtggtgactctaaaaagtcttggaaattgtgaacacaaaggttgatccccccactataaatcttctcaaaaacaaattctggtcccatcatccaccatagaatggatgtgtggagaaaaaacttggagaataagtgtaatggccttccaagggcaatgatttgaccatttgactatattattggcatcccatctattaggatgtgtccaatagatacttaaaataacttgatgccaaagggtgaaactttccttaggatacctctaaagccacttccctagtaaagcttgattccttaaagcaattttcccaaaccttaaaccattgaattccttgtctaatgttgattccaaaaagagtgcttttatttagattgatctttagccttgaaagacgcctaaaaaccaacaaaattagtttaaaagtttgcaactcttccaaggaagctctagaaaaaaagatagtgtcataagcaaattgtaaatgaggcactctattcctctgctctcactatcaacctactttaaacatcaaccacaatggtgaaaagaaaaggggaaagaggatctccctatcttaagcctttatatgccttaacccaacccttggtatttccattcactaagaccaaaaaaggtgttgaagatagacatcccctcatccaacacctccatcttgaattaaacctttttcattcaagtatatggtctaaaaaacccaatcaacatggtcataggccctttcaaaatcatttttgaagactaccccttcctaaagaggaatgaaatgttgtagatgatttcctttatggtgggattatggaagagcgaaaggctcatttaattagttggaaggtaaagcagatggtggtcacaaagttaagaatttggaagagatgattaagttcttggttaagcaaatggttttcctagtttatcatctagaggagagtagcaccgtccaagtaaagggagttgggataggtgcaaggttggagggtggaaagaagtggtagtttttttgtgaaatcattctacattctttggaccctaggagtctctacttctttttctgctaaggaggtttgtattgctttgatgctatctaaaaatttctttgctaaggtgtgtgcttagtagaaaatccttactttggttaaacacatgaaatgaggtaaccttttagctagctggtatttactgtctttgaaagcaggagaattaacttatcatattctcattcactgtgggatggctcattttgttattctctttgtttaggattacttcgatgcttcctaggttagtcaaggatcttttgctgggttggcatggtagttttgttgagatgagatagaagaggttgtggaggcttatgacactctttttgttttagcccatttagaaagagcgaaagattaaatgttttgagggcatgaagagatcaaaagtgttggtaaaagtgtctctatgttggttgaaggatttgttggttttgatgttgtttcctttctagagttcttaggctgtttaggttaaatttaagttgttttatggcctttcttttcttcttttgcttgtgtctccttgggtactctttcttaccatccaatctacttgggttgagcctcccttttgataaacttctcttttgcccattggaaaaagaaaaagaagaaaagaaaagaaaaacgagtatggattaaagaatgggtcttgggtttctaaggagttaaagagtctttagagttgagttgtggaaacgtatactggggcgagattagtttagcactcaatgtggcttcaaagtgagatataaaggcaactatccttttgacacaatgcttggggtgggggaaaaaccttagtgagtggttcacatgttttcccaggttgtcaaagataaggtgacaggatggtggattatcagttctaggaaaccatatctaggcattgacagtgaaaatttattacagttccatgattgggagatttaggaggttgtatcctttttggttcatgttcattgtcaaagtaggtagggatatgattttttgtttggtggcatgaggtccctacctaaaagatatagatatgtatgtatacatgtatgaataaatatgtacatgttagatgaaaccaaacctaaggcctccctttcctcaccttaataccttgtcacttgaattgagccttaagggccctcgtagaaaagatttaattaaaaaaatcatacgataaggagctggtaagaatagattgttttgcttccaacaaagaaatttggggtcctagtgttctcttgaaagtagctttccttgtgagaacaacaccttgggctaaaatcctcactattaactagttagtgagaagaggccatattggtgttctatggatgaaaaggataagatcttaatagcttggcaggtaaaacaatgagtgttttagggaaggcaacaaggtgattatagatcaagaaagtgtgggccatctttcggtttattatgtgtttgcttggttggtatggttttgtttatctctattttaggattgattattgatatttgaaggcagtcaacaataattggtctagtgggtaagcttatggggagaggaaggaaggcttggtgggtagatcctttatgtattgcttggttgtaggagaaaaataaaagaacattaatgctgcttcttttgctttaagttagcagtgcaagaccaatgcttcagtaactaatgccacaagcttttgagagtgcttagtagtaaaaatatcttcatgcaattcatagacttgaggagcattgctctgttatgaaaatgactttgcaattgagttccaaatcatcttggaagaatagcaaaattcaactttagtagtcatgtggggttccatactatgccatacccatctcataacaacaaaattctcatacatccaatgttcatatgatctagctttgatatgacaatggaggttatcaatcaagtatttcaatttcctccatccatgaaaactgtgaaaaaatggacaaggtattaatgccattcaattttttccatataactaattttggtattccatcatccttgagatggtgtaatttatcatcaatcatgagaaatttcaaaacttcagaataaaagatagcatccaacaactttgaaacaacttgtgaactccacttggaatcatagaatgagaaatgtcaagactttggtgtaacaaatagcagccaaaaacaaaataacaataaagactcctcatctaacaacaacaagctaataaactaacatttatttctttgtaacctttcagcttggattagcatgtgcataagagaaaggctcaatgcctttgattttgtagattggttgggttcttgtcgagagagaggttgattctttttgtggcatatcttttgaggcctaaacttttagtagaggtggcaaaatttgatacaaattgtcaacacaactcaaacctaatgcattttttacgagttggggttgagtataattgtgtttgggtcaaactcctgccgatttgcataacccttttattaaataggttgttttttgcaaatttgacttagattaacctatttaataatcacattaattaaccttattataactctaatctaacctatttgacccatatttggttcatgtaaaatttgattttgaataaataggtcaaaattgagtcatatacatgtcaagttgggaaattaatcatataaactcatataatttctaacttgatttgattattaaatagctcttggttatttttttttttttttttttttgataggaaacgccacaaagatatattaatataataagaagtacaagaagaaggatgagaaatcctcccaccaaagacaactaaaatacaagaaaatacatttaaaacaaacgacctcccactaaggaccaatccctatggagtacacaccgctttccaatccagttgaatcacattaaggggaatccccttaaatgccttggaacaaaaagcccaaagggaagcaaggaaaacaatagagtcccaaaggaaccctgaattccttgctttatcctcaaaaatccttgcgtttctttcccaccacacaacccgaattagagctatgctcgcagcttgccacaaaactatccctctcttagaattaccgaagcctttaaatttgatgaacatcatgtcatatatgctccttgggggagggggaacccaaaccatctcagctaactgaaataacctgtgccacaacccaatcgtcaaggagcaatgaagaaaaagatgatctgctgattccccgtgcttcatgcataggatacaaatatcaggactaagggctttgtagggtcttctcacttgtaacatatcattagtattcaccttcttgtgtgccactaaccatacaaaggacttcactttgaaaggaacttgagaattccacacgaactttgaaggaaagttctgaggagatccagaagattgagataatgctagaaaaaaggatttgactgagaagagccctgaagaggataatggccataatctggcatctgggaccgaaggagagagatacaaatcatcgatagaccgcatgaggccttctaagtcctcaatctcagaatctgacaggttacgtcggaaattcaaattccacaagaaaggccgagaaggaccaagaactgaagaaatagaaatgtttttatccactactactctaaatagtcttggatattggattcccaaaggttggtccccccaccacagatcttcccagaaccgaattctttccccgattcctaccacataccgagtaatcaaagaaaacccctgaaagacttgagcaatagccttccaaggacagcgatgagaccatcttactaaagtgttagcatcccaaccattagagtgtgagccataaatgcttaaaatgacctgatgccaaagagctgatccctctctaggatacctccataaccatttccctagaagagcgagattcctccaagaaatattccccaaacccaaaccccctattgtcttcggtttgcacacaacatcccacctcactaaatggtcccttttgccttccccaacccctgaccataaaaaatccctttgcaacctctctatttttgcagccactgaagcgggaattttaaataaggataggaagtaacttggcagatgggtaagacaagattggataagagttatcctccccccgaaggataagtaggccttttgccacccatctaatctacttgagattctctcaaccactgggtcccaaaatccacacgccttaggattcccgcccaaagggagacccaaatagagaataggccatccagacgccttacaatcaagcatctcagccaatcttgaaagaagagcctgatcaagattgatgccataaatactactcttgttaagattgaccttgagcccagaaatgtgcccaaacactagcaaaagactcttcagagtctgcaactcttcctcccttgagttagaaaagaatatggtgtcatccgcaaattgcaaatgggacaccctagttctatttctacccaccctgaaaccctccatcatatttctttcctcagctctcataatcatcctgctcagtacgtctgcgactaaagtaaacaaaaaaggggataaagggtcgccttgtcttaatccccttgatgccttaacccaccctttagcactaccattcaccaagattgcataagatactgaagataaacatccactcatccatttcctccatctaggactgaaccccttcttttctaacacatgatccaaaaaatcccacttcacgtgatcgtatgccttttcaaagtctattttgaatacgacgccttcctcccctgaccttcttctctcgtccactatctcattcgctataagaaccgcatccaatatttgtctcccttgaacaaaagcgccttgagtatagtggatggtctcatgtagaacccctcttagacgcccagagagcactttggctattatcttgtagagactagtgatcaaactaatgggtctaaaatctgatattctctttgacaaactctttttgggtattagaacaatgaaagaggcattagtgctttgattgataactccgctcctgtgaaattcagcgaacactctcaccaaatcctccttaatcacatcccaacactcttggaatacggcaatagtaaagccatctggccccggtgccttgtccctatccaactgaaaaatggccttagaaatctcttcttcggtgaaaggggagtctaaccttaacgcactctcttccgaaataggggaccaatctaatccttcaacaccccaagactcgcctgtcggatttgtgtaaagcttctcaaagtaatgtaagatctcctctgtgatactctcggcattcttcagcactaagcccctctcattctccaactccttgatatatttcctatttcgcctgccattagccactttatgataaaacttagagttgcaatccccttccttgacccatttcactttggctttttgtctccaatgaatttcctcccttaatattaattcctctagctccccttttcttgaggctctttggcttaacaaatcaggattgagacccccttcctgctcaatggcgtcaaagttagctaaatcattgagaatactttttttcttttctttaagctctccaaaagaaaacttgttccactccttcaatttagctttaacatattggagtctcctcataaacttatgaccttcccatccgtttccttggaacccactccaccaatctctaaagttctccttgaatttagtgtgatttaaccacatattctcaaacctaaaaggtgttggcccccacatgaacggattggtatccataacgattggccagtgatccgatgtccttctgattaaggcttcttgaaggccttggggaaagagcagcccccactcatttgagtagagaaaacggtccaatctcttacacacgggagactcttgcatatttgaccaagtgaatgaagcattccgaagaggtgggtcaagtaattcacattctctaataaaactatcaaagtccctcatgcttggagttaggctagaaccccccattttttctgagcttctcctaatgacattaaaatcaccgcccacacaccatagcggataagttaatccataaatgtcaaaaagttccacccaaaaatccttcctaagtgagggactgtttggaccataaacagcagaaatccaaagaggtccacaaccgtccaaagagaacttgactgagaccgagaaagctcctattaccacctcctctctacgcagattttttgaatcccatatgatcaaaatcccacctgaagccccagacaccggaagagcaacccaatccttatttctggcagtccagacactacccacaaaccttctatcacaaatctccttttttgtttcttgaatcatcacaacatccggattctctgtcttaagaaaatctttaaccatcctacgcttattccttgaacccaaacccctaacgttccaactaataattttcatgggaaaacacacagaccctaaccttccaaaccaaaaccaacatgtctcaatgccctaaggggcctctactcttcctcctagaatacaccttaatgtcaagagagcctaatacctctcgcactttggccattttcccgggggacaaaccatcaataaggaaatcacacgaaacctccttaggtgtacagctctcagtcatcaggttagatagagcacactggttctcttcctcaccacggtcaggtatgtcaccatgatttaaatagtcaacaccacctttttcataaaaaaattttgagatgccttggtcatccgtaggagactgagaaagagggactgaactgggaagaattggaccagagggattcgtcaaaggggaaaccgggctacaggaaggaagaaaaggagactcgggtgtctgagaagaagagggctgacatacctccaagattttggctcccggaatttcgcaaaacccctcaaagatgagtcctttacctctgattattggattagaaggtgaacccatgactgaatagccacgaggatccaaccccgctcgtcccgatagccctcctttaagttcaacgcggctcgccgaggtgtcctccttcgaaagagtaccagccagaagacaactggagagaggattcactctggttcctcgcttcatctgagagcccatcccaaactcctcttccatgatgcggccttcacttgacgacgacgaaccccgtgtgaaaatcggctcactgcagcaccgatgtccctgtcgtcgatcggcgcttggagggaagagggtagaccacgtcttctttgtaattgccgtctcttcctcctgcgtagcatccctcatgtgaaccgcaggagttttccccttcctcgcttcgattgcttctcttcgcgagcagacttccataccagagggcttcgttcctcctaagctttggcccaaccccgacgggcctttaaacttacagcccatggtgttgtctgacgatggcctagggttgagcagagactgggccttaaactcaacggcccgaccttctcctccgaggaaaacctcggcgccggcccttgcatcttctggacagagctccgcaatcgcctctgtagatgaagcaactcgctggggagaaagggacgaagccgatgcagactggagggcttgaggagcatctgggccatcttgaagcccacgatgcctcatcccactttgggccctagccttgtgggctttaaaaggggactcatgcacaggcccaaaaattacttcagcttggcccgacctgctccatccccctcctatctcccctttaaccgccaaacacgaccttgattgccgatgacgtgcccggggaagacgcctctttctgtagcactcgatgtccctaactctacctcgtagcccttctgcaacttttgacgactgagagacgcaacctcccactctcacccactcgttcctgctacggtttaactcagacgtgacagcgtcggcatcttcgtcttctccggtgactgagactgctactgtataggacctttccccatcttccacctcaagcaacgccggtaacacgacgtttggaagcatctccacccatagcttcgccctcgtcaagtccaccagcttcaaagtctcctttgccaccttcgttaccctcccccatttcttcaaaatgaaattcaactgaacttcatcccacaaatggaaagggaggcctttcaatactagccatcccctcctgaactttccttgaaccaccatattttccttgggcgaccatttccttagcagaatcgtccttcctttcactgaaagtcttccctgatcatgaactctttccgctctccttgttgaactcacaaagaagcatcctttgaaagcagaaatgggatttatggacaccattcctttcatccccatcatcctcgcaatggctcttccttcatgagtccagtcttggacttttacttggctttcacatattacagctctggcccattttccagctgaaaacgaacctccagtcctcaaacctgcctctaccaccacttcagcatatgaccttcctcctctgaaagtgtccctattcatccagatatcgccattcttctccttcgaatctcctccgtctcgttcagaattctcttgcactgataggatcgccttcctaagatcttcccatcctttccctttgacgccctcggggacgacaagaaataaaggtttcctttttgtaacaaattctgtaattttcatgaaccttcctctgttattgaagcatatctccatcaagagggtcttagtcttgcccctgatctttcttacaaaacccctggaagcctccacctccacagctttcttcaaatgcaccatcaaccagtccagctcctccatatcaaaacctattgaaactacgaaacctcggctcctctctgttaccgatacccaagttcctccattcaaaccttcaaactcaacctgaaaattctttttctccacaaaaatcctttcaactttgctcttcatttttacattcgaggagatcattctgttgagaatgtgagcggtattggcaaaacaccattgaacctcatttccattgaatgataaaaaaaaatttcatccatttactttgattcatactaatgtatggagtccttcaagaattccaaatatttctcgtcccagatggtttgtatcattcatacatcaaggcctattatgacttctcacattcaaaataaaaaaccgaaagtcaaaatgagaagaaatggagcaaaaaagatcccaccgctgttgctcctgcaccaatgagtaaaataaggtaaagaaagtcgtacatccttcaagaaggctttcaaccacccgcataaggatttcaggaaaaaaatgttcctgcttcaggttcaatagcttcattcgtttaaaaatccttcagttccacattccttccattagcacaaaaggatttttgggcttacagaggaccatcaacaaggacagggtgttgagatttatcagagtcccaccaaacaccccctcaaagattcaatcctctttagtgtggctaggatgtccaacaagatcttcagggaagctgcattgacatagcttttcccaactaagttgtcacaaacccaatcttcacctcatgcctaggaacagtaccttgacccaacactgtttccaaaaaataatagctcttggttattaaatgagttaaataagttataatgtgctacttgtttgataattaggtcatgtttaggtttattgtttttaatccgattatcattcacataatgtttggtttgaactagttagccaagtatttgacctttgaccttacatgaacatgacccaccaacacgaattgccacccttaccttttagtgtttgatgtatgcatcccatgtactttagtgtactattttctttttctatttatatgtacatatccttctttgcctatcaggaaaaaaaaaaaaaacactaaaaaactatggaaaaatccaatcaaacaacttcaaaaactataattagcaaaacacttgtttgatcgaaccttgtaaatttcagatcgaggttgtaaaatcttcatgacatcatcatgatgtgagtgttctgattttattatttatttatttttgggaaaatactgggattgtgctatgatatcaagttgtgattacaaacttgtgattttagggttttgaaggaggaaaaagagaagaaagaaatcctggaagaagttttggtttttatctaattgatttttatgtaattaattttcctatatctttccaccaatttttgttattgagtttaaaaagagaagattgcaataatgctcctaatataatgtagcaaataataaaatctaaaagttttctatttcatttgaggtaaacatttgttgtcgcatatgtttttttactttgttctttttccaatattgtttctcacttatgaaaagaagctcttaaggaatatactgcatttacgtatagacttattttcttttgtttctggtttattttatttgcattgtggtctttattattttaaatgaagatgaatatgtaagttatgaatggcacgtatgttactgttcttattagcttaaaccttttttattaactttttttttataggtatttttttttcctgtctgttcctaatagaacttgaacttggaacctcccacatcgttgcaccaaccccttaccacttaagcctgacctcaaggtcttataagctagaaatatgagatgataagaattttatgcttgcataggtcatgcagttggaagagatttatcattctaaaggcaggaaaataactttaattggtggtaggcttgcagtcatactgacatgctttatgttgctctttgacatttgatttttattatatctagattgcagaaactgaaaagaggctgtggttggggatgaaatcaagtgtcgcctattattagttatagcacaaacaagaagggggtcacatgattagaccactaggaatcatgaattgagttttgtctggaaaatgactttgaagttttgggtttgagataaagtttcatggaatggggcagtaagttgcaagtatgagtatgaggttagggattgttggtatgaagaggttatggtcagtatatggttgggtttctgaagtctagtgggaaagcatgtgatgaatttgctggagggttaaaggcaggagctggaatgaatgttaggttttggaaagacatctgatgtggtaattcaactttgaaaaaggacttttttaatttgttacccattggggttgataaggaggtatcggcggtaaaatatgttgagtaggtgtgtagaggatttcagaaaatccaatgttcatgagaaggttcaagatcaggagatggaggttgagctggttgtacatgtctttgagagcatttgaagtggctctttttagtgtggatgacagtaagagtaggtgccatggatgggatgacagaaagtgttagtgggcccatttcttgatccattttttactagcacaggagatttgggttgcctgttttccttgttcgaatctatttggtttttaagctggtgaaagagcttatcaggtggttgaccaagatgagtaagtgaaatggtatcttatttgggtgaattaccagacctaaaaagttccttttcggggttctcttcattggtcttggctactcctgttcagatttttggtgatacttaatgcacaggtcatctttgttaggccattatgctgtggctgtggtgggccttggctcttgcctcataatttgagtgctcttgtatagtaggtataaagttccatgttctaaagatgccccctccttgtttcccaaactggtcttgtgtgcatgtctttactttacaagtatgcttgattttagtgtttcttttccttttctgtttccttctttcatgtagcaaaattgtttgagataaactcatatttttgttgtgatacaactggtacctcgatatatcacatttttgtgctgcttggttcattataaacaggatttgctcattccttctctcctggacaaaggcat

SEQ ID NO: 10926 - DNA, 8648 bp, Vitis vinifera
  Intron number 20 from transcript GSVIVT01025856001 (locus GSVIVG01025856001) derived from phytozome v7.0 (chr-ID chr 8; pos 11179784 to 11188431)
tgaaaggcatctcacattggtcagatattccagaggtaaggctcaactagccatttgttgtcctggcttgttctgatccttttaacatttcattcgcaaaaagaaagaaaaaaagaaaaagaaacttatttcattttctatatatgtttagcctccatctctataggctactagttgaagaatagggtttcacgggaatagttttctttcattgagattattcttttatagagtttacaacatatacaaatccttcaaattaggaaactaaatcactgattaaaaggaaaaaataactcctaacaattactttcctaaaaatacaaagattgacaactaataaataatttacagttctacaaagttatttctttccatatcagtttcgattttccaacactactcagtctccatttatttctttcttggagatcttgcagtccttgcttcttgattcttaattcaatgacttgagataatgtgatattaaataaattaacagtatcaaaattcattttatattgattaaaacagtaacatttgtagctatcattattaaatatgatccattacatatcaattattaatctatttgaagaactagaaaaaactagaaaataaaacccgagttcttcatcctaattttggggttttctgatcttggcccctcatactggtgtcagacttttgcaatcctatgtaacatgtttggacacctatcaatcctagcgagtgtttattgagtctgtttacaatgttttatctttttaagttaacatcataactctttaatgttggttactgttgtcctttttacattttgttacacatattttaacatggtagattcttattatcaaacagattacattagatgaacactttcttcacattttttttcctttcttgctttctttcctcttattctattaaagcccaagaaacagaatctccaaatgttgcaatttgataccaaaacaaggtatatgtaatcacttgtactgctgatatctgaattgtatgattgagtataatcctcctttgccagaaaacctgaagagtataaactattattcttggttatctttccatattatatcagaaagacaatgttggtatgtgaattcattcataaatatggaaattgtatgatggggcttttattatttaagagttctattccaaatgggaagattcttttgggaatctgagacagttgctcctgcaatgatgcagtgaagggtgagagagctggattgttccttcctaagtggtttccactgcctgcgtattttggctacttctttcagactggggcctttataggtcctttgtttgaggctgttctgtcccaggttgctagtgatgactagttaaggattttttaacaccatgttttagtctttgttggttgattgggctgtttagtgaatagcatttcgactgtttgtttctcatagttagttctctgtttctataagtgaagattttgaatggtacaaggaaggtggtgaaggaagttttggtccaacaatttccaaatggaagattgtgggttataagttacattagttgctatagatgcaaaatggaatatcaaatggcagtcatggtacccgatccacccattcctaacatgctaagtgcaagtagaagaatatgtcaatatatgggacttttatcttggatgcagccacagagtagtaggtgaggcttgtttcttaaaacaactgaacaaacacaggaccaagggactcaaaacatattcacaatggagaagcttggctaaatcttatctggtaaaatgggattgaagtgagggagaggtctcatacagattaatatgcaattttgggaagtacatggaaggggttagaacagtattcagggtaaaggatcaatttcttaaaacaggcagtggcacttgaagtgggaaggtagttgattcaatagttgaatgattagattgttagccccaatttaatggaatgttaaattgaaaagcaataaatctaattgaatgggaaaggtgtcccattcaaaaatcaaacaattttaatgttcctgcattaatgaaatgggctggtgcaaaaataacaacaaatcacaagataaaaatacttgtttttgtttccaaaaggaggactactaatgatctattgtcaaaaatgcaaactctgaaacagtgaactgggtggaatattaggtctttctattctggcaacaatatcacttgttacaattgatttcataaatccatccatcaaacagtggttagaccccaaaatattgtttctaatattttatacgatacttaaaccgacaaaaaaactggtggttcaaaggtttggagctagagccagtatacgtttgtatcattttgagtctggtattgttagggttgtaaaccttcctgtggatgatattctgcctaccatagatttattgtgacttttcaccttcttggaaacagagctcaaacttgtattcaatcaattttttcatccatcattgggtccactatttgtcatttttctttttcctttccctcaatttgactactggatgccagtctgctgtaatttactcatgcacatatgtttgttaaaatgaactaatgtaagtgaaaacccatggtgaaagtatacgaatgatacaagtagacaacatcaaacattagtttgtcgatgttaataagtcaataagaaggaacttatgtcatattaaatgacatctagaaaaacctgaagcaatgctaagcaacatggtggtgactaaaggacatgacaatgaagaaagtggcatatgaaaaaattgcattcataatttgacaagttgagctgtggaagtgaggcccactaggcagcatgaataggcagcatgaatgaaatgaagtgcatgctgctgtttctgtggagcaagttattttcctgactagacgggagatggtttgatggtcttcagttggttgttggactaaagaattaccaaactgaacgaactttcttgttcagtggtcagcagtccactttttttcctcaagcattttgggtggagtcaatgagcgagtcaggctttgacatgcttccaatgttttacttgcaaccacttttgacccacccatgtcatgggtttattggttgagtaattctcatcttacccctaaaagaatctctttgagaatattcctattaaccctcccaataaatagactcctcaaaaatagagggctctggaaaacattcttttgaggactttttagcagaatttcttagagattcttgggagtgtttggaagaaccttaattgcatgggataacttaggagatttcaagtcaagagactaaagagacagctcagaatcatctaagctagagacttgagagacggtgcaaaactatcttcagttggaatcccgaaagatgatcaaaactatccttcaattgatgtagctagaggcttgaaagataatctagagagtgccttgtaattttttcaccattgccaccctcgctatgcttcccatcagtgacatagctcctccccaagccaagtatccccatctatctttctaccctcatttttgaaagggtactatcactataacaccagatcatctgctaaataatccatcataatattattgagtgcctacattagcatttccagcaataatacccctaaaacacacaaattgttcaacctctctgcctataacccctctgtcttcttaactatcctaatgagcataaatttctgtacactgtgaagcaaataatcaacttttgttcagtgtattatcaaaactaaagtcaccagtccaaagaaaatctcagaagtactataatcaatttaattatgccaaaaactaattgaataaatgccttaaaaggttgagctattagaaacaaagttactacgaaaagctcattgtagaaaggaatatcaatcgtctcgcctgatacatggaattttctataattttgaaagagttgcagaattttcaagaatcagaaactgtcccagaaaaaagtgaaaaaaaaattgtggacatcaaaaatgagaaaaaggaagacgatgaccattatcaagcaaacagatttctaaaatttctcaattgatttctaaaggaccaaagtgtacctcattctaaacataaaatgaaatcacctaattgcaagaacctaaactattcctagtccgctacaatataccaaccctgaccctaaataacagatgttaaaacccctaatggatgtaataaaccccaaataacatctttttgttgcattgtgttgtgaggtagagagtcaaattgtagaatccctaatcattccaaattaatactatggaaaaatagtttttttttttcttataaactttgaataacacatacaacattaatacatgattcctacaaccagaaaaaaggtaacttcctaataatccgttcctataaatcttctccatttggtaacatctcatacaagataaatatagaaatgaatacataaataaattaaaaaacaagcatagattttgcctaaaaatcatgactcaattagggaaccaagattccctctcctgactggattacgaatccattaacgctccccccaagttggaaagtagatattgtcaacttgctagtcaactcttgaaatgaatgtctggcatatcccttggttagaatgtcagctagttgcctatctgtggagatgtaaagggtaaagatgagacctctatctaattgctcctcaatgaaatgttggtacatctcaacatatttagtacaattatgttggactagattatgagcaatattaattgctaacttattgtctcaatagtttcatagttccttccattgaattttaagatcttcaagaattatctttaaccatagtaactcacaaatcctattttccacagctttaaaatctgcttctacgcttgacctatccataactaattgcttgttgcttctccatttcactaaattcccctttacaaatttatagaatcttgaagttgatcttctatcaattatagatactgcacaattcgcatcaatataagcctctaaactaaactctccatttctcttaaagagaattcctttccttagtatgaactttatataacaaagaattctgttaacaacctttgtatgaacctttctaagggaatgcataaattgactcaccatacacttactaaataggctatatctggatgtgtatgagacaaataaatcagctttccaactaatctgtgatatcatccatgatccacaatcggatcttcttcaacttttccaagtttatgattcaattctatttgggaatcagtaggtttacagccaagcatccttgtgcctttaaagagattatggatgtacttttgtttgtaaaatgaagaccctatttcttgagtaaacaactttaatgcctagaaaatacttgagcctccccaagtcttttgtctcaaactctttggacatctgccttctaggctcatctatctctgcaatgtcatcacctatcacaattttatcattcacataactatcaaggttgttaatttaccatatggtaagtggttgataaaaagagtgtgatcttcttgactctgaaatttcatatcaatcatagctttatcaaaccttcgaaactaggctataggagattgctttagtccatgtaatgcctttttcaacctgcacgcacttttattcttagaagctcctgaaaacctgatggagcttccatgtatacttcttctaggttaccatacaaaaaaaaaacatttttaacatcaaattattgcaaagaccaatcaagattagctgccaagataataacacgcaaatgatattcatttttgctttgggggcaaaaatgtctcttggtaatcaatgccataggtttgagtaatctagccttatatctttccaaagtcccatccaccttgtattttatcgtgaacacccatttacactcaactagtcctttttttagaagcccaacaatttcccaagtttatttttctcaagagctctcatttcctcatacataactttcttctaactctcatacctaagagcctcttaaactctttgtggaatttcagtagggttcaatttagataggaaggcagtgtgataaggacaatttattgaaggaagtaaagttggagatagggtattgggtacacttccttgttcctttcctaagggcaataggtaactctaaattgtcaaaggatggcagtggttcattggcagtggtatttggatggattctgtttgttcctttgaagataaaggagaagaaggatgagggtgaagttcagtacctattactcgtttagagttttggaccctcgctagatcaggatgcggctgtcaccttcttgaatagactcactatggcagtgttacaccagcttaccctggctcatttccagaagataaattagttgctgttttggagaaagcattttcatctaccaatggaagattagcagatgggctaatggtaaaactgagattgcttgatgaagggttcctgagtatctgagagaagaaaacaggtctgaattctctgatccccttatcttccaataatgactccccttaaagataaggggtagaaaagaatgtctggttttcagcaaaggtaacatccatggatataaacatttttttcgaggctaggtgataacacttatatcccctttttgttgaagaatagctcataaaaatacatttaagaactcaaggatccaatttcctatgataattagcatgaacatgaacaaaaagacgaacattgaaataccttgggaggaagttgattttgaccgtggaattgagggaagaactcgtaaagaacagctatgggaatcttgttgtccaaggttctagacaacaatcataattaagtgtgctgcagttaaaactgcttctgctcagaatgttattgggacatttttctgaaacagtaaagcttgaggcatttcaagaaggtgaaggttttttcactaatcaacttcattctatcttggagtgtcagtgcaggaagactgatgaacaattccccatttatgaagacaaggggacaagacttgattaaaatattctgtaccattgtcaaatcttatatttttaatttggactcgaaactgagtaccaatcatcttatgaaacactggaaagacacaactcacattagatttattctttaataagaataaccattataactctagtcataaaaaaaggaaacaaactaatgggttccattgatattaggaatacaagacaaaccctaacatcagtaggattaatgaagatggaacagaagattttgtatcattcaaaggacttgttgtgcatataacatgaaaatcattttactccatttattgggaaaatgcttataaacttagattcaaggaactcctaattgaaggccttgctaagagcaactttgattgccatcagaccaagctcttcccttttatgcacaaattggtcatgattgtggtggtgttatctcttattagtttaggtgggtatctctttttgtctatgccctgtttaagtcttttggggtataagggtttcccaccatatccccttatttaattgactagttattgtaaatgttacaactgttgggctacaccatttatgcatggtgttgcacacctccgtgtacctaaattaaactaagaagggtagatgacttggctaatgtgggaatcctcagcagtgaatcagttgtaatcaaccaccctcctagcattaaactcgttctatcgtcagatattttttcttgtagatttattcataggttctaagtttattctttaactttccctttttggtttttgtatttattgtgattatctttccacccacgggaataaaacccagaagagtactgaaaaccttcttgtgacagtcttatctgtatttattatggtaatttaagaagaaaaaaagatggtggaattcaatcatcttttgacctgcagtggccttggatatctggcaatatatttttcttttttctttcttttttttattttatttttattttttttataggcagattaagatgatatgtggaatagaaatggatgcaaaattatctttcaaacttcaaaattcagataaaatatataaaaacaagactcaactcaggaaacaaaccacagtaaaacatctaaagtccattatgacttggtacaaaaaaaataataataataaggaaaaaaaaacaaacagggcctaagataacatgagttaataagggcggctaacaaaagggcacacagcctaagcacaatcatctcctccttcatgccttaatgtctacaactattgataagtagatattcttattgatacctttgaacttttcagaatattttttggaccaatatttggatttcccctcaatttatttatacctcaatattatatatcaatatttttttccttgggcccacacacctcacgtatgtagaagttacatttttttttttgctatgctcaaaagaacaaggaggtccttcctatacaagaaaataaaaatggtgcaggtaactaccccattgttaaaatttgtggctgagtt

SEQ ID NO: 10927 - DNA, 1603 bp, Vitis vinifera
  Intron number 4 from transcript GSVIVT01037866001 (locus G SVIVG01037866001) derived from phytozome v7.0 (chr-ID chr3 ; pos 6981543 to 6983145)
gagaggtgtgtttcttgtagaattaatttttctattgggtggcttgttcttggaatgctttatatctttcctcggtcaatgatggttaaggaattgtgagtgttttagctaggttgacaattttgaacaaaattttctaagtgtcttccaactcaagtctgccgaatccttcctcggactacttgcctaatgaagatcaagatgttgaaagtgcttagaagccaagatatgtagttgaggtcgtagatggatgaaattgaatcaattgagtttttaaattattgttcttcttgaaatgtttttttaaagagttagggaggcttaggcagcagcttttttgactaagtatttttttgtgccctgttcaaagatcgatccatctactgtttactcatttttcagctattggatcaaggattttgcaacctatttaaaccaaatgtttctattttaggggagagaaaaccagcaaccattttctcactcccttcaagctctctctcttcaatccaaattgggagtgtttggtttccaagaaaatccttcttaccctgatttccaaattgtttttcaatttgattttcgtaaaaaaataggttgattcatagcatgcattcatctctcatattctcatttgtttgggtttgagcgaaaacttattttcttcttgattgagcttcaagaagagggcaatatcaagcttggtatggatttcaagtatgctctggaagaaggcatctagctgaagtaaaaggtgttggttaggtagtctataaaggatcggtggacttgagttaggtaaatcattgtacattttagttgttcttcatagtggaagcttttgattgttggtaggcctgtggtttttgatgttttagaagatttttcatgttaaaaaatctagtgttattatatctcacattcttctcatttgtgcatttccatttattgatctcaattttattcttggtcatacatgttggatggccaaaaaatgagttgaaatgtgttaaattattatttggaaatcttggataattttcttttcaatttgatcatgatatcaaagaataattggaaatgtattttaagtagttaattgttcttatgaattttggttgggaagtgttgattcatttgcatgtgaattgcatttattaaactgttgggatagtgttggtgcattcatattggcatgcaattttctttctttgttgaaaagtatcgaaagagaagaatagaaactgtgagattttctaaggataacatgcgttgggggacctcttgaatttgtataaaaacacctactctgttattattcttcccctgtttctatcttctaattttaatattaaatactctaatataaattttataaagaaagttcctaattcatcagactactattatcaaactgttttgtcttcttgaacgaattttttacttcaccttcttatttatttgccaaatcaatgttttaccaatagtgcaattaatacttgttttccttgcattgaaagagatgacctttcattacaggtcaattatagtcttgagtaatgcagggatgtcaccatattgcaggtattcaatattctgaggt

SEQ ID NO: 10928 - DNA, 1419 bp, Vitis vinifera
  Intron number 2 from transcript GSVIVT01035664001 (locus G SVIVG01035664001) derived from phytozome v7.0 (chr-ID chr4 ; pos 3137248 to 3138666 reverse strand)
tcagtgttataaaggaaagaattggaaaaaaataggtatgtctgtgttctgatattgcctgtagcattcaacaaatcttgcaccttaactatcactcattagtcatacttcagtccatgtagtgttctagaatggtataattacaaaatagatattaagaagtaaataatttcattaacatttatattctaatcaatgctacccatgtgtctaattgtacacctgattttgatcaatactttgattcattccaacatgctttgatacctattttccagtcaaccaaccaacattgaatctatatcattttgcttgtgatttctaactaaaaggaggatatttctaaatcattcatcagttgcgtagagcttccagatcactgtattatttccacatgaattctgtttgattgacagttcacaagagtttggctagtagattctcaataaaatgttttcgttattgctttgaggtaatgctgctcctcaaataattttatgtttgagaaattatcccaatccccttggcatataagttatttaaaaaatgtttcaaatatttgtttgcccatttgtatgctactcactttctattattcatgcgggtccttttctgtttccttggcatgattctactaggtatatttggtagatcattgagatatgcttaagggtttttttcccccattcggacatctttgttgttgaaccttcttaggggtggattagcctaaataaagtagacttgccccctataccccccaccctgactatttggggtggcaacatgaatctttccctcccttatggttttgtcctaggatatttttgtttagtgtaggctgttatttcttaatctctttgcattagcccaggttgaattttttgttttttgatagacaacagaatcatgtattaagaactgccaaaaaaagggggttcaccccacatatgcaggaagtatgcccagaacagcctaaagaaagcaacaaacaaagactaagttagcctacaaaaactgagcatagctaaccataataaagagcatctaagacattcaaaatagaggggttctccaactccagagaatcctgagaccactctaaaagcggccatatgaaaagatcctttaatctttgatctgaaagctcttcatcgaaagtccttaggtggcattttttccgaatacaccaaaataagcaaattggagccaagtgccaaactgttcttttcttcttatctggctccttcaagttgaattttatcacttattgatgcagtcattcatcttccttgcacaacaccaaacaacttaatccaattctctgccatctcatactcaatataggtgctctgacttgtcgtgcattatacataacacacatcattttacctgtaaagttgtgttgcttgcagtgga

SEQ ID NO: 10929 - DNA, 9719 bp, Vitis vinifera
  Intron number 8 from transcript GSVIVT01023325001 (locus G SVIVG01023325001) derived from phytozome v7.0 (chr-ID chr1 2; pos 19731348 to 19741066)
caactccagagaaagttgctaagtgagttgcaaatacaagctcttgcatcagtagtatttttgtgctcaattttccttgaatgtctgataaaaaattattgatcgaacatttttacattgtaatggcacattttctgatcagtattgctttgaggtcattaaaaaattaccaggaatagatgtgatcatcaataattaatacaaatcaattatgaattttgatatgcatgatcctaaaaataagttataattaattagataaaaaagtaaaaaaaaaaaaaaaaaacattttatagtaacatagtcatgtgtatagaagtagcttttggggagagtgtttctgaccctattcactcagcagctaatcaagcaaggagtaattgaaaaatagtttctgttgggcttttcaccaagctgtttatatgctttgtacagtatgtagaagccttttaaccgtacggacagggatgtgagtgttttgtgaaatttgtgtatgagatagaatagggagtttgtatcaagttctcctgtgctgtatatggttgttttttttcttcttttgccatgatgcagaaagatttttttctcaagatggtaaactttttgagatgtgacaggttatgcatgtaaaataggagtttaacaacatatattttgagtgttttggctgaaaatttgagaaatgagagctgttgagaaaacccaaaatgaaaaaattcaatgaagtattcactccccgtatatgttcctctggaaactgaaaagggttttgccctgttctcagaattgatttcttttagttatttaattgaactcctctagaactcaacagggatgattaagaatctaagggtggagttcaatctgtcttgcgaagttcagtcgttgcctgggtatgccgacagaaggttttgaagaggtaattttgtacctcttaaggaggatgaaggggagaattgatcgaaagggtaaggaaggggtgtctaggaagacgagtttaaaatcttcaaaatccagtggggaactcaagaagctggagtggactgtaagctataaaaaagctaaaatgggttctagcgtgggtatttttggaggggcttttggatcagggtgtaattgaagataagaattttatcatggaatgttagaggggttaatgatagagataaaaggaagatcattaagttagtcatcaaatcccaaagagtggacgtggtttgtttacaggaaactaaaattaaagaaatgactatggggcttgttcgtagtctaggggtgggaagacatctactctggagagcagtcaattcgaggggtgcaattggtggcattttggtgttttgggataacagattgggggagttggttgatttggaagaagaggttttctcaatttcgtgtcggttcaaaaattgtgtggacggtctatagtgtgggtgttcactggagtgtatgggccggtctgcagtagagatagagaggatttctgggaggaacttgggtcaataaaaggtttatggagtgacccatggtgtgtgggaggggatttcaatttggtaaggtttctagaggagcgtagtaggggaggagggcttactacttcaatgaggagattctcagaagttgtagaggatttggagttaagggattttcctttgatggggggcccgtttacatggagaggcggcttgaataactaggcctagtctaggcttgaccggtttttagtgttagacaaatgggatagccttttcaatggggctgtgcagggaaatcttcccaaaccagtctctgatcacttccccgtcctcctagaaggaggtttgaagaggggaccttctcctttcagatttgagaatatgtggttggaggagagtttcaaagataagatgaagacgtggtgggagagtttaaattttatagggacatccagctttatcttagatgcaaaattgagggccttaaaaaatattttgaagaattggaataaagaagagtttggtctcattgagactaaaaaaggtgaagctctcaggcaggttgtgtattgggatgaaaaagagaaatgttcagctttaaatctggaagagtgtgaagcaagaaaagaggcgagggagtcttataagtcttgggtgttgtggctgaaggagggggacaataataccggattttttcataggatgacaaatgctcacggtagaagaaactgattgtccaagttgaaagtgaaggttgttggcactcggaggagaataatttaaaaaacagtgtggtgggggcgtttcaaaagctgtattcagaagaaaaggggtggcttccttgtatcgacgagctgtcctttatggggttagttagcaatgaggctaaggggttggagattcctttttcggaagaagatgtgtttgcagctctatcagatctaggcaaggacaaagccctcgggtcggatgttttaccatggctttttggtttttttgttgggatgtggtgaaggttgagattatgggtttttttagagaatttcatgaaaggggcagatttgtaaagtctctaaatgccaccttcctagttttagtcccaaagatgggaggtgtagaagatttgaaagagttcaagccgattggccttgtgggaagtctttacaagtagttggccaaagtgttggcaaatagaatcaagaaggttatagggaaagtgattttggaacccttaaatgcctttgtggagggtagataaattctagatgcaattttgattgcaatgaggttgtggattctaggttgaaaagcaatcaagggggtgtgctatgcaagttggatatagagaagacctatgatcatgtcagttggaagttcttattggcagtgcttaaaaaaatgggctttggagagaggtggattaagtagatagagtggtgcatttctactgtgagattttctgttcttataaatggctctccctccgcttttttccaaagttcgaggggtttgagacaaggaaaccctctctccccttatctgtttgtgatagccattgaagtgtttagttgcttattgagaatgactattaatggggactttttatcaaggtggagggtgagaggccgaggaggtgaggggatattgatctcacacttgctgtttgtggatgacactctggtgttttgtgtctcatgatcagttgatgcatctaagctggcttctcatgtggtttgaggcttgctcaaggttgagagttaatttggagaagagcaagcttatcctgatggggagggtgcatgatatagaggatttggccttggagttgagttgtaaagtgggtggtctgccttcctgttatttgggtctacctttgggggcacccttcaaattagaggtggtttgggatggagttgaagagaggtttcgaaaaaggcttgcaatgtggaagagacaatatatatcaaaaggaggaagactcaccctaatccggagcactctctctagcatgcctatttacttcatggttctcttttatatgcccagaaaagtaaggttgaggtgggagaagattcaaagggattttctatggggtagaggagcttttgtgtagagaccacatcttgttcggtggaacttggtttgtttagaaagaaaaaaaggtggtttaggtgtgaaaaatttagctttgttgaataaagctctcttgagtaagtggaatttgcgctttgccattgaaagtgaggctttgtggaagtaagttatcagtcacaaatatggtgtacaggagggaggatggtgtactggggccgtaagcaggaggtatggtgtcaagctttggaaagcaattagaaaggagtggttgtgtatgaatagcagtttagcctaccgcgtgggttgtggtaagagagtgagattctagaaggacaagtggtgtggagatgagcctctttgtgagtcattcccttcattatttgccatctccttggctaaagacacttgggtagtggatgtttggaacccagacggtgtaggggatggttggacccctcttttttcaatggcgtttaatgattgggagattgagatggtggagcgttttatgcttaaaatccaagccttaagggtgcaaagggaggatgaggataaagtggtgcgaacaacatctaagagtggagctttcttagtcaagtcacttaattctattctggagcctagaggttcttctttgttcccttgtggcaatatttggagggcgaatgtgcctcctaaggtagcattctttgcttgagaggcttcctggggtaaaatcttaactttggaacaactctaaaggagggggtactctttgataaataggtgttttctatgcctttctgaagtagaaatggtggatcaccttttatttcattgtgtaaagacgcgggcattgtggaatcttcttttctccctttttggtgtggcttgggttctctctggttcagtaaaggaaactctcattgggtggcatgaaacatttgtggggaagacccgtaaaaaggcttggcaaatggcctccttatgtatattttggtcaatctggaagaaaagaaatttgttagcttttgggaatgaggagttttcgcttcaaagattgaaatattcttttgtatgtaatctttggtcttgggttagggtgtttatagttttgagcccttcttctattgttagcttttttgagtggctaggctctaagggtaggggttgttgtttatttcctcctctcttggtttcgagcctttgggttgcttttgtatactccttgtatacttagagggcactattttgatgttttctctttccgtttaatattattctctttatctatcaaaaaaaagaaaaagaatctatgttataatgtctcttcgataaaaagtttaagatctttagcccttcttttgctgaatttatcttgctcatcctgatgaaaggtcttgtatattagggcctaacagttcattctcctttaaatagtttttaagccctttctaaaattgaatctccttctttctttcctcaagggaagttcatttgaaaatccaaactcccctaaaaatttgggcctttgcttggttgatggctaatataaagataagaactaataatattctttagttaagagaccccacaaatccattaacttggatattatgttttgcatttaagaagtggggaatccattcaaggttcaaagtatcggtcgagtccggtgtggcttggttgtgttgtatccacctcaaagctttgcatgctgagtccgatgtctaatgccattttaagcatagattaggccaagaatcggttaaacttggttgacttggtcaagtttttaagttgactcggttgaattgtctgagttatcgaaatatttctagttaaacctagaaatcattttcccttctttcaaatcacaacaaatagcaaccaaatctaagaaatctccaaaaaattagagattttattcaaagagaagtttttcaagacccatcactctacccatgatgaagaagaagaaaaggaaagaagacatcctttgtgtcaatcatagttttctgcctccatgaaattcccatatgacatgatcacgtaaggaagtccttggtaagcataaatgatttttataaaacaagtacccttctaaaatttggaaatcaatacgtgttgcttttaaaccactcaaaagagaggaataaacatctccaaaatcaacatcattgtcatagcaatgctttaattcttcaaatccaattgtagtagctgacatgtttactaagagaagggtcttcccactaagggcatcaactattttattttcaattcttgcacaatgctttaaattgaaggtaaacagttgaagaaaactactccatgttgcatgtcgagagttaagcttcttttgagaattaagatatcgcaaggcttcatgatctaaatacaaaattccttgtaactgagataatgttgccaatgcctaattgcttgcaccactgcatagaattcaagatcatatgtggagtattttttctttgtcccattgagcttctcattaaagaaagccacaggatgtccctcttagttaagaactgctccaattcccacatgagaagcatcacaggccacctcaaatactttctcaaagcctagtaggataggaaggttcaccatcttggatttgatttcttcaaaggccttgtcagccgccttggtccaaataaataaaccaagtttcatgcattcagtaatcggggccataatagagctgaaattacaaataaatcgtcgatagaatgtagccattccatggaagctttgcacctcatggatatttgttggtactagccaatcaacaatagctttgatcttctccaaatttgtttcaatacccttagaagacacaacaaagcctagaaatacaacactagggctcatgaaagtacacattttcaaattattgtaaaatttttcagccttaagagtgcgcattatttgctttaagtgttcctcatgatcttcacaagatcgactatagataagaatatcatcaaaatagacaacaacaaattgtccaataaaaggcttcaatagttgcatcataacccacataaaggtacttggagcattggttagtccaaacgaaatgactaaccactcatacaatccatccttagttttgaaagatgtcttccattcatcccctggtctaatacgtatttgatgattctacttcttagattaatctttgagaagattactgatccgatcatcatatctagcatgtcatcaagtcttgtaattggaaatcgatacttgaatgtgattttgttgattgcgattttgttgattgcatggctatccacacacatccgccatgatccatcctttggtgttagtaggcaggaactctataaggacttaggctttcacgaataaagcctttagtaagtaattcattaacttgccttttcaattcatcatgttttgttggattcattttgtaggctggtaaatttggtaatgatgcaccgggaatcaaatcaatggcatgttgtatgtcacgcatagaaggaagttgattaggtaactctacaggccacaagtcagaaaagtcatcaagtattttacgtacgtttgttggatattccttatcttgctctttaaattcttccacttcccgagccattaaagcaaaaataactttagtttccatgctctccttttcaaattgacacatagtaagtgccttttttggttgtgcctcctctgacttcttaattggagggacttctttcattggatgaaggatcttcttatgttcgttgtgtatgagagcatatgtattttcatagccgtcacattgaactcttctatcaaaaagctaaggccttccaagtaaaatatgacttacttttatgggtaagacctcacaccatacatacttttcaaagtccttaccaaaaaggaatgttactaagcaataaaaacttatcgggatagaggtgtcattaacctatgctaccctgaatggatttggatgtctctctattttaaggtttagcttctcaacaagttcttgtgaagctatgttcaaactgctacctccatcaatgatcatggtgcataatctcccttgacaagaaatacgtgtttggaaaatgctagtatgtctccaatcttcttctccttttacctttgagacaactaataaaggtcgtattacaagactgtgtccttttgtcataccatcatagtagttacattcttcactaatttcatcttcattgtaggtctcttcttccttcaggtaattctccaattcagattctggtttttcaacacaaaagtataaacctttggttgggcacacaacaacataatgaccatgcccaccacacttaaagcataaatgagtcatgtctacttttctatctccaatactcattgaagttttacccttattaccattcttatgagccacattcgaagtctgttgagtgttgcccccaccattcacatgattagaagttttgaaacttgatgtgctgaaaggtttgtttgctgtcgtgttggagaaagtgctctcaatttgtgaacttggactcttggaaacccgaaatttgaggtcttcttctattttgagggctagttgataaacatcatctacggtataagtgtgtgcagctatcatctcaagttgaatctccattcgaagtctagctttgtagcgggctgcaagttgagcatcactttcccacacttgatttcgaatgctcaatttatggaattcttctgtatattcttcaatagacttgataccttgtttaagggaaaataattttgtatacataagttgttcataatcagttgggagaaattgctccttcatcttcaactccatcttgtcccatgtgtcaataggcggttggctagttctatgaacttgattctcaatattatgtcaccatagacgtgttgttcctttcaactttgccttcacaaaacaaatttttctattttcgagcattgcataccaatcaaagtaatcttccattgacataatccaatcaagaaaagctgttggatttagttttccataaaatttagcaacttcaagatgcaccttttttatcgcatcatcatctagctcaaaaagtttgacccttctttgattgcccatcataaaattgtcttgttcttcgcgtgaccggcttggcgattgtctaaattgatgacttgcaatttcctcttcaattggtcgtttttcttgactcttttctaataacttcatgatttcatcaagtttgctatttaggtttattatagcatcttgatgggattgttgtgtggctgaaatttcctccaagcgtattgtagcggcatcttgattgctagaagtttttttggaactcatgtttgcataagctactcctctccttaattgcatatgccttcaagccaagaactttggctttgataccaaaattgatgtaggacaaccctaggatggttgtctacactcaagggtaggtggactagggttttatttttagggtgtaaggagagaaacaaggaataaattttatggtagtgaaacttataagatgagaaatagagagaaagaagaaacaatgaaaaaaagatggaaaaccttagagtctcactaaagccttgtaggagtcttacctggaggaaaatcaatggagtcttaccattgagggttgtagccttgcaatgaaagaaaatataatattattaatatcaattcatccctttgatttacattgattagcctatttataggcttctttaagaaatccaaagtttattaagattttaattgtaattataacatccaaagtttactaagattctaataacctaccatgactcaaattctaattatattataactcaactaactaatcctaattagactctaagaaataccaatcctaattcaattctaattaatattaatcctacttaaagtttacttaggtcttcccattcctctttgaataaactttaaaaggctttcccccatcacgccactaacaatgatattgtattaacatgatcattatgtccgtaagcgaaacaacttgaatgcatgatcatgtaatatgctctcgcacagctgatatttcttcaataaatatttagtgctaaatttcttagaggcttattcatctgagtgcagaagtg

SEQ ID NO: 10930 - DNA, 3797 bp, Vitis vinifera
  Intron number 3 from transcript GSVIVT01021661001 (locus G SVIVG01021661001) derived from phytozome v7.0 (chr-ID chr1 0; pos 8887167 to 8890963 reverse strand)
gctggtgctggacctgtcttaggtgattggggaaggtatgtgcttaacacttgtatttttctttttcattttttttttcctgaaatgatatgaagctttggctattatgatattgaatgatctaaaggaagaactgaaaacaatggtgatgtcatgaacggttcttggtaagcatttaggcagccaataagtattgttatattaatgctactttatttgttgacatttgttaatatatttaaaatagtatctgcccaagccatactttttctgcaccaaaacgataaaataagtatgttgtcataattcatgccattacctaggttgatgtaacacataactggacattctattacaagggtattgctcaccaatccaaagatatgctatatatagagtcatgctaccttaagttggagttatagtacctttgcttttcaggccattggatgagaaaattaattgtgttacccaatcttttatttacatcagaaggtagtcacatttgggaggtaactagcaatgcttggagggtaactggtcacatttgtagaggtaacatcgttctattttgagaagtaacaaagtggatgtaccatacccatggatgtttggtagaaaaatcctatagtataactatgacgctatatctaaaacaaccttcaaacttctgataaatcctgagataacaatttattccaatgaaatagagaatggttggattctctgcaaccctataatgaagtcaacaagcttatgtgataaggggcgatgaggctttgaaagcatctctgctatatgatgatgacaaacaaaatacccaatggaagttgttatgcttggtctgctggctgttgtatgatactccggtccagcgatccaatgtcatgagaccttaccttttatttttccaggaagtaagaaagatgcagaagccagtagtgtcatgatgcttaacatctttggtccaatttgcattgggattggcatagagtttaagcaaagaagaggacatcaacaagggtgtggaaatatcatgaacaaatgaagtatgagatggccttttttgtgaggtgtgaggtgtgaggtgcaataccgaactatgactttgtgtaactctttctccaaaccatgcctgtctatcctttaggtcacttactgttgtcaaatgttgcaaagaacaaatgaagtgtgactagtcatatgacagttttgagattaccacctattcatctgactatgtttctcatagaatgtggtggactgataccatgccacttaaatatttgttctcattctctcatctaaatttctgaagagtttcccatctcacacaaggatgcaagtcaatagttgaagtgacatcacataaagcctaagaaacaaagaggctgcactgttctttgaccattgttttttattgtgcatgataaaataggcaactactttatagattcctttgtaagggcacatttttatggctgtgaaatatgtagacccacacatcatgttagcatggtaacattatactgtggggtatttagaggcagcatagcaggaaaatgtttcttatacaatgtgattgagtaatcatgtttctttatgaggtttgtttgtttggttgaggatgaggaaatttatcgtaaacatatttttcagttttttaaataatccctatgttataaaggatatggaacttgtactttccacaattttaaattgacaatcatatacaggtttctatttttttattgaatgtattctatgaaaacagtgcctagcagcaataaaaccacataatatataaatttgttcttttagattaggagcccactgatggaaaggcaagatacaccttcagttatctcagcagagagtgtcaatcattgtgaatagaaccaaaccagaaaaccactctcttctccccttccaattgagaaaaatacaaacaagattttcttttaaattttgcttcattttctgaagatttttatttttaagaagcaaggaattctaagaaatggtagatcatcttttcttacattatccattaactttgggttgtggcacaaactatttagattggctaatttggactaagttcctcctaggagtatatgtaacatgatgaccatctcatataaagaattgagaagctccattaggggcaaggttttgaggcaaaccccttgtctcgctttgatttgggttgtgtgacaggaaagaaatgttaagattttttaggataaggcaaggacttcaggggctctttgggatatcattcatttctttgcctccttttgggccttttgcaccacaacttttaagggcattccctttaatgtggttcaacttgattcatgtttagtgcgtagttcgaaaggtgtgcactagcaaggagggtttgcttgggaggaaatttttcttttttagagctatgatttgttttgtatattttcatgtggtaccttactgttgtataggtttacttagcactttggaggttcaacgtaccttctgtttagttctttgttttttgagaggtttcctcatccttcttttgtacttcttaatacctaacttaatttaatacattgttgtttctgatcagaataaataaataaatatcggaggaaaattttgttgcactaatttgaacaataatttatcatattttcttatctacatttggttgtaacctttgaattcaattctgtgcagtcaaaacaaatatagcccaagtttctaatatgatgaaaagtattctcatattatgccttgcaaccaaaaaaagaataaatagagagcctactcaattttacaaccacaggattttgttaaagaattattttgaacatcacacatatctgttggacacaaacacagaagctatggtccaagagtttccagaagaaattcaacaccttttattctttattcactggaaagattgcaacactaatcatacaatgctattatggtttgcaaaaacaaagttagagttggactcaaggaaattttatctatagcagtgttatggaacttggcataatttttaaactaatattttcagtcaaagtggcatgtgcattttgcatgcacaactagctagtgttctgaaattcaaggcgcatcatgcactagtcaatagaattattggcttcatagtacttagtgaattgttacattcttgggctgtgtttggaatgcagcttcgtagctgaattatactgagtcaaacacctatgataactatctcatattaaaatttttactaagttcatggatgatgcttttctttagtgtgattaagcattttgtgtattgaaatgattctacaagaaaatagtataaacgggctttttgtgaagttgaatggacccttgtggggttttaaaaaaaggtatttatgtaattccataataattttgcttccagttcctaaagtttgacacccttgaaataatgggctactgaaaattattataatgacaatcaaaagtcatttttccttgaaaataaccaatcaaacactatgttactttaatattccattgtccctatctataaatgaagtttagatttatttactttttttgttggaagttgtagatttcccattgattatatgtatgattttgcattccataaaagaaatgtcattatttgtctaatacattagatggatattagataagtataatgataattgaagtcagtcactttattttgttatctgaattgttcaagaaagaactggttctatgatgacatgattttgctcccttgcagtggct

SEQ ID NO: 10931 - DNA, 5260 bp, Vitis vinifera
  Intron number 2 from transcript GSVIVT01021591001 (locus G SVIVG01021591001) derived from phytozome v7.0 (chr-ID chr1 0; pos 7648468 to 7653727)
tacaactatacaattgttacaactcatatgggttggaagaatattcaataatctgccacccaatttgccaaaatttccaactggtatattttccaatattccccttcaagctaaggaataaatatttctcattcctagcttacctaagatggtttgaaactgccgagtaggaaactcctttgttagaatatcagccaactacacctctgtaggaatataaggagtacaaattagccaattttcaagtttctcttttataaaatgtcgatgcacttccacatgtttagtttgatcatgttgcactggattgtgtgtaatgtcgatggctgacttgttgtcacaatagagtttcataacttcttcccatttgattccaaggtcacttagtattatcttgatccaaagaagctcacagattctgtatgccatagccccaaattccatttctgcactagaacttgctactactgattgtttcttacttatccaagtcactaagtttcctcctaaaaatgtgcaataccctgatgttgatctttggtctattattgacctagataataccctccccttttgaaatgaatgccttggccaggtgaagactttaggtactttagcactctaaatactgctaccacgtgcacttcttgaggaacatgcataaattggcttaccacactcactgcataggctatgtcaggccttgtgtgaattaagtatatcaatttccccactaggcgttgatatctttctttgttcactggagtacttcattttccttcgtgtagcttatgagattgttttattggagtctttgctagtttgcagccactcattcttgtctcctttagtagatctagaatatattcctattgtgagattaggattccttcatttttatttttatttttatttttattttgataggaaatagcaaagagatatattgatagaaataagaagtacaaaagaaggatgaggaatccttccaccaacgaaaaaactaaacaacaagaataaaaaacaagaagctactatgtaaaaactatgaacaagctctcttggctagaccatcccgttggagctacacactgctagtcaatctagttgtaacacattaaagggaatgcccttaaaaaccatggaacaaaaaacccaaatagaagcaaggaagtgaatggaatcccatagattctctgaattcctagctttatcctcaaatatcctagcatttctttcccaccacacaacctaaattaaagtaatgcatccattttgccacaaaactatccctctcttggatataccaaaacctttataattgatggacatcatgtcggaaatgcttctcgggggaacctaatccatcttggctagctgaaataatttgtgccacaaccccatcgtcaaagaataatgtaggaaaagatgatctgctgattttccatacttcatacacaatttacaaatgtcaggactaagagctttgtagggtcttctcaattctagcaagtcattagtatttaccttcttgtatgccactaattagacaaaggaattgactttaaaagagacttgagaattccatacaaacttagtagtaaaaactggagataaaacggataggtggaacaaggctaggaaaaaagacttgactgtaaataaccctgaagaagataaagaccaggatctcacatctgaagccgatgtggataaatgcaaataatcaagagaacgcatgagacattctaaatcttctatctcagaatcggaaatgttacgacggaaattaaagttccaagagaagaggcgagcagaaccgagaattgaagatataagaatatttttattcgtgactactctaaatagtcttggatattagaatcccaaaggttggtctccccactacaagttttcccaaaagcgaattccttctccatctcctaccacaaaccgagtatacttggaaaaatcttgaaagacttgtgcaatagccttccaaggacaacgatgagattacgactccttcattagagtgtgaaacttcaattcctacaaagtatttgagctttcttaggtctttggtttcaaattccttagctagttgccttttcaatttctccatttctgcaaggttatttcctatcaagactatgtcatcaacatatacaataagggttgttaccttattcatttttttttgtttgaagaataaggtatgatctccttgactttagttgtatcccatactcttcattgcctttgtaaatcttccaaaccatactctaagcgactgtttaagtctataaagagctttcttaagcttgcatactttgcctttttcaaatttttcttccaaccccaatggcacttccatatagacttcctcttctaaatcttcatgtagaaaggcattcttgacatctagttgttgcaatggccaatcaagattagtagctaaggacaatagaatccgaatagtgttcatctttgctacaagtgcagaggtttcatggtaatcaattctttgagtttgagtgtacccttttgccactagtcttgctttatatctttctagtgtgccatcagccttaaacttcgtggtaaacactcatttgcaatccactttcttttttcctatgggaagatccacaacctcccatgtgttagtttttattagtgcactcatttcttccctcatttctttcctccaattgtcatttctaagtgcctcttggacaatttttggtgtctctatagaatttagtttcaagacaaaggcttggtaagaaggtgatagtttttcaagggaaacaaaatggctcaaggggtgttgagtacattgtcttttttctttccttagggcaataggcaaatcaagatcattaaggctaaggcaatccttgccctttttttgtgcatcaagatcaatagaattagtacctttttctggttgaatgactgggacatgtggagtttctggggccagttgcttcctccttgaatagaccttgagtggcacttgaagatcctccccctctgaactttgcatataggattcaaatctgggcaactcagggacaagttctggtacagtttctgaggcattctttggggcaattgcttgggcattttctgaagtaacagctatggaaaaatctggcatgactggtgcagtgtttgaggcattttctagggctgttttctttttttgtattttctggagtgactgctatggaaaaatctgatcccttaggttggacagttttggtggagttctctaggataggaagaataggtaggttaggaaagaattccttatcttctgcgaaaggctccccttgaagataaggattaggaaaaaaaaaaaggttgctttttcattgaaggatacatccatagtgacaaaaaaccttttagaagcggggtgatggcacttataacccttttttgtgggagaataaccaaaaaatatacatttaaggacgcatgggtcaaattcagttccttggagagcatagatatgtacaaaggccacacacccaaacatccttggggaaaggtggttaaaaccgtcaaaatttggaaaaaatctagaaagtgtttcaatagggttagaatagttaacaattcgagagggtagcctatttgtgaggtacgtagcagttaggatagtctctccccaaaatgactttggaacattcatttgaaaaatcaatgctctagtgatttccaaaagattcctatttttacgctcggttatcccattttgttggggaatatcattacaggaggaataatgaatgattccttatttttggagataaggtgtaaggtattgattaaagtactattttccattgtctaaccttagtactaggaccttactatcaaactgattttttagcatgttatgaaaaatggggaagattgtgctaaccttagatttttgtttcatgagataaacctaagtaaaccgaatgcaatcatcaacaaacaaaacaatccagcttaccctagaaatgctatgaactttagtaggtccccaaatacccgtatggatcaaactaaatggaacaaaacttttcttattacttaaaggaaaagacagacggtgatgtttagcatactcacaaacatcacaatggaagttttgaacatttagcttttcaaacatatcaagaaatatttttttcaacaataaaaaaagtggatgactaagacaaaaatgggataaccaaacttgttcttgcgctggagtatgatgttatgataaataggtatgaagagtaggacatgttttgcagcttgtgccactttcagctttaaggagaaacaaccccccttcttctctagcttgcccaatcattttccagcaaaaaggtcctgaaaagaacattcagattgtataaagttgattgaacaagttagctccttagtaatttgaggagtagacaacaaatttactgatagttttggaacatgtaaaacatttcttgatgttagagaagatgttaagaaaacatctccttgaccagccatagttactaagggtaccatcaacaattttgatttttgatttcccatgcatggaatgtaagtagaaaagacttttgaagaattggtcatatagtccgaagcccttaaatgaatgatccaagggttggaaaattgaattttaaaggcactcaaggagaaggaatacttacttgtttgagtaaaatgactgtgtctcccaagtttttccaactcggaaatgaatcttttaagtttgtcaatttcctccttgttgagctccatttcatggccaaagctttcttcctattgttttcctccatttccaacaacattggcttgtgatttatagccagaatgaacctctttacctccattctccctgaagaaatttaggggcttgtcatggagcttccatcatgtcttccttgtgtgcctattttctttgcaatagctgcaccataaagagtctttctcacttgttttcttatcttcgtttctactagagtttgcaacattagtcgcaacacttctgttgaatataatgtatttatagtgtacaatctttctttcctttcttaatataggtcacatatatggtagttagttcaacctagccttgtatatatatttctctattgtaagaagttaatcatatgaatgagaattaaggtttcctctctctctctttcaacaacttccttcattttcatttggatttgagatagctaaagcatatctatcc

SEQ ID NO: 10932 - DNA, 11226 bp, Vitis vinifera
  Intron number 1 from transcript GSVIVT01032016001 (locus G SVIVG01032016001) derived from phytozome v7.0 (chr-ID chr1 3; pos 23520201 to 23531426 reverse strand)
tacataagattgattcatctcgtaaagagttttcaaaataagtatataaatgcagtactctatgattaaattgctcgagtagaactgtgtatttgataggagaatccaatccatcaagatgaaactttccacactgccagctgcaccttgtggttcacaaagcttcacatgccctaaaactgtgtctgatctgttgctgtaagcaattgcgcagacaaagatattaaaacttgagatttcaatggtcccattagggtttatccaagatccgataagatgtcagtaggccacacaagtgttgactttctgcatgattttgaaattattactcaaacttgcaagatttttttttttctcctttttcaacatagatacttttactataattatttgagtggatatatctgaagtaagatttcatccatgaaaatttttggccattaaacaaaagaaattcttcaaatttcatccttttaataagttagttcttcgaggacaattatttttcatacatatatcttttgtccgtttcaataattgaaaaccaacaacagtggtgaggtacaagcccattcagccattctccattattaatgtctggtctgcactctgcagggccagaagagcataaatttatttggatctttttatctaccaccttttcctaattcatttctagatttgttcagttgcttttcgattatttccactttcttttggcctttttctggattcaaaagattttgaacacgtgaaaactgtcaagtactccatttcttggcgggagattttgagaaaaatatagtaactttaaacaaatacaattgaaagttatctttcgagcagacaacttcaattaaatctcgaagttttctttaaaaaatgcaatttaaagacaattatcaattgatgtcataaaaaatggttattttaaaaacccacaaccacatcaaaatttatatggcaacattttctatcatcaatgctatctaccctagttagatattaggttcttcggtgtatctttttttaagtatcaaacatgtaccaataactagatgatatatacatttttaagtctcattatttatattttagtctcgtttatttgtatatttatatctttatatcatttatttgtatttttatttaacggtcttgatctccccatacacatttaatagttcagatttaaagttttataggtagcattatggtatcttaacattttcttaagcattattggtaggcattattcaaagattggtagttgatcagtaatgtatgtgtatggagagatcaaagattggctctttaattttattcaaactataaagatgttacgtatgttttaagtaacacccatgtttcaaccactaattaactaatgatagaaattgatcaagaagttgtagtctgaataaattaaatgcgagtccaaaactttccaaatacaattaattaaataggactttcaatgatgtgacttgctgggcattatccaaagcaaactagaaatggacatggcatatacatagttatggaaagctagaattgggtcattaacatcaacttggaggacaagatgtcttgtttctagtggaactttaggatccggcatagtggtgtgccccactcaaggacaatccttgaaaagctaagcattaacttacactttgatcttgatattaacatcatagtattagggttacttttcttggtcatggtcatatgtattgacatcatatgtatttacttttcttggtcaaaggatcatcaaaaagcaagccaaaaggttaattaggaccctttctcaaatgggaccccaccattaacaggagtactaagataaaagctatgagtttagtggtgtaaaccctatattatccttctagttatggtctacgtaattgaagaaaaatctgatgtggaaaataaagtcttgtttgacatgaaaatagttttagaaaaacatgaaaataagtttgattaaaaaaaaaaatcagaaaactattttctattattaaaaatagataaaaagtgttagaaaatatatagttcttcagttatttttatttattttatgagagttgttttaaaaaataattatatagatatgaaaaatcattaaaaataaaaaattgcctttaaaatatagttaaaaatctatataaaaaaaaaaggttaaaagacatttcacattctcaaatatacttttattttacaaaacctaataaaatagttttcaaaaattgttttcaataattgctttcgagaatatttatcaaacaaagcatgacatttccaaatgaacaacatattaagatgacaatttcatgttattttggaattatcacaaatgtatggtcaaataattatgtataataaataaacgagaaggtaagtaaatattgaatcttacagatggttgatcgaggctagagtttggctctatgtccttaagacaaatttgtctcgcactcgtgcttacgatttgttgacaatcgtctcccaggatacaaccattactttcttgtgatagtaacactccaaatcacaagaaacaacaaatcacttgatgacttgaactcttttgaataccaagcacttggaagaaatgagaagaagtggagagaattaatgatggaatgaatgagaaatgccatggggagggggggcgctatttatagattttctggtgactcttagaagagatgtgtcttaaatacttgacacaagttgtgtccattaggaagagttgtgtctaattgaaacggtatgtcttgatttccattcacctataaatatcccaacaatcccccacatgaatggaaattgactttaaaaaggcaaatggaaaactaaataatcaagagagtacaaaattggaaagtgattgcatcaggataggtagtttgtggctttgaaccttccttaatgaaatactatcggatttactagctaattagtgaatgtgatgtcttgaactgtcaactagtaaatccaatagtatttcactatggaaggttcaaagccacaaactacctatcctaatgcaaccactttccaattttgtactctcttgattgtttagttttccgtttgccttttttaagtcaatttccattcatgtgggggattgttgggatatttataggtgaatggaaattaagacataccatttcaattagacacaactcttcctaatggacacaacttgtgtcaaaggatatgtcaagtatttaagacacgtctcttttaagagtcaccaaaaaacctataaatagcctccccctatggcatttcttctttgaatgaaatggtggcttagccatcttggcttccacacacacttcacatttatgtttaaaatcaatgctaaaagaaggcaacaaattcatgttaatcaaccttttttaaagttttattgttaacatgtcctaacctatcatgccacaaagtaaaagactcaatcaagtaaacaaaagtacttcctttattattattgaaatcacgcttaacagtcattacattcatcttaaataggccattggtcatataccccttgcccacatacatcccatttttcatgaatacaaatttgtcagacttgaaaactaacttgaacccatttttgctaagcatagaaccaaaaacaagattcttgaaaatatcaggcacatgtagcacatctatgagaataagttcttttccagaagtcatctttagcaccacttttccaattcccacaaccctagaagtcatctttagtttattaactgcgtaggctatgtatggacgcgtgcaattcatgacacacattaaactatctatgatacgagaatattccaattggtcaattgttggaccattatttttagctaaatgtagatttaaatctactggtgtcttaattggattatcatcatattggttaaaccgtttaagaattttctcaatgtaatgacattgagataatattagtccactagatgtcttggctatttttataactaagatcacatctgtgacacccatgtctttcatatcaaaataactggtcaacattttcttggtagctttaatgacatcattattgttaccaataattaacatatcatccacatataggcacacaatgacatactcactttgtgtattctttgtatatacacatttatcacattcattaattttaaaatcatttgacaacattactttgtcaaatttctcatgccattgttttggtgcttgttttaacccatatagggactttatcagcttacacaccttcttttcttgtccaggagcaacaaacccttcaggttgttccatatatatttcttcttctaactcgccatttaaaaaggttgtcttaacatccatttgatgaatttccaaattatgcaatgttgcaatagcaattaacactctaatagatgttattctcgtaactggtgaatatgtttcaaagaaatcaaggccttccagttgcttaaatcctttatctaccaatctagccttgtacttatctattgttccatcaggcttcctctttttcttgaagatccatttgcaacccaaaggtctatttcttggtggtaaatccaccaatttccatgtgtggttatgcatgatggattcaatttcactattgataacctctttccaaaatggggcttctggtgttgacattgcttctttgaatgtcttaggttcattatctaacatgtaagttagataatccgggccaaaaaaactgtcttcttggctctcttactgcgtcttggttcttcctcattttgatgattaccatttgcagtatcataagttctcttatttgaatttacttcttgcttttctttacaaggaaaaatattctcaaaagatggcgcattcctagactcaataattgtatcttcatgtatatcaggaatgccagacttatgtacaagaaaacgatatgcactactattgtttgcatatccaataaatatacaatcaatagttttaggcccaatcttaacttgtttaggttttggcactcctactttagccaaacacccccacactttcaaacatttgtaagagggtttgtgaccctttcataactcatatgaagttacatcctcattcttgtgtggtatcttgttaagaatgtagttttcagaaagaattgtttccccccataagttttggggtagactcgaacttatcaacatagcattcttaatttcctttaatgtacggttcttgcactcagcaacaccgttcaattaaggtgaataaggagcaatagtttggtggattattccatgttctgaacaaaattctctaaaaggagcttcatactctccacctctatcacttcttattgccttaatctttccactaagttgattttcaaccccattcttgtaatgttgaaacacatctaaggcctcctctttgcttcttagcaaatccacataatagtatcttgtactgatagaaaccatgatttacgcagcggaaacaaatcatgatgaaacaagcatggaggcaagccaaaaccaaatgtaaaagactgacctttttctctactgaaaacgcccacaatctcctacaatcttctgttgtttaccttatcaatttccggactatgatttctgagtgggcaaaaaaaaaaacaatcgctaaggttttgtcactctcttttctgtttctaatatacctctcttcgatgggaagaagatcgctttcttagaaactcttaagcgtataatttgcttccagaaaaaccgatataagcgtgactctctttcccttaaaatgctcattttaaataaattagattatctatttttaattaaataaaatttaattaaaaactaatctatcatttatttaaaacacataattcatgtatagtccaaataattaaggcacaacagggaccgcaggaataaaattaacaaggctactaattataataagaattcatacaggaccagtatattctcattataattaatcacaaattataccactaaaaattcatgattgaactccttattaatcttacaattccattacataataatttatgtttcccacgttaagattacagatgctatttacatcaaacaaattactgacaatttatttgagtaacaatagatcttcaagattgtcgcttaacttaattcatgtgtcggataaaaatccacctgcagggtttacactatgaaaccttataagcttacttaaagtgcatcatcaatctctatactgagacgtggattcaatcattatttaatacatcgcaaacataaagcgtctttgtccaactcatcgagtcctatcgctccaataaatgaaactcactctttaatgaatcaaaacacaagacattttatatttgctcatattaattaaatcatgattaaaaacataaatcttatttctaatgtcctagagaatatgttttaacagtcagtacaaaacattcattctctacttggtccagttagttatatataaaatatactaacacaattattattaaattatgccgaaagattaatttatctaatgcaaatctccaattaaatacaaagaaataattgtttatagaatgacatcataataacatactattaaattcacgcttatgcatggttaatagtatatctctatcaatctcccacttagacttataaccatgcatctgctactttaacccccattccttctacatgtctttcaaaagtcgtggacgataagctctttgtaaaaggatctgctaggttgttttccgatgcaatcttcatcaccaccacatcacccctttgaactatgtctcgtatcaagtgatacttacgctctatgtgttttgcccttttatggctccgtggctctttcgagtttgcaaccgccccgctattatcacaataaagtgtaataggcgattgaaccgaaggaaccacacctagatccaaaaggaagtttctaagccacacaacttccttggctgcctcagaggctgccacatatttagcttccatggtggagtcagcaacacaagtttgcttgatactcctccaactaatggctccacttcctaagacaaaaacatttcccgaggtagatttccgagagtcctgatcagattgaaaatctgaatctgtataccctatgggcacaagattttctgactggaaaactaacatataatctctggttctttttaagtacttgattatatgtttaactgcagtccaatgttctcttcccgggttaaactgaaatctgcttaccatgccaacagcaaaacagatatcgggtctagtacacaacatcgcatacatgagacttcctactgcagaagcataaggaactgccttcatgctttctatctcttcaggagtcttaggagactgatccttagatagaacgattccatgtctaaaaggaagaaaacccttatttgaaccctgcatgttgaaacgattgagaatagtatcaatataaagtgcctgggataagcctatcatcattttcttgcgatttcacataagcttgatcccaagaatatgagcagcttctcccaagtccttcatatcaaaacgctgagacaaccagtccttgaccgaagtcaacatacctatacaatttcctataagtagaatatcatccatgtatagtaccaaaaacaccaccttcttaccattccacttcttatacacgcaagactcatcatgacattgatcaaaaccaaaagtcttgatcgtctggtcaaaacaagtattccaagatctagatgtctgtttaaggccataaatggacctattcaatttgcatagcaaatgttcttgcccatttgttatgaaaccttctggttgcttcatatagatgcattcatcaagacttccatttaagaaagctatcttgacatccatttgccaaatttcataatcgaaataagctgtaatggataagagaattctaatagacttaagcatggctactggcgaaaaagtttcctcataatcgatcccttctttctgagtataccatttcgcaacaagcctagctttataagtttgcacttttccgtctatacctctctttttcttatagatctacttacatccaatgggtttcacccctttaggtggttctacaagttcccagacttgattagagtacatagactccatctcagatttcatagctacaagccacttatcagcatctttatcttgtagtgcatcgtcgtaacatactggttcggtattcacttcttcagggattctatcaaatgcttctcccaagagtgtatattgaaccggtggtcgtcttgttctcccactacgacgaagtactacaggttgttcagccacaccttcatcttgctgtggctgtaaggccggcaagtttatgactggtgggaccacatcctgtacttcatcaatatattcttcaaacggcacatgtactggtgcttcaacattttcttcatcaccaacaggcaatgaaatgtcagaagtttcaaatttcggtccactaacatttctcccactacgttgaggtaacggaatgtcagctccgaccatgaatggttcaggttcatgttctgatggaaaaattctagctggtatggtgtctcctctcaactcatttaaggctaattggcttttgggaatatggtttctaatatagttttcctcaagataatgtgcattggtgctaacaatgatctttttatatttaggactataaaataaaccacctttcgttcatctaggatatccaataaagaaacataattctgtttttgtttccaacttatctgttttccctttcaacacatgtgttggacaaccccacatccgaacatgtttcaggttgggcttacgtccagtccacaattctgtaggagtcttaggtactgacttagaaggaactaaattcagaatgtatgctgctgtctcaattgcatgtccccataatgaaattggcaaatctgaataactcatcattgatctaaccatttccataagtgtcctatttcttctttctgctacaccattctgttgtggcataccaggtgcagataactgtgaagtaatcccttgttctgataaaaaggtaatgaattccctagagatgtattctccaccatggtcagaccgtaatgtcttgatatattttccatgtcgctgctccatttctgccttgaatgctttgaatttctcaaaacactcagacttacggcacaataagtaaatatatccataccttgagtaatcatctgtgaatgtcacaaaatactcaaaaccacccctagcttggacactcattggaccacacaaatcagaatggattaattcaagaacatcgttggctctattaccctttaagggaaaaggtctcttagtcatttttccttctagacaggattcacacgttggtagtgcctccactttcaatgaactcaaaggtccatctttaaccaacaaagaaattctatctaaattaatatgaccaagtctcaaatgccaaagataagtatagctcaattcaataggacgctttcttttcaatggtgcgacaatatcaaagttatttacttcagaattagtaagttgcagttcaggtgtaactttaagaatatataaactatcaattaaagagccagaacatatcatttgttctctaaatttaataacgacagaatcatcataaaattcattaaaacaaacagaatatccgttcttactcaaactagaaattggaatcaaattccttctaatcgaaggaacatacaagacattctttaaaaacaatgttctattattcttaaaattcaaagcaatgtttcctacagctaaaactgcaacttcagagccatttcccagaaaaatgttcacttcccctttacttagctggcgtgtttcctgaaacccctgcaatgaattgcagacatgattagtggctcctaagtctacacaccattggtgtgtagtcaacaccgctaaacaagtttcaacaaccagtaaatgaaaaggagatgtaccttgttttttcttggctagccatgtcggacattgtagcttccagtgactaggttgcttgcagtgaaaacacttacctttcggctttttcacaacaccatttacaccattagcagcaccattgttgtttggcttaacatttttctttttcttaccctttttctggacagatgaaaaaactcgctcaatgttaagcacaacaggtgcagctccttgcttaataatagtctgagcagctaccagctcattcagcagtttagacaaagtaaaatccattttattcatgttatagttcaaacgaaactgctgaaaactgggaggcagagtgttcaagaccatctcaatctgagtagccttgtcaacttcagcacctagaacctccatgtcattcagaagactcatcatcttcaaaacatgagttcttacttgagttccttcctccattttagaagtcaggatctcccttagtgtgttctgccttgctgcactagtttggtctccaaacatctccttgagattttctaagatgtcataagctgtatccattttctgatgctgatgttgcaaaacatttgacatagatgccaaaatgtaacatcgcgccatctcatcagctttaacccatttctggtgagccttaatttgatcttgagtggcaccttcaccgggtttttcaagacacacttcactgagcacaaacttatattcttctgcagtaagcaaaatgtccaaatttcttttccaatcaacatagttaggaccctcaagcttcttttgggttaggatattggctaagggattgaaagatgtcattctgtcacaagattatgcataaaataaaattacagcaattcaataataatcaaaaactgaatttaaaccaagattgcataataacaataatgacagcaaaattcatatatgcatcataacatccatggacagtaatctcgatgggagaactaaactaaacatatgttatgcatataaaagcaacataagatcaacatgtaccactcgatgggagaaaacatgcctcttaaatataaatgtgaaattattacttctagtctatgtccctaattaatttactcagatagagagataaataaatatagacaatactagaagagttacagtgattacatcaaaacatatcatctgccga

SEQ ID NO: 10933 - DNA, 781 bp, Vitis vinifera
  Intron number 1 from transcript GSVIVT01026512001 (locus G SVIVG01026512001) derived from phytozome v7.0 (chr-ID chr4 ; pos 22435816 to 22436596 reverse strand)
ctctcgctaccggcggtgctgattacgacatcaaggtttcgcctcttttttccattttattggttcggattctgttgattttaagtctgagaattttgaatttcttgtacgttttatgggttcattgggttgattgttgttatctttccggctgaaaatatgggaatttttcaaattcgattagtagggattatatctgacaatggattagtttatatttgttaatggttatagtgggttaagttggatccagtttctgagaatgtagcgaggctccaatttgaagaaattgaaattcaaacagtttagattactttgatgtccatgtgtaaacatccatagttttgtaccattttttgaggtgtcatttgaaagtatattggatcttattatccattaatttcaaagaaacgataaagatttcatgtcctctataatagcatggtggatgtgtaagcctttactgccagctcaatgtttcaaatctaaaaatctgccagaagtccttgttttctgttctcataccaactggtatgctcgtttgctcgaggacctttagaattgtttgtgttttatggttttttgttcttttaagttcctcaaaatgttgttttctttctggctttaccttttttctgtactttttatcattccaagtttctggccaatattatttgtactaaaatgggtttttccatagcttccatctataaaagtattaattattgtgttggtacttctactgaataactgtgatttctctaaactcaaattttcagct

SEQ ID NO: 10934 - DNA, 1126 bp, Vitis vinifera
  Intron number 11 from transcript GSVIVT01015433001 (locus GSVIVG01015433001) derived from phytozome v7.0 (chr-ID chr 11; pos 3630043 to 3631168)
gttcccttacaggtgatcaattcttccagacatcctactatattgttaatttctagctagagctcaatgatcatttgagccattcctgttatctggttcgctgatatgctattagtttaaacacactatcctcgagcttccctgtatactaacaactaaaatgaaagagatttgcaaatatccattatattgcaatcttaaaattcagtggccatgtgtgtgcctgatcacttctttcctcttcatggatgaattcaaaagtgtgtcttcttgcttgtctgtgcaagttctatgagttgaaattaatgtaaactctaggtgcatttgaaaacccatggaaaaggaaattacttattctttcttggtttatagcatctatgtgtgtgtgtattaagttctatttaaaacaactgtaatgatattatttccatggtgactaaatgctccctaatcaatgcaaagaatctggcccctactacatcaaaagtttgtttaatactttcaattggaataacagcctctatgcataaaaacagttttattgtgttgtccattaattttatttagttttgcacgaattcaaaaggaaaattaaaattagggaattgtatcatgttaagagcaaaaagggttcatgatatgtgtttggcgaagaatggttaaggaggtgagagagctccttatatgaattgcataatgaaaatgaagtaggaaaatgatttttagacaacttactaattctttgaaggttagaaatcatgtgtatatttgaagaaacagggaccagaaactaacaaagttctaaaaaaggaaaaaaatagaaaagatctgtggactaacactaaatttcttggaaggggaggatgatgcagcatagtttactaagttgtttagcaatatttaaatattaagaatatttcaaatgaacataaatgacattttagctctctctctctctctctctctttccttttctatatatatgtcattacaaataaatgaattccatggacattgtaactcggattctgttggttgagaaacattttttgtcttcttagaatctttgtagttgtaagtatttctcacattgtccgtttaatttctgtttgaatgtaggtctgac

SEQ ID NO: 10935 - DNA, 5041 bp, Vitis vinifera
  Intron number 14 from transcript GSVIVT01036518001 (locus GSVIVG01036518001) derived from phytozome v7.0 (chr-ID chr 14; pos 22979944 to 22984984 reverse strand)
agctggcttggtgactgtgcaaaggtatgtgccactttataaaatatctgtttttaatgttgtaatattttagacagaaactgccatacatggaatatcaggatgctcatgcaaaatgaggttttggatttattttatacattgtgacgaagtcatagacatgatgatccattattaagtagggttatgttcaagcttcatttgtctcaattgagttcattttgcccttgtttgttaaatagcatgtgtaagtatatctaaaaattggatgaatcagatattgcttaacaaagtagaataaattacttaagagatcggtacccaaatctaaattctgtggaatacatgaaacaggtacaatcttaaacctaaaaggattttcaattaaaaaggatttaaaagtaaattaaagctgaatagcaaaagaagcttgtccattttggcttaaaggttgaatccatgcttgccatttgtggaacgccataatctacccttttccctaaaatcaaaatggattttgagctacaaatcatcatagtataattgttagagttatagcctatgccagtttgatatattttgtcagctccttgttacctaatagtttaagtttttaggttaaatctgtaaattaacatggaatcaaagttttgttttatgggaggttatgatttcaaacctcactgtttctttctttgccttaatcacccaacaagggctacttataaggtgcaatgctagagttgtagctcatagtagcttgaaatacatcattggcccaccattacctaatatagcttaaactttcaggtcaaattgatactaaattactattattttcaaaacacgaaataacttgaaaggatcattaaaaatctatagataaaacgataataaatataataaactttgttgttttgcaatgtaggaaagagcaggtagctttttttaaggtggattcgtttatgttttgacgttgtttttggtttgaatatcaacttggagaaaaagtgagttaatctagatcagaaatttggatggtattgaggggttggtcattgagttgggttgcagggtgggcaatctttccaaaaaggttttgggtttgcccttgggtaattagcatgaatcctcgtcaatgtggggcttagtagaggaaagattcaagagaatattagtttcatggaaatgttagtttttctatgacagaatacattaactgcacactttctagttttccttggtgtgtgtgtttgtcaacccttgtaattcctagaaaggtgaggagttggctggaaaggatttagagggcctttttttgggtatgagggctgctagagaagaagattcatttagcgaggtggtgatctaggacaaccctaggatggttgcctacaatcaaataggtggtctagggtttttatcttttaagttttaaggagaggaacaagggataaagtttatgatagcaaaataaaatcaaatatagagaaagcagatgggaagaagaagagatagaaaccttagagtctcactaaggccttttagaagtctcacctaaaaataattaatggaatcacaccattgagaactgcaacacttgcaaaaaaaaactaatattatttaatcaccaaccaatgctttggtttacatcaattagccttaattataggcttctctgtgaaattcaaattctactaggattgtaacaacctattatgactctaattttaattctcctataacctaattagctactccaataaatactaatcataatttaattccaactaatactaatgtccattctggtggtctatatgtggtgacaaatattttaagggttttggtatcttgaggctagggcctcttgacaaggctttttactgggaaaatgtttcttgagatttgccactgagagtaaaagtttatggagaaaggtgattgcaggaaagtaagggatttgagatggggctggtggactatggagggcaaagagacatatgggtcaagctatggaatggccatcaataaggatagggctagtttctcattaagaacaaggtttgccacaggtaatagccttcaggtcatattttggcatgattcttgacatggtggcagttctttaaatgatcgattccggagtctgttcactctggcggtcaatagggagagatgagtggcagaggggaattgttaaaaccatagatttagggggaacgatttggataaagagatgaatgcagtattctccttgttctagccttggcctccttctagtgttgaggataaattggttcagaaaattaccaaggactccttttccatcatatcctactacttgtctatggttcctggtgagctcaaaattttcctttctaagctgatttggaatgcaagtgtgtccagcaaaatgagtttcccctgcttttttttcggttttttttttttttgggcatgagaaatagaatgggagaaaattcagactatggagcaacttatgaggagagatgaagtttagttaagggtcggtgggttttttgttccttttggttttttttgttgtgaggtcttcgtcgcctcgtatactccctgtatactatgcggcgctttgccttttgctaatatatgtgtttacttatcgaaaaaaaaaagttaataggtgttgcctttacaatgagaaaagtaactcctctgttcagatcctcatccattgcaaataaaagtcttctctttttctggttcataattgttagccaagactcaaccattccctaattataatgctttgcttgcttaaggtgttcaccttattagaggcacacctcatctactttgtgtttcgctttttaacactttgttcttcaaattttttactatgtattaaaatttatataatttcattactttgttgctgaatgcttctttaaaatgtttggaatcttaaactttttgttacctggattcacagttggttaatattttataaaattgatatgcatactaagttgcatttcactttgcttgggaatgattgtgcttcaagtgtgccttgctcccattaaaactatggtctggttttcctgggtccttccccattcagttaaagatattttccttagttgacatgttgcttttatgggagccaagcgcaagcaaatatggaggctgattcctccaagtattttttgaactactaagaaagagaggaatgggagaacctttgtaagagagctgtgatcaagcttggagacaaagtatatgcttcttaagccttttgtttttgtggtcccatggtggttcaggttttctttttgaaaataaataaataaattttttttggacttcattgatagtatgtggatcagtacctaaaaaataaagtgtcctgattggcttgtttgggtgaggtttctttttgttttcaggtgcactgcttgaatggattgtgtgtacatggattggtgaaccttgaatttaacttatttgggataaacttgtgtatcagcaaaacctcagctgctgcaaaaccccaataatttccattctcaattttttctacttgtactggaaggatttgctagctacatagaattagcttagattttagtagtggtatttctgaagtgggttgctatgaacactccagtttgaccttttaagtccccttgaaccatcttcaaggacaaaaaagtaggacaatttactgaaaagaacttcgattctttgcactaacatttggatttgtgtgcttgagctctcctttgggttttgtctattttacgtatataatggcatcctaaaaattggaaagttggtgcttatcccctttatgttcttcaaggtgagatgtattgcttctaggattgagtgttcggtattggctgttttgggtattgatgtgtgtggtacatctgctgtggagagtagactctagcttattcctatgtcccttggttttgaatgcattaggagggtattgaaagctgttaaggttacaattgacggtctctggtaattatgtttcttgcactccttgtcagaatcatgggattatgtaaactacctaagtgatccaattgactaaaaatccagaactgaattgtctcaattaacaattttttcaatgatgctcaaacagtgggacatcttgacaattttggaacagagactgtcagtgagttattatgatgggcaaaaatacattgtaatatggtcttgttttcctctttccttaattttttctttgttaccacctataaatatttgtaatttaaaataaaagaataatgaaagtctattataaagccataattttatcatttgactctgcttcaccgttctacatgtttgttagatgttacaaaatattgtcaggatacagtttttggtggcagagtatacaccatcagcttatacttacaccacctatttgtgcatggtttttagtaatttaagtcatgtgttggacatgttgcttttattttgtcatcttttgaagtctcaacaatggcaccatgttatcgtaactttatcaaactcttctgaacaaaatatatgatgctaaatataaaatttgctgtaaattttcctatttctgtattgaagccttttagaaatcaaaagttgatattctcgactgttttttagctgaaaatgttttgtttgaatttcctcagataattgcctgattttgcatatacatgttatagactttcaagagatgcattagaaccttttacagagaaatcatcaattgataggtaaagaaaatgctgcatgaatgtttttaattactcatgcaaaattgcacttaaagagttaaagacgcccagtgcaaatacattagagtaacaaattgcaaggtagtcaaagtttgtgaggaaaacattatatcattggggatctctctctctctctctctctctctctctctctctctctccatgtgtgtgaattatgtatataattgttgttgactaatgactgtagagtttgaacatgaacagataattgcatcggaaaatcagcctgtgag

SEQ ID NO: 10936 - DNA, 5184 bp, Vitis vinifera
  Intron number 11 from transcript GSVIVT01025370001 (locus GSVIVG01025370001) derived from phytozome v7.0 (chr-ID chr 6; pos 1367429 to 1372612)
ggcttcttaccggggacaaacattagcaagaactggtatatatatttccttttcaatatatttttactttgatttcttctatagaattgttgcatgctcaatggtgtatgctgtttgttttttcatctggtaattttcttgcttgtatgtgtttcttatacttgatatcaattgtcttttcctaaggcatgcattagttgaataaagctaggttgttgtttgttgcaagccatgttattttcacaaattttacattatgtcattgtaagaagccaagagcttgccaattgatttgaagaaagcttatgaccatgagaattggggtcatccagaagactggcatttggaaaagatatgcagaagatggattttattttgtttctatattggttccctctcattgatattttaataagatattatttttgtattataacttataagtaaaataatgatctacaaggaggaagatagatccttgtattcctatcactaaagtaaatgaacatagggagcttggagtggggaaaaaaaacttcttggtagaaaaaaatagaagtaaaagaataagaaaaaaatatctgtattcctatcactaaagtagaggtggcgattggtccaccaaacttaagggtgtatgaaatcaccaacatggtcaacaagggtggtgcctgctattgtccagcctatcagctttgtaattttctgattatataacttctatagactacaacaatctaaaactacttccagatccaaaatcctctaaatttagccgccatatccttgtccctatcaggtcttatgccacccaagaaagaattttccatgcattccatctacaataagattcgaggcacttaagtctcttattatttttcagactagtaatgctagtatctttacttcagatgttctccactccatgattttgtataaggctctccaccccatttgacctagcttgccctgcaagcaaccatcttaagttaagcttaatatttcctataggcagaggtgtcttctcaaatataaattcggccgctactctatatgagaggcaaattggtttcctattcattgcaaataaaagctaagagaactcagaaaaccccctgctgatagacatcagaaggacttaacaaattaaccacctattgcttttggtcattaaagatcctgacattcctttccagccagataacctctaaggttgctaaaattaactttctactggaaagcccggcctctaggactgctaccaaacctttgaaaacagacagccataatgtagaaaaaaaatatatcttggaactatctacgctacctgcaataaaaaacactttctgcctttcttcaaagcaatggggctataggggaaaagatggtttgtggattctccatttgcaaggaatagaatagagctttcaagggtaatggcttctcacatctcgagttataatgcatcatttgtattaatttttctattagctacaaaccatataattgtacatgattttgggggaatttttgatttcctaaataagcttactttgggggacgaaagaattgaatgtcaacaattgataatgcttgcaatattttaaggaaaaaaaatgattgtggaatgcagctctgtcatgtcgtttgaagaatggcaaaatggggataaacattgtgcaagaacaatgcacagcctgaaacatcctcaaacatcgatgttaacatttctttgctaaggttgaagaaaagaagttatgagtggaaggataaaataaaataggaagacctcccaatctccaaaaggaacacaaataggggataaaggtggcttaagggctgatcatctcaacaaaggtccctaagaaattaactcaaggcacatctcatgcaacctatgttgcatgagttcaggtgcaagcatgtctatccgagtgttcgatccttcagacctacaaattttacagtacaaaaactaggttagatagtaatcaaaagcaaagatatctttgataagaactctcaaatttgttttcttttatcctgtttctttctttcttaattattcttaaacattctcaaagaagttcacttttttaaaaactatctttcttaaatataattatctcctaaggaagttggaaaaaaaaaaaaaaaagagaatccaaatgaaacaatcatatatgaatcaaggtaggtggatcccacaaggatgccacatccatatcattcatgtctatacaggtatgttggggggagttggagagtcctgttattatagctcacaacaaaaggaagatgacaaaaataaagaaaacaatgaaagggggcttaagggcttatcaccccaccttgcaataatgaaatgtggagaatcaagtgttaactttgagctatgggtttttaagggtattaatgcaaaactcctaataacaatattatgtctcattgaatgctatgaatactatagatactcttcatcacctggtgccataaggagtttcactacggaattcccacaatcattttctaatgaaaggtatattccttacatagatccccctcgaaacttaaaaattcttcttagactctggtgtactaagttgctccaattgcctcttaaaccctcattaaccatataacataggaagaaatttcccaaagttttcttgatcaccaatgctatcagattgaaagtttaaagatacatggcctataaaatttgcgcacatgtgaaacaagttaaagtaattctaccccctaaaacaagtaagccttttccattctcattgatttggctggtacaagtagctttctcagtggcactagggatcgttagaaggatacttcttttttatttcctttttattattgttggcagtgattttgcagacatttggacattggagggagaggagttggaactaagatgcctccccctagctggtggcccttcatgtggggtggcagcttaaataatcattgtgcctctaggttggatctttttcttgtttaagaagaaatgggagaatcattttagtggtctgacctagagcattctgccaagaccagtatctaatcacgtgcctattttgctagatggaggagggatagggtggggaacacttaataaaaaaattggtgggagagttacaatgttagccatgccctagcagccaaactcaaagccttaaaagaggatcttaaagtttggagcaaagaggtttttagaaatgtcactgcgaatagaaagttggctttgaatcagataagcttttgggatgagaaggaaagtgaaggtattctttcaattgaggaaagagaggctacaatggagccttctttgggaggctgcatgagtggaccattaggagggtcgtggaagataatttggtttggctgaacataaagagcaattctatagttaagtttttctactcctatttatcaaatggaagggcagagttgtttccttttggcactgtttggaattcttgggtactgttgaggattagtttttttgaatcaaaagcaatgtggggtagtattcttactttggaccaactcaaaaaagaaaggttggaggatcccaaatagatgctacatgtgcaaagaagtagtaacctctaacaacatccttcttcactgctcaaaagcagctattttggggcagctgatctatatgccccttttggtgttcaaaggatgatgcattctttggtgagaggtacgcttttgagatggcatgggtcttttgtcaaaaagaaaaaaaaaggcttggaaagctgcttctttatgcttagtttggacattatggaggaagtgaaataggagagcattcgagaatattgaggactttgtggagtgattaggctttgagcctttgagtaaggcatggttgctgttttttgcgttcccctcaccttgttttttggcctttttggtgtctttgtatatatcatgactacttttatgtgcttctttaggtgttgttaatacaattgatattttacccaaagagaaaaaaaattgcaatcttggaagctggttttttcttttctgagaatgctatgtgggtattcaactaatgcaaaggcagtttgagatgcagttgttttagagagtagaatggctgagtgggtgggaaatagtgtatctaccaagttggggtcggcatcttatgggcatgtttttcggacctttgtttaaggaaatatcaatttgaatgcgctttttcagagaatagaaaacaacgctaatcagctggaaaataattatctgccaagctgagacaggttgattttgatttggtatgaaatgtcaaacctgcttctttattttacattgttgattggggagtgccctcctaaaagagttggggctttttagatcactatccataaaaatcaagctattgcatggaggtttttattgagatctgtgatgtggatgagagaatttgttaaggaaggcaattgtgttgatgtatgggtctgacagaggagagttgtggtctaatgatataagaggatgtcatggtcctaggctttgtaaaatttgttgatgggtgtggggttgaaggttggtttcaattttaatttgtatggtatagggacttgacttcatggaggatgtcaaaaatgtgtatggtgttatgggtggtatgggatactcatgtggcttacttgggagggtgagaagctatacatattgggatccaaaattagtttaaattttaatttgttgttatctttttatgtgaaatggagaaatcattaatcttataagtgaaagaatgaactaccttttgaagtgctgaaaaacaagagtagaagtgaaagggcctgtaaaataaccaaaagactaaggcccaagtaaaatctgattagaatctcagaagaatatacacctgaggaaagcttcaaaacaggacctgacaataatttttgaaagatttgttttgggaatagatcactcttctttgaattgttttagtcttgtacttttctttaaggtcattattggcctgtattcgtattcatgtgttctttgttttcttcctttctctctccctgggttgctgctatatagtagtatattagcaaatgtgtaagcaggcatatctctatgctttaattatttatctgctttatcaataatttggtgagattggcagttcgtgga

SEQ ID NO: 10937 - DNA, 6479 bp, Vitis vinifera
  Intron number 1 from transcript GSVIVT01031413001 (locus G SVIVG01031413001) derived from phytozome v7.0 (chr-ID chr6 ; pos 18877128 to 18883606)
ttgggaacgtccgtacgcgtttcaagaacgaaaaggttagggtttccaatttctctttttctgtgctatttctcatctctctcggtttttctttcttttttcttttttcgttggtgtctctctttttctgttgtttcggttcttgttcgttgatgtgttaaaactgttttgatctagagattaagagttagaattgcaattgtgggggaatggaattggataagttttctctttggttgatgtgaaaatgaggaaaaagtaaatgaaacaaaatgtcattctggattttgctttatatttgttggcttctgaaaatggaagctgaacttaattctgcctaggagggttggttgtgtgaaatttatttacacattcctagaatctaagccaagcaccaagggagttatatcacaattacattgtttaggttggtgctgcatgagaatcctgaagttgtgtggtaactttcgggtttagcaccaagggctcttctacggacgggatggtctcatgagaaacttggatttagttaaagatatgaatgcaaaaagtattgaaaagaagattttgatactccaggggaagaatgctatcggggtaaattggattaattagggcctctagctatcattttcatgggcacagtctttccattagacaacacagacggccaccagacagatttctttgtggttggatcttttgatatgatggtaacagaacaattttaagttgtacagccctgcagcttttcataatgtacgttagctccttttagaaactgactaaacttggaaccttatcatggattttttagttccgtggggtattatatgcattggatgtctcaatctaatctaagctaggaaaaatcatgctttgcatttctttgcctaagataataactgttgcttcaccatggttcctttgtgctctattatccatacctttttaactattccctacctttagaaactggagctaggcttagctctacgtggctctaaattcaagctaggttaaacatgacatgctccttgaatgaacagctcagtgagagatcttgtctgcagaagatcttaatatactatttatgtgtgacaggcatgtgtatgtgtgtttctgttgagtattttttctaatcacaattatttatatacaaaatatcagaaatataataagtttgatagtgtatcagaaaatcttggtcatattatattttgataactaggaatctattatgaaatctttaatgttgcagtcacaaccttttatttgcttggaagtatttgtaaacaaagattgccaagggtgtcttagaaaataacacaatgaatttagtggaagagggtgtttcttcataaggaggtggtttctgtgattctttacccaaacaatggctttatagtaaattgtgacacaaacctttcagtccagcattttcacaataaagagtgttcatcctttaatgttgttgccttttggagccaaaggtcattgttatctagttttgttttctttgtttctttaactggtgtacatagagtgtggaaagtggcaacttaggaaaagtaaaaaagtttactaattgttgtaactacaaggcctggacattataaacaggatggaatctttatcagccacagtcagtttcttttgtagcaatttctgttttatgaaccaaaattagttgctaagttggcttttaacaatgcttttttgtttttcagcatacaagtctattcttaggtcttcttttataaattttggctgaaaaatgtaatgctaatgcccttatctacgtggaaattggagaggcaaattcgtattttatgatttcagataaagaatcttcagagaaagaaggtagagtttaaccctatagtcaatcagaatgttcatcagaccaagattcattttttgaaattagaaataccaaattttagtcgagaggagcaaacagaggacattcttgatttattaaatgaagttgagtgaacctttgagtttcttgatctgatggcaacaagttcacatggaaagaatcctatctggtaaggaacgagtttaaactggttgaagatgcaaagtctgatttggaaccaatttcttctgctcctgctaaattgcaaaggaatgttattttagcaaaaccaatcccttaaaacatgaaatcattccatttgagggcaaaccaatgtcttctacaggttgcagactggagtatagtgtatgaatcttaaatttaaatcatttctgttatttgataaggttaaggaaaaagcagacacctgttgaagttacaatcaatgctggacattagcaaattctgtatgattgacaatgaaggttgatgtataatgaattgagcctagcaatcatcaagccaagttggtggaggccgatacggtaagatattgatcactggttgtgagatgctacactgaaatctggtgcagcactatttttaaagggagctgccattccatacaggttacaatatgttatactgaaatctggagtaggcactaactatttttaaaggagttgccattccattttattggaaacaaaataatctactatgaatatggtaaagagagcacaaatcctctggttgttgaagaactgctgacaacttcttgttgaagaagttgaaaataatgattaataagagtgataccatgaggcacagcgtgatcacagactgctggattttagtggaaatgaggccacattttaagaatgagatcttccaatctagtagcagcatgtacaaaaaaagctacggaagcaaattggctatgcaatatttagaacaaggtgctcattttaagggtgactttgcagtgtcattgttgattggggaggttgtgagaatcttaaagagatggtgactgagctgaatcatgaagtccagatggatgcaaatccacattaaatagtctggtttgaaaagaaggcaaagtaatgttccttttctactgagaaaaaaatattcagacaaagttctatatgatgtggtggacaaagaagcttgccacctgctactgggtatgtagtaggagattacagttccataaaagtattgtccaccttatggacaagactctataatgatagatttaaggtggtacttgcttcatgaaatatgatgaatttccctaatctgaggagagaggcaagctgattgactgcctcgctttttagatttgaggctaatggaacaaaatatgtgatgttttttaaggaaacaaaaaaagagaaaccagttattcctcctgaattggaaactctgtggaaagaatgtgaagaagtaatatatatgctaatttggttagattgtctcctaatttgggttagaggagtgaggagaaggagggtggtgttcgagaggagtaaggggaggctacggtgtgggggtgtggaaagccattagaaaagaaatggagggcatttgttgtagatcccactttattgtaaggaatgggagaaaggtcaagttttggaaggacttatggtgtgaggaccaaacgttgaaagagaccttccttaatttatttctgttggtggttaataaggatgagtgggtgttagatgcttgggaggaggtgggcagcgggaatcctcacttttcaagacattttaatgattgggagatggaagaggtggagggcttgttccagaaactgcaacctttggtcatgaaaagagatgtggaggatgtctagagccggaaagaaagtaagaatgacattttctcagttagatccctctaccactccttcacaagggcctctagtgatccttttccttagagtattatttgaaggtcttgggctccgatgagggtgagctttttttcttgggaagcgtcttggaacaaaattttgaccattgatcagctcaaaagaaggggatgggatacgccgaataggtgctgcttgtgtaaagagaaagaggaaactagtgaccatttgatcctattttgcaagaaggctacaatgttatggagtttgatattctctctttttggtgtgcagtggatcttgcacaccaagattaaaaggaacttgcttggttggcacaatgtctttgtgggcaagagtagggagaaggcatggagggctagtcccctttgcttaatgtgggctttatggagggaaccaaatgaaagagtgttcaatgatattgaacggtccgaccaagctgtaaaacatttttttttttgtacttttgtgaattgggttagagtgtatttagaggatgatactttgtccatgattgattttgtagagtgactgtttgtctagttaggggaaagattttttgtctttctttttgcctagtttcttgggcaatgtttgtatactttgtgtgtacttgttttcgtcgcttctaggcatttctaatacaagttcttatttacctatcaataaaaaaaaccctggccattctgatttaataccgggaactagtctactgaagtttcccaattatcaaataggcttgaagcagcatgaagagctctgaaataaaatggatttgaaagggatatgtcaattggatgcaaaatggatttatcagggaatgcaagagtccaaatgctgttccactcctcttgaccgtcaaggaggacagtgaagttatcaataaagtaaccatagtgtcactttctggtaccacattttgacaatattttgcatgggtgagaatcatatattggtgttggcgccaattgggtcaatcctctatttttaagaacaagtagaagatatatatatatatatatatattcaattttatggtacctagtaaagagttcttgctaattagtatcacggatgttcaagtccttataaattggattaagtagagcgaccaaagattattcagcaggaacatgaagcttatttgagtagaagttggttagttgtagggtcttagccaaagacattttgtttggaaagattacagagaggtgtagaagcttcttggaatggattaaatttggagcaaggtgtttgttctcacttttggaagggatggaggtctgtaattgagaagagaccctgaaaattttcggaaaggtttggataaagagaaagggagaagctgcaagctggtgctccgaagcaatggtgttagaagattccttttatgctccatgtgcttagtggaggcaaagagattctccctgatgtttccagaaggaaagggagtgtttggggggtgggttgtgctggccagaaagctaagtagccttggagtggtgcctccccttggattagctgaggagcccaaagttggtagatctcctattcggaggtgtgaattcaagagtcttaggagggagtttcttttgtggatgtggtgaaaaaagaccaaaggagagggggagaagctctgtggcctcggtttggaggttggactgttttaacaaaatgcaggctcctagtcattgtctagtggggcgatggagagatttctcaaatgaggccccttttttgctgtccttgaggcatgggctgggtatcattagaggttgaaagggaacttccagttagccttgatgggagcttatctcatctgtttgagtttgagtcaagctctgaggcaaagtgggtcttacaagaagggttgagagcattcaagaagaggctgacgttgaataagtgggtcctagaggttggtcactatagagaaggagttcatgcaaaggaatcttaggagaagattttctatgagatgaggtggtttttttgagcaactgggtgattcctgtgagggttttgtggaggtggacaaaggcactacattttgtcaaaatttgtagtgggctagggtattgattaaaattgatggaagaaaggtgttgagaagtttgcaagttgtgatggggcagctatgttgtgccattcaacttctgtgggagatcctgccatcgtcatcataggtggtgttgagctacattaggaaggagtttgaggttgggacagacttggaaggggactcacacgctgttgtgagagtggggtttatgggtttgcaatagcaaaaaggggaagagttatgttgttctcaattggatgatcttttgttcttttcaaatgccaaacaaggaaatatctaaggtgcaaatttcatttactttccaccttttatcagcaaccaagttgatcattagtgattgtccaattaattcatactttgaaggaactaaaattgagtgtaaaactctatatgcttgtagtaaattttcagtttccttttttaaaacaggtcttcattggaagtatatattattgtccaggtttattatgttagttcttttgtttgcctcccctgataacattgtgcaaattggcattattaacccatgttgatgtgcaggctgtctaattttttttatttatttcttcttctgtatcttcctttaacccaaaatttgatggtcctttgacagggtttgacaccat

SEQ ID NO: 10938 - DNA, 6816 bp, Vitis vinifera
  Intron number 4 from transcript GSVIVT01008394001 (locus G SVIVG01008394001) derived from phytozome v7.0 (chr-ID chr1 7; pos 2545935 to 2552750)
acactgcacggggtggtggaagctctcatctacttgtaagagttactgtcttttccatgtttatgccaaagaacatatctcccacgcatctgttgaccatcagacttggtgttttctacaatataattgtgtatcttggatgcaagtgcacacatgctatgatttccacggcaggtttctctatcctataagttttatgctgatgaatggttaaggattccttaattttaatttcaatactcttattattaattgtaatagtaatagtactagtggtagtaggagcaagtctatatctttcataagaataagtagtagtagttgtaatagtactagtgctagtagtagcaagtctatatctttaataagaataagtatagtattatacatataaagaaagattctatgaagagggatgaaagattgagggaattacgtctaagggaggggataacggtttttatcataaaatggccaatgcatgcagaagaagaaactttctggccagagtaggaataaatggagtttggttttccaatgtggtggatgttaaggaggggctgactagagtttttcaaagactttatctgaagcaagggattggaggcctagtatcattggtttgagctttgtggtgtcgaggatcaaggatgctaggagcttcaatgacaaattctcctaagaacaataaacacaagaaacaatgcgactgctactaagtaataacaagttaatgttaatcaatgagccttggtgacaaacatccaaagagccttgaggtaacatagggtcttccaagaatctcccaccattatcttcctatccatgaataatccgtcatttctctcaagccatgatggctaccctccacaaggctaatattgaactcataactcataagaggaaacatagtgtctatgttatcatgcttaccaagcaatcgatcaaaatatgaagaattcgttggattatggaatgtggcatacaaagcattgatagttacggaaaagagcattggccaagtccatacattagagttccaatatttctagtcatagttgttaatggtgtctcacctcttagtttggtaaagaggcatgtgcttgccactaacaattatatatttgaagatttttatatttgtttaatcttgtttatgtagtttaaactaatatgggataaggaagcgttggtaaagtagtttggaatggtctagtttataatggttagaatttaacatcaagtgatggagttatgtggaaagttgtagagttgtttagaaggttgggaataataggagttcatagagttctatggaatagtttagatttctaatttcatcaaggatgtgagaacattctaagatttagtcttagccatatgatttagagtatgcattgttgcattcttgagtattgtcagacattatgctttggtaagtcatatgttaatttttgtactcttgtgtgtttgggtatgggctttggcttcaatttacttgagggtgagcaatgatgtcagttagcttgaattcttgtgtgccaagcaaggttgagtaataatgaggtgttcttgggtggttgactttcttgaaggtggtatacgcttatttggcaaaatgcttagcaaggttgttgaaaggttgttttttcttctcctctcccttaatcacctttgtagcattttcttttccttttttctttcttttttcccaatggaaaggctaacattaatgagaaaaaagagagaagcaaggccctataccaacaaggtatacacatacacaatcacactcataactcaagggatggccatttggcatctatgaagtgcaaaaaaatgaagccttcaaaacttctaaaattgctatccacaataacaaaaatctcaacaatagttcatttagtttgcaagagtaaaagttcttatctttaaaattcgtctatcctgcttctccgaaatgcaatacaaggcataaaagaggttgctttccaacatcattattcttttttcttataaccatgaaccaaattagttgaccatcttccatctatgtgggaaatccattattggatttaatatatcaaaacaaccacaaagagtggaaattagaagactaaatctcattaattggccaaaacagattgaactctttccatctagccaatcttgtcaagcaagtatagtgagaatgttctttcccaaagcagaagtagtcttaggtctttggataaggtgtacttcgggagaaattacacacatgtcatcatagttttagatgctttgtaggagttgattaattgggtgtggagtttcttaaaggtggtatgaggattgtaagatggaatatttgtgatttaggatctagagagaaaagaagggtggttaaggaattttttcaccatgaatttgcatgtattgtaatgtttcaagaaatgaagcaagagacatgtgacaaaaggtttgtgggtagtgtgtggacagctaggaatacagaatgggctgctttttcggcttgttgggcaccagggggtgtgtttaaacatcataaggagaatttgggagaagatgggtggttctagatttaccactagcatgacaagcttcgtagatttcattagagaaagtgatttaagtcaatcctcctcttagaaatgcttcttttacttggtctagtttgcaagaaccccttgtttgtaagagattggatggatctctattttcaaatgagtgggagcaaagttccccattgtctctatgacaccttacctagactaacctctgatcattgccccattgtcttagctattaatccttttatgtgggatctaactcctttaagtttgacaacttgtagttgttacgcccggagttcaagaaatatttagcctatggtggagtgagttttagggggaaggttaaaagttcatgaaaagattgcgatatgtcaaatcaaacttgaaaaaatggaataaatttttttcaaagtcttgaagaagaggaaaaataatagaagaaggtaattccaaatccaagagttttgaaggattagattagtctcctattttagtagagaacattaattggttagatggcccctttactaaagaggaagttaacaaagttgtatttcaattatataaagataaggcaccaggtcctagtggtttttctatagttgtgtttcaggagtgttgggatatgattaaggaggatccattaagagtgttcatggagttttacagtagttgggtaataaaccaaagcaccaatgctaccttcgtagcctttatgccaaaaaggagttagactaacaaaattttagacttgaagcctagtagcttgctacaagtttgtataagagtttttgtggagtcctccatgaaattgattatttttcctagggagcttttgttaaggggtgacaaattctagatgtagtattgatagcaaacgaaatagtggatgaaaatagaagatcaagagagaagggagtgaattttaagattgattttgaaagggcttatgatagagtgagagaaagttgtgtggtgggtgcatggaaggcaattagaaaagaatgggaatttgtcaaggtcaaattttctaacttactatccattacataggattatagttgttaaaatcttaccataatctatattatacatttttttgtaaatcttctcatcttaagtgtattttatgatacataataagatatatgatacaacaatacaagcatttttaatcatatttcatagtttccaagaaaaatgaaatttatttgtcttaaaatcgaattattatattaatttttaaaaatacacgaaaggttagaaattgatcataaattgcatggagaaagacaaaataataatcctacgtgaaaaagcttgttaaagacacacatgaaatgttgaaagttatgaacatctattattgcaatgttcactatggaattgttatttgaattatttgaatgttaacattgaaaatagtggtgaataaaaaattttccttaatactttagtttttcatttttttttcatgggagatgacaaacacggaagttggaacttcaggaacaacacataaaagacatatatatcaataactcatattaacacatgcagactaaaaatcatagctaataattgaaatctttatttttgtagattttgtggtgaactttgcattaaactcatattttgttaaattgaacttttcaataactctagtattcaattgtatgacataatttaactctctaaatcctaccgtctttcataaaacaggttatattactcaatgcttcttacttcaaataaatacatggtactatccaatatataaagatagaagaatgatacatgatattatttatgagttaacaattatgcttgggttgcattacctccatcagaaaggtgattcatttgcattggcgtgagagtccaactatattgcgtcatcagaatccggtctatatttgaaagagaagatgttaatcttttaatctgtaaccaaaatgtttgcatgatttgtgtttttgtccttatatttcagaatgctggtttattatatggctgttatcaattattgagaccttttcccaagccattgcaccaattcccctgtttttgggatttgtgctcatcaaccatagctggtaaaggaattatgcaaaacaatctcacatgctaaaaaatgatttcctagcaaaggtttagctcctatagcaatgctaatcatgcattgcattgttaacttgcacaagttggtctctttcagctgcattcatgaagttggtaaatcttctttgctattctagataactgtgtaatggagttcataatagccaattggcttaccttgattggaccttcttgtatattccgagtagtgctcttttgaaattccaagttagttatgcaatagatgggttctatgaatgatgatggaacagaaaattaagaaagaatccattttagttttagtattggaaagatgacggtaatatgcatgccaataattagtgattgacctggatgggcctgatctggttttacttttaatcaggcttcaatctgtggatccaaatttcttcaggcaaaggggtagttatagaaccttggacccaggaactaactgaaattggttagctgggaacattcattgatatgatataggtgaatgcattgaccaataattttgcatgtaattgatggtgaaagtttgtagatctagtttagataacacttagaaggggatgaataagtgtttaaacctttcaagcccaaaagttgattatattcaattatttaactattaatttaggcaagcctaaagaacaatcaacacgagagagagaagtttttttatgtggaaaaccactcacacaacggatgtaaaaaccacagggttagaaacctctaatcacaaatccactattcaaaagtacaatacacagttttatctactggaagccatccctatgtcttactccttagcacctacattgcacttcatgtccacaatgtagcaccacatgtgctcctagtggatcttaccacaatggctgagaggatgcagatctccttttcaacacaaagaatgtgaagacaaatgtcctgagagtttggagctcggagaaggctaattaggtttttccaatatttacatcaaaccaaaatcctttttaggcaaggtatttataggatacaaatacctagtgaactcaaattaggattttcaaaataaatccaactacaattgtaaataaattcaattataattataaaattaaatctaactacaattgtaaatataatctagttacaattgtaaacttaatccaattgcactaaattggaattctgccatgggcgtttgagcacccttaaaagtttttaaaatcatttttgaaacatttttgttcaatttaaaaaaccttcaatctacttatcaaaaaaaaatttaaaaaaccttcaatccactacaaacctcatgtaaattctattagcctttgtcggacatttctatgcttacttgtgacatttcggtcgatcatgcaacaaccttgagtctttaattgaaagtaagacacacaatctaaagaagtcctacgccaaaatgaatggaacaaaattgctaacttaaatcatgtagtctaatgtaccaatagatgtaaattatatgatctaatgtatcaacagatggctaatttgactttctagtccaataaaaacccaaagtttcttgaatcttaattacatgtggtttcatttctgcttcaaattagaatataatgagaatagcaggagatgcctcttgtaggtatctggtttacaatagagaacaatgaaatcaaaccatttgaattactctagcagacatgacccaagcagaatgaccccaaagcaagggaagaagaatcataattttacttattcaaagcaaacaagaaatcaaaacaatatgtttgcttctccctctgtcatcagtggcataaatctcatgtattctcattgcattcttggttgattaatcttctatggattgccacacatgtttgcatgttgtaattgtgtaaaagatttctaattaagccatatgagcatgcctcagtattttgataaatgggtgttgttgatgaatcagcattagaattatatccctgcagtgttactattgtatgttgccaatattttcttgttgacatccttctctcggacattaaatttttgttgcatatctggaagtagtcattttgataccaattttttcaggaggaagctgatcccattgataggc

SEQ ID NO: 10939 - DNA, 1145 bp, Vitis vinifera
  Intron number 4 from transcript GSVIVT01019869001 (locus G SVIVG01019869001) derived from phytozome v7.0 (chr-ID chr2 ; pos 4041572 to 4042716)
ggtcaaggtcaggtacctcactccttgtgctgaaccttcagattgttggataacttggattagtaatagttctaatttcttgctgattctgtgttttttaattgttagtagaagtatttatatttggtgatcaaagcattacatgagcaaaccttgttcttttttattttaattcatattgagagatttttgtgcaggttaggcacatattcattatcataaatgagctttgagttcactttggattggggacattatgtaaaactggatttgaacttttctataagtgtcatctccatcctccttttcccatctattgaaattttgattattctttcagagaaagagggagaggaaggttcctgacgttgtgcttgctgttatgtcagctggatgatgttgatgattttgtgacataaaaattgtcatcattggttcccaatggaatgcttgttgaggctttctttatacactagcaagcaccttctcctccattttgaagtgtttttacctgaatgtatttagcatgtttcactctgtttttcagttttctttgatgaattgataatatgctatagaatcttcatgttgttaatatccttataatgttgaaacttgaaatggaggggagaaggcacaatatttttattctctttcctaacacagaaggggatgagaaataaagtgaatcatcataatggtgttcaagatgaccttaaactcgaaaaagaacagaatattaacattttttttcctgaataattatctataaaaaaaaattcatttttcacattactacttttgcctgctatttcatggtcattttgaaacttcagaaaaaaaagaacaaataaaaagaagtttattcatgttgctcaatttgttctttgttattcccactgagttccatgtttgaagtgaacaaatgaggtgccttttacattttcttggtcaatttgtaggtaaattttcttttgtagttactggttgggaataaaattatttacctttccttgttaggtgattatttaaatgacttttgttcatatattgctacgtgtctgattgttggtgatggtattgttcatcttattatacatgtaccagggtgccgattcaggatctagacgtcttcgttccaaggg

SEQ ID NO: 10940 - DNA, 2943 bp, Vitis vinifera
  Intron number 1 from transcript GSVIVT01038144001 (locus G SVIVG01038144001) derived from phytozome v7.0 (chr-ID chr5 ; pos 23860081 to 23863023 reverse strand)
tcaaggtcaatttggttgactttactttgcttggttggtgtttattgatttttcttttttggtgttgtatttggtaatattagattaatttggaaaagaatttattttggtttgttatgtggagaagttagcttgttttttaattgattgaatttattgaatgattatgattttttggttgtaatgtgtaattttgcatttgatgtagagttgattgggtttatgaaaggtttgaagtttgtttgacgttgaagtctttgtttggttgcggagaaccatagcgaatagaaagaaagaaaataaaataaatgaaatgaaatggaagtttagcgatagcttgttcaaccttgtagcctttactcggttgcagagaaatgtagtgaatgaaaagaaaataaaaagaaattgagagattgaattttgcatttttaatctttggagtgaaaaacaaattgtccgtgctacagggcctcacacaattatttggctgttggagacaagcctttcattttctggattataaaaatgttaaactacatataatggatgattcaagattttatttccttcattgtttcttgatatcgtgcttaaagaggtgaaggtgtttctatttgtattagtttctaatttgattaggaaaaggagtcgtattccttttcctataagtctatttcaattttaatgaaaagaattattgagaatttagtagctatttagcttcttaaggtgtgattgtcttcccttagtaagattttttaagaaatcctaagtatgattgcctaagaatcttggtgtgattgccaaggacctatcttttttctgttatcttctgtgatctctcatcacaggggggttgaaattcatgtaagactcaagggttcggacctatcttttttctgttatcttctgtgatctctcatcacaggggggttgaaattcatgtatgactcaagggtttgacctcactataagatttctaatcctcaacaaagatgccttttttccctaccacaatggttaaagcttagcttaatccagtccagtccaagctagcttatagttggctgttgctatcccattgctatatctctgaataaagttagattgttgaggcaattttctttttagatcttaagatagctccatctagtctctacaacctttccaaaagcttgacaatatggctttctttttttttttctaaaaaaattgtatttctctttaaatagagtaagcagaatttaagcagactgattatggctcataagtacaactaagtcttttccagctatctaagctcttggaaactatggaaggaccttcaagatgtattctctaaggatctgttaagagttgtggtaaaaagacattttaagattgtttacactcaaagcctaatccttatctaatgatccttaattccattgtcttgaaaggttctcttccaccattttctttcctctgaaatggggaactcttgggcaccttaaaatcaccttacacatatagctaagagaaaaatctcaagattcaggctcaaattttcttgaaattctgatatatctcaagtccttcatcatgtggcttaactcctaaagggcatgaatatttcaattttcttgagcatctaggcttttctttctctaggtactcattattccaaatcttgagtttgctttaacaaaacttcagcttttgcaaaaatctataaccctcctaccctactacttggcactcatcactccaacttttgataaacaattgaggtttaggttttgagtcacgtgttctcatagagaggggaaacatccctcctcctaacaggatgagagtccacaaccaccaggcattggagcttgttatccaacttcaatgaattcattacccttctataagataatgtaacttaatggacaaatttcatccaactccactcaaattttatccctaagatgctgtgatttgggtccataaatagtggtaatgtaggcactgaaaatgtatcaatagccacatttctcagtttgtgagttataataattagaattgtattcttttcatttttatatcagtaccttgtccaaatttcttggttccattgaacctcaccaaataatgaaccaatattggtggtggtagatttaagttgcatttaccgttagtttgaaacttgaccctcttatatgagtttatatgtttatctgcagttttaagaaagccaatgaaggattctctttcctttgtctctccaaatggttattagactatttaattacttttctgaaacccttgttattaagattgtcaatttcatgacaaaaaaaaatggtaatttactatgtgggcttcattacaaataaataaaataaaatatattaaaaatgttatgtttgtcattagtttgagacttgaccctcttgtattgatttgtttatctatgctattaagaaaacatatgaaggattctctctcctgtctctccaaatagttataagactgttaaattacttaacgaatcccattaatattaagattattcatttgatgataaaaataaaatggtaatttactattcaattgtctcactagcaatggtttcaacctttgcacaatttttaatttttatatgttaattaatcatttaatgcaaaataaaattaatagcagtgtgtggtatttaaatgttatgctgggtaatggcattctatgaaacaggttttcggattggtatcatatgatagacatttgttgcacaaatattgctctttaagtttgagtatgtgattgtactatcttcttaaacatggttatctcgaaagttagaactgaatgctgaagctaattgatgtactttgtggaaactccttttgtttgcatgctatctttctcatggagtaattttccacttctttgacatgcagttctgcacttattttgtag

SEQ ID NO: 10941 - DNA, 5319 bp, Vitis vinifera
  Intron number 11 from transcript GSVIVT01021801001 (locus GSVIVG01021801001) derived from phytozome v7.0 (chr-ID chr 14; pos 7200107 to 7205425 reverse strand)
ggcaatattttgtgtcatcttctttcatgttagcacaggaaaataagggataattccagaagataatgtttttctctaactctttcattattcaacacaatcccattctgaacccaacaatcattctcctgtttttgaaagcatttttgtgcgcttggagcactgcttaataggagtcatgtcatatgacctatttgacataatgctaatacgaaaaggagggcaagctgtttgctctaaccattaacctttcgataattccaacctgaaatgcttgttagacttcagctatcatttattttccttctcagctaccaagaaatcacagctatgtgagatgttgctagagtaagatcaaatctaatgtgttcctttaattaaaatgaagtaggaattttggtaggaaaattcaaaataagattggttgggaatggaattcacattgttatagggtaattataaccataacaaatagtagaacatatttaatccacaacaaacatttgcttgaattaaatttagagtcaaaaaaaaaaaggaaccacaaatgtgtccactaagaacaatatcgataaaacgtattcattcactttataattgtaaccaaatcacatatatgagtaaaaaataaagaaaaagacaatttttaatgtgattcaacgatcaatgtaatccctacgtttacgaagtacaccaatactaaaaaatctactaatcaaaacgaaagagaagagttacaatggtgaagctctggaaaaaaaattcttaattgtagtcgtactcttcaaaaaaaacaaaaccctaaacatattaaattaaatctctacattattcaagtcaaactacaagtcgaaccacaaatatgaaaaaattaaatctatatcaaaattgaaatttatagaaattagaagccctaaattcacaattttgaaagtaaaatattcaatagttcatatggtttgcaaatcggagttgaaatgacaagtttggtcaattgaagcaagttgcattgggacataatatcaagtcaaaatgcagcaatttccgatgtagaaacacaattccaacgtcaaaatgcaccaatttgcgatgatgaaatgcaattcctaagttgaaatgcaacaacttaacatgtcaaaatttatttggacatgagcactccaatttgacatcacctacgaattctcaagattttgcacattttagcgtcaacccaaaattataaaaaaatattaaccaaaaaatgttcttttgtttaattattacctatgaactaccaagatgataaaaaagatagtaaaacttgtaatatagttagcatttcccactcagaggcaatgaaggaaagtatccaaacaaatttatgctcaagggcatcaacttcaaattgaagcaaaaattgctagaaattaatgttataacttttcgaaaattggatccatcaaccttgaactgatatttcaatgtcaaaatctcagcttcatatatagcaaataagtgtgccttaggccaccaccctatcggcaaaaaacttcttaaacactaaaaacattaattaattattttaaaattcaaatacaacctttgaaaatatttgacttagaggatgtttgttttttgggttatttgattaaaaggattagtgaaaactcaatttttgaaatttaactctttgtaattttttttacctcattttgacaaaaatgtccttgttattttcttgtaaaaataaccttttgtttagaaactataaatacttaaaatggtaaaggaaatttatgtcaacagtgggttactttttaaaaggaaaaaaaatatgggaatgattagattcacaatttggagaatatttcatccattttaattaaatatttttattttttttagttttttgctgaaaataatttatctttaaactttaaattgtttatttttatacttcataacttattagaaaattttgacttaatagaaaaatcaaaatatttagtttttttttaatgaaaaaaggtaacaatattttggtttttctttactttgtaatgtttaatattaacactattaaatactatttaattttaaactttatttaaaattaagtaaaaaaaaaaacaaacacatcttaaacttttcctcaatcagatcattaatttgtatttaaagttttaaaaaagtgcaaaattttccttatttttaataaagacattttgaaaaataaaattcgaatatatacatatgtcctttacaagctaagaaaatattcaaaataagcctttaatgtttaatctttttctgcaataaaagttggaaaattgagtgtaaattaagcatgtgtattctactcatttgtgataaaagttggaaacttgattgtaaattaagtatgactattttgtgcctagtgtgatgataatgcagccacacgtggtaatatatatccttgccttggagtgcaaggcactcatatgcttagacaatggaatctactatatatatactttgattaaagaggttcctttcttcaaacatgcaatgaaaaggatggattaaggtggtgtttttttttttttttttaattctaaatataacttcaatgcttagtaatgttaagtattatgttgtttattttttaaaatattttatatttattaaacattaaaaagaaaaccaacatgttactttttctatttagaaaaagtcaaatatttttgttttttctattcaacaaaaagtttataataagtcataaaaagataaaaaaacaaataatctaaagtttgaaaacaaattattttaaataaaaaggtaaaaaaaacaaaggccttctaagttaaatgcttttcaagaagaattttatgaccaagatccttggattattttactttaaatatctattagcatgacttaggtggtgtttgttttttaacttaattctaaatataacttaattaatgtttaatagtgttaagtattagactgtttatttttataatattttatttctattaaacattaaaaggtaaagagtaaagaaaaatcatcatattactttttctatttagaaaaagtcaaatattttgactttttctatttaataaaagtttataataagtcatgaaaaagtaaaaaaacaaacagcctaaaatacgaaagcaaattactttcaataaaaaaaaaaaacaaacaccctcttattcaaccaaaaccaactttggaatcaagtcatggagtaggtaattatttttaagttagatgggtcaaggaaataatttttctattctatatattaaaatatttaattagatttttaaaatactttaatgataaaatacaatgatatgttttataatttttataaatcaaaagtatttgtatattatataatatttttgaaaaaaaaaatacccattttaagaaaatttgacatcatgattttgaaattaaaatgatatggaaatcaagaaatgaaatttgttttcatgactatgttgttaatggttcaaattaattaattggagtcaaaattcttgaattgactaaatcatctagatgtagcaactagcaatggtcaagataaaataaaaaaataaaaaaaaatatttgggaaatagttgtaaaaaatagttttttgagaactgctttttaaaattattttctaatgtcttttagaacaaaagtttgctagtaattttgaatattattaacttattttttatgttttaaaatgtttttgaaaaataacttttatttgtaattttttattttttattattctctatatttgtatattttttttaaatgtataattatttttttaaaagaaaaaacttagaaaataagtgaaaacaattaaaaacaactaaattatttggtagaaaaccatgaaagccacatttttcgcatgttttcccactcggatgacaagacttactttttatttgtgaatttattttttaaacaaatttttggagtcacctctcatttttgttttatttttaaaggaaaaaataaaataagaaagaaaaaccttaaatgtgattcatacaaggaaagataggtttgagaaagaccgagtttgggtatggggatcaggttacaaggtgcaataataagtcatataatccctctaagcccctaaaaacggatctctattaaataagttgagcaacataataattactcgattaatcatggataccaagcaatgatcaaagatgtactatggttaaagtacacaatggaaagtgaccacacaaataaaagaggatatataggatgcatacgtaaccaataaattaataatgtgctatcatgaaaacatgattaatagacaagtataaaataatcacatgcatatcacatatcaacgtaaaaaatgagtcaatagccaatcaaatatagcaataagaatgagcaaaggcaaatgtctcatatgttgggccctatcggatttacttttgtatgaattaatttcataaattccattatctttgaaattatagaaatgtgttgatatttaaaatgtggaaattaataaaaaggttaaaaataaataaataaaatatgaaaatagatgtcgggagagaaatatggcagcaaatgatttattcaaatcaacattttattacctaaggaaaatctgaaggtgaatttttaaagctgggattatttagttgaaaacaggtttcaaaatctgattcaaagctgtaagtcaccaaaaaaggagcatctagaggaggagaaaggtgttcatgcatgcacgtgggaaggctggaaaagaagctgttaggaaatgagcggcggaggaagtgagccccacagcaaaggaattcctcttctttttcagttttgggactgtccaactgtttttttttttcttttttcttgcatcaagatcttcagtttttgaacttattgaaccccaagtctccggtgttagtgtaggctggttcatttgctcatgttcacagtgggtgaagctcgtagtagtagggaattagggttccaagggatttaagccttttaatgagctgaaatgaagggcatttcaactttctagctttctgggtggatctgcttcggcattctggacctgacatgctggaagctgctgtttctctcgaaggaatggcaggggcagttgtctcatttgaacaatgagatggtgcaactcagaatcatacttgcttgaatcagcaagagtagcgtcaagcatgtcacccaacattgcatcagaaatatgtgaaccatctctcgaacaactgtaagccaaagtaaacgtatcatcagaactgagatattcaagtgattattcatttg

SEQ ID NO: 10942 - DNA, 12350 bp, Vitis vinifera
  Intron number 1 from transcript GSVIVT01020854001 (locus G SVIVG01020854001) derived from phytozome v7.0 (chr-ID chr1 2; pos 995257 to 1007606)
ggtgcaggaggagaaccctagggtagcctacctctgtaagaactaacaacacacttcctctcttccattccctaaaaatgctttcattatagcactagtgttactgttcttatgatcaaatcacataattctggcagtgtcagtgatgatttgattatatgacatagttctatgcgtagtcttaacgtgaatttgataaactgtgatatttgtagtcgtttcagtgttaagttgattcaatgcaatgattgtagtggtattgttgcggttaatttgataaaagccaatgattgtagcggcagagtcagcatttttatttatttatttttataaaatgcaataagtgtaggagtagcgtgttggtgctaacttgatacaatgtaataactgtagatgttggctttcccttcccaatattgattgaataagatgtgatgattgtagcagtagtataaatgctagtgttaactcaataaaatgtgataattgtagcagtagcagcaatttggtgggatatccatatatatctcctactccaaatcaccatgtagaaaataatgatcaactcaggttaatagcaagagataacaaagctctaatagtattcatttttaccacaagtgcaaaagtctcttggtaatccatgccttgagttttaggtgaatcctttagctaccaatccagcatatatctatgcaatggtccatccgccttgtatttttgtgaaaattcatttataacctactgttttctttccttaaggaaagtccactatgtcccaaaactcattcttattcagtgcattactccctgatcatgccaaatttccacttttatccttaaatgctttttggactgtcttgggtatttctatggatgttaagtaagaaatgaaagcttcatagtatgaagataggtttgcaaagacataaaattagaaactgggtgttgtgtgcattttcttggacccttttgaagaataatcaacatatcaaaatttttagaaagatcaagggtcagaacaggagataaggaaatgttatctagttaggtttagacaattgattttgcatagagttcatgacaggttgttttccccttgagtataacttaagtgaaggtgaatgatttccttcttgttggtcgggtgcaatatcaagctcaaatggcttaagagttgtagaaagctcaggttcaggtgtaagtacaggctcaatatgaggcttgggaggttattaaggaggtaaggaggtttagaaagctcaggtttaggttcaaaagtaggctcggtattagactcatgatgctgttgaggaggtgaaggtgattattgaaatgatggctcaatgagttgaggtagaaccgtagaagtgaggcaccattcctatcttttctcgcagaactctccctttgaagataggtggccagaaaatagggttgatgttcaaggaatgtcacatccatagtgacaaattgttcccaagttgggggatgataacatttgtacctttttaaaatggaagaatagccaaggaaaatacatttaagggtcttcaatctattttggttctatgatgccatgaatatgaataaattcagtatacccaaatactttaggaagaagcatctcaaagcccttggaaaaaggaacccttttaaaatcacgattcttggctataagaggtttatgagatgtgtggtggtctaaacgccttcactccattagttttggcactcatttggaaatataaggctcgagccatatccaaaaagtatctatttttttctcttagcaatgccatttttttgaggcatgcctatataggaagattagtggataatttagtcattttgaagatattggatgacattattatcaaaatactcttttctattgtcaaatcttagaacctggatttttgtgtcaaattgtgtgtggactattttatggaaaataggagagacaaagttgaccttaaatttgtgtttaagaaggtagacctaggtagttattttacaaatccacatacttcacaatgaatagaatttttattgaaatcaaaggcaatattcataaagggaaatgcattttttatcaaagggaaaaggggatgccctagtctatagagccaaagtaaaaactctttttctcttaaggaaggtagctaatggtgatgaataagccaaagaagtaaataacatccactcttggtctcaatgtaatatagtcaactaagttttctagtattgtaatcatcttcctcactacctaatcttgaaaaacacattgagaaggaaaaatgttcatataataattcaaatcttgagtaatctaggacaaaaaattgtagactaacttaagaatgtgtaaacctaatttcaatgaaatggaaagagttaagaaaatagttccttgaaaagcaatcaacaatttaacattatgatttcttgcatatgagctatatgaagagaacaacttaggagaacatatatggtcaatcacccccaagtctattacctagaggttggagaaataatcttttgaagcattcaaggctatggaaatgtcacctaattgtgcataggaggttaagcatgcgaaattctcacattggctaagaagaaacaaaagcttttccatttggttctcattcaaggctcgtcattcgtggttccttgcattggatctttcatgaggttttgctttagagttcactacatatgctttgttagcttgccgactagttatatcttccctatatcctcttccttttttactctcagaaggtttggcatgatgcttctaaggcaagtcatgagtgtgccttgctttcttgcaataatcgaatcatcgagaatccttttcgccttgttttcttccactaaattgatgttggtttattggattaatcattggtgtacttggttataactagtgctggattctcatgaataggggaaaagaaccttagacaataaatagacagaggaataaacaaccaagggtaaaggctatggaaacttgagagtaaagtccaaaatagttgggaatatatatgcataaggagataaagactaaaaaaaacaaattttcttagctatggatgttagagaaagaataagtaaccaatggtggtgaaggtaaaaaaataaagcagattttagacttatttggtcatgagtttgtataagatcatttctaaggtcttatcaaggcgtattcaaagagttctccatgaaaccatacactactcctagggagcttttgttgagggtagacaaattttggatgcagttctaattgctagtgatgtcatggatgataaaagacattcaaaaagagatgagattgtcttcaaaatagattttgagaaggattatgatcatgtggattatttttgaaccatatattagagcaaaaagggtttagtacgagatgaaggtcttggatgaggagatgaaggtcttggatgaggtcttggatgggtatggtgactagaggtttaagataaggaggtcctctttccccttttcttttttactttagtagtagatgttttaagtaggatgatgctgaaagcgaaggagggtggtcttgtagagggattcctattgggtagggataggattagagtttctcatttacaatttgcaaataatacaatctttttctctagagcttctatggaagatctgaaaaaccttaaactaatcctattggtttttggaaaattattagggctaaagatcaatttaggcaagagaaaccatttggaattaacacaagtcaagatttgattatgaaattggcttcaatgtttgaatgcaaagtttaagattggattttaacttacttaagtcttccattaggggggaatccaaaggcaaatgcgttttgggaccccatgattgacaaaattctgaggagactgaatggatggaaaaagacctttttgtctctaggaggtagaattactctaatttagacctgcttgttccacatctctaactatttcttatctttcttcaagatcctagactcctagtgtcagtatagtcaaagattggtatcgtaaaaaattgaaagattgtaaagagattttctttgatcgggacttagggagggtagaaaggattatctcattagttgggacttaatgtgtaagtgtaaagagtatggatgtttgggacttgggttgatctctctgaagaatcgtgctctctgggggaatggctttggaggttccttagggaaagttttgacctttggaataaagttattttgagtatttataggacacatcctaatgaatgggatgtcaacatcatagttagatggtcggataggtgtcatccttggaaggccattgcacgattgttccaggtttttctaattacactcattttgcagtgggtgatggggagagaattcatttttgagaggatttgtggtggggagatcatcctttatgttcatagtttttatgtctttatggagttgtcacagtaaaaatcttatcatttcaactatcttttgttgttcttcttcattgtcttggaatcttaatttttattttgtcgcaaccttatggttttggagattaaggattttgaaagactcatgttctccctcacttgtgtgcacttggcttcatctaccccagatgcgagagtatggtcactaacctctgttaaggagcataatatgcatattgaacccaaatcttgcaagcttaaacttttaggaaaattggttgtttaacatggtatcagagcttggtttggtggaaggtcatgtgttagagccgcttctctgcaatttgcatgtttgtaagtccaaaaaggactatttgcgtttgtttgtctctttttctctctctctataccttacatctctatgtctctccacgtgcggggatgaggctgcatgtgaaggagggtgttaaggagtatgatatggatattgaacccaaatcttgtaagcttaagcttttaggaaaattagttgttcaacaaccttttcaggattattcatagtcaaatcttttttcatgtctttgtccaatacttcaaattttgctcttttctcctaggccaaatttatatggaattcaaaagtctcatctaaggttaaggcctttgtttagttagtgacacataagaaggtaaataccaatgacatgtcacagttgagaagacctttcaaattccttaggcatgattggtgtgttttatgtaagtagagttgagagtctattgatcatctctttttgcattgttcggtgactttcggtccccttaatcaggaatacaatcaagctgaatcaggttcaaaattaggtactttcgaacaattcctttatggttgttttgaactttttggaaagagaggaataggagaatctttgaaggcaatgagtggactttgttggcggtagaaggcacttttttaaggtccttgctttcttagttgagcagcttggcgacagggatgattaattccttgcttgatttggtagataatttatgcagggaagttgttgtacttggtgtttttggttctttttttcttcaccattgtgtgccctgtgtatgtcttgtgtactggaattgcgacccttatatgttagacactttttaatacctattatttccttgcctatcaaatatttttttttggaagaatgtcttgttcttcaatatagttactaattcattttattgatttttatttctgataaaataagtacctcttagggaatttttgtccaatgttttataaggaattttaaaaatttgtggattttaaggtgggagagagtgggtctaaaaaatattcattgctaacaagtggtgtgatggtgatggagtgtgcctgtgttcaggcattgtgccttgtaggtgaaggctgtgttgttaggaatgccatatagacatttggcaattcaatagctgtacccccaggatcaggtcctttaggagagtgagtagttggagatcaccagtttgtagagctttgttactgaggaccatggtattgtcaaaatattgtgtgaatggccgaataccttggccttgagtttttttatattatatatagactttacaaggatgctatacatggaaagcaaataaaagcaaataaattcccgcatgattctagccctatacatgtaaactataatctatcaaataatgtatgctaattatacagaataataaatggagaaataaggaaagaagtgtgggctaaaataaggaaaaaagtgtgggctaaaataaggaaagaagtgtggacaacaaagcaaagctgtcatttgacaacccccctcaaattgatgtaagttgatcaacaagcatcaatttgctacttagcaagcaatgtcgatgacgagggagagccttggtgaagatatcatcaattcgtaagtcagtggaaatatgtggaagagtgataacacgagcttcaaaggcttcacggatagagtgacagtccacttcaatatgctttgtgcgctcatgatagataggattggccgtgatctgaataacacttgtattatcggcatatagaggtgtaggatcggtctcagaaaaatctaactccgcaagcaaagcttgaagccaaatgatttcagaacaagcaagagacatcgcccggtactcagattccatagatgacttagagactctgtcttgcttcttacttttccaagagatcaatgcatcacctaagaacacacaccaaccagtgatggagcgacgggtattcgcacaaccaacccaatcagcatcactataagcagcaaggcgagtagaattgcctgcagggaagaacaagccacgagtagaagtgccttgaacatagcgtatgatcctacgaacagtagccaaatgaagatgacgaggagtctgaaggaattggttgacttgctgtacaacaaaagaaatgtccggtctagtaatggtgagataaacaaggctacccaccaacttcctgtataaacggggatcagcaagtaagtcgccctcctttttgcgaagcttgacatttaattctatgggagtatcaacagaagtagccccttgtagaccagctgtagccaccaagtcactcgcatacttatgttgattgagggaaataccagagcgactatgatgcacctcaaaaccaagaaaatatgtgagagacccaagatttttcatatgaaaggactcggagagatgagttttgagctgaccaagtaaagcagaatcggaaccagtgatcacaatatcatcaacataaaccaaaagaacaacaatacccatgtctgatttctgaagaaacaaggaagtgtcatacttgctctgcctgaatgaaaattgtaataaagtggtgtggaatttatcaaaccaggccctcggagcgtgtttgagaccatacagagagcgacgaagcttacacacatgtgaagtcggagagggaaacaatctcggggatggcttcatataaatactctttaagatccccatgaagaaaaacattttttacatccatttgatgtagtggccaatcattggaagtagcaagagctagaatcgtacgaacaatagtcattttagccacaggagcaaaggtctcttcataattgacaccatattactgattattcccaagtgcaacaagccgagctttgtaatgatccaaacttccatcagatcggaccttgattgagtaaacccatttgcaacccagaggaacaatagtgggaggacagggctcaatgtcccaagtgtgattggcctctagagtggcaatttcttcctgcatagcttgtcgccaacaatcatgcttggcagcatgtgagtagcatgtgggaatatcaaaattagacaatgcagcagtaagggctaaaatagaattgccagaactggaagagggaaatccatacctattcagaggtacagacacttgaggagagcgacatactaaaggtgttggaggtgctgcaattgactaaatctggagcgtggtaggatcagatatcgaatgagccaccgaaagagactgtgggtgagagggtctcgtatacacaatacctggttgaaagcgagaactgactggatgaagatctgagaactgctgctcaaaggaggggaggacaacagtagaagaggatgacacagtaaaagaggatataggaaagaaatgttgattttcaaagaaaataacattcttagaaatacgtgtccgatgtaatgtaggatcatagcaaacaaatcccttttgacacatattatatcctaagaaagcacatcgaacagattgagcagataatttatgtcgctcatgaggaggtaaatgaacaaagcatacacaaccaaaaatacgaaggtgatcataactaggttgcttagcaaataagcggaaatagggagactccatatgtaggacttgagaaggtaaacgattaatcaagtgagtagcagttttagaacctctactcaaaacatggatggaacagaagattataacaagatagtacgtaccacatctaggagatgacgatttttgtgttcgacaactccattttgttgaggagtagagggacatgaacgttgatgaataatacccttagaagccaagaatgcttgaaactcagtagatagatactcaccatcggaatctgtgcataatgtcttaatagaagtagaaaattgattgtcaacatacgctaaaaactcagtgaaagaacgaaagacctcaaatttagagcgaagaaagtagactcaagtaaatctgctatgatcatcaatgaaagtcacataatatttaaatttctcatgtgaactaaccggggaaggtccccaagcatcactatggataagatcaaagcagtgagatgctctacttgcatgcaaagggaagggaaaagttttacttttaccaagtttgcaagaatcacactcaagagataaagaagaacgatccttattaccaggtaaatcagagttcaatacatgagataatatctgagtattgggatggactaaacgacgatgccacaccatactaagatctgaaacattattacaagcaaaagactgaatagaagaaagtggagaaaaatctggaacaggtaaaaatagtggaaacaagcgccccactttaggtcccttcgtgatcggctccctcgttacctggtcctgcacaacacaaccattactagaaaaattaacaacacaattgttatcaactaattagccaacagaaataagattcgtggaaagctgaggagcaagaaacacatcagtgaacttagaagaggtatcactaatagtagctatgagcaaagagctgccattggcagtttgaatggaagattgaccagcgtagggccgaacatgacacaaaacggtgggattattagtaatgtgattagaggcccccgagttcatgtaccagagtttagtagaattgttacattggaatcctattgctgataatgctgaaattaacatccgttgcaccatttctgaggtgcagtaatctggtgcaggaggtgtaggaatagagcacgcagctgaaggagagtcgtgtgctgcagaagttgctacaagagggacaataaccgaagtctgaaatgattgggcctgacgattcagggggtgaatacgacattctttgataatgtgaccctttttcttgcaataagaacaaaacttcttaggacaagtggcagcaatatgcctatattccttgcagcagaaacactgcaagtttttagaatgcataggtggtccgcgtccttgggcagcataagctacagttgcagtcccggaactgccatgagattgctccagaataacttgagtactaaggcgttgctcttcgcgaagtaactcaccaaaacaaatatcaagagagggaacatgagatttgttcagtaaagaggagcggacagattcatattccagatgtagtttcataagaaactgatcatgccgggtagtcgcgtgaatagtctgaatagttgagagagtggcaataggaacatccgctgtaaccaaatcagcatattcatgccaaagagtcagaaatgccgagtagtagtcctggatggaaatactaccatgttgaaacatgacaatcgcatgttctaattgaaagcgacgagcatcgttatcctgatgataaactttcttcaagtaagcccacatagattgagcggagcgatggggccgtaagtgggtgacaatatgaggctccattgaaccaagaagccaagacatgatgcgtgcatcaagcacaacccatgaaggagaagacccaacatcttgagatttgttaaaagtggatggtttttcaacatctgtgccatcaaaatgaccccaaaggtcttttcccttgagaaaaagttcaaactgaaatgcccaggtataataatttgtgcctgtaaacttaacacacacaggtgcgaaatccatagaaaataaatagaacccgagacaaaaggatggaccaaaaaaaaatcccagaagaaaactgacccacgacagccacagaaataccgagaaaaatggttatggttgggtgcagcacggatcaacacatacttgaccgaaagacatgagaggcacctccgaaactgagaagacagaaaataatttgagggaagaaaaattagcaaccttgctttgataccatgtcaaaatattgtgtgaatggccgaataccttgaccttgagttttgtatattatatatagactttacaaggatgctatacatggaaagcaaataaaagcaaataaattcccgcatgattctagccctatacatgtaaactataatctgtcaaataatgtatgctaactgtacagaataataaatggagaaataaggaaagaagtgtggacagcaaagcaaagctgtcctttgacaagtatatgggttctgatgggcaaatatgactggtagaggtgagctgtttttgtcagattagttgttccttgtgtgatggtgtctttcatttgaacttgggataatattttgctgccccacctggtggcgttgttcatttggattacattgatgggtaagaatttccttcagatagtttcatgtgtaaaatacaaaaccaaaatggctgaggccagcgggccactcaataattttggtgtatctgtaaagggatcagcacattgttggaagggttaaggctgtcagagttaagatgaaaaggtctttgtatgaagcttttataactctgggccaggggacctttattgataagttgttagtctatggccttgttttttgtccttttgtttgtggacttgctggtgtagttatgactcttttgtttctttaggcgttcttcataaactgcttctgtactagggttcacaccctttatattgccttttattcacttttcttgcgtatcttaaataaaatagaaaaagttaaaaaaagaaagaagtaaagaaaggaagaaaaaggaaacgaattgctaatagttagaacctcagctttggagttgggatattgatgattgctagtgtcttggttagactcttaggttttgaacctcttgagttagtgtagattaaggtcattgaggcagcagtataaatttccgtaaaggtctgctattttgcaaacctgtggctatgtggaaggtgaataatatgcattgctgaggatgaaactactcaagggtattgaaaaacctccccccatgtgtatccgtctgcttcctgtttgaatttttatcaagagtagaaaatatgtgtttttttgccttctattatagctgtgtgatagtatatatgcttctcttgtcaactctcttatactactaatctttgcataagaatttcatttatcctttgtctaacaaagatctttcatacaaaaaggttgaatgaggaggtctttttttctatgtattattctctgctgttggagcaacaatttttgtacattttgtagcagaaagttatttaattgagagagagagaggcccaaataccaccaatatggaaaaaccagaaaaggtggaggacataatctccaacaaagtacaagagttttgatgctcctctcttgttcagtggattagttttttttaatctttagcttcaagaaaggaaagatgaattatagtgatttttatttgctaaagatcattttatacttttatttgtttattcgtatttcataattggcacttgcattttatatgctttctcaggcatttttatttggcatcaactgcacatgccagaagatattctgtacaagcttgttgacaaatatcttgcttatgaccttgatttatttttgttcaattaggtcgcttcc

SEQ ID NO: 10943 - DNA, 9013 bp, Vitis vinifera
  Intron number 6 from transcript GSVIVT01003549001 (locus G SVIVG01003549001) derived from phytozome v7.0 (chr-ID chr7 ; pos 14536151 to 14545163 reverse strand)
tcgtcacgtaagacttttagtcctttgctgtaatgagcttgaagattctgtttattgcaacacacagtggtgctatgcaatgtaggtcattgataattagtttgtcatgtgattatgaatggataatttgacaatattgcatgattatcagcaataattagtttaatcattatcacatattagggtgtggtgtgaataagtttggctgtttgacttgattatgtacatgtgatactcagactatgtatgttgcaaatgcattagtctgtgtagagagaagattaagtgcagttggatttctagggaagcatgacttgaaggagcaaaattattattcttcagtcaattgttgtatagtttgaaagaaaattttgaagccctcatatgtatgaaactacctagagagagggggtggcgttttggtgaataagtattccttgattaatccctagttcaaaatttatagactttattttttacctcaattaatcaatcaaagatcataaatccagtgcatgaaattgaatcaatagacaaaaagataccggattaatgtggaaaaaccactttgcagaactaggcaataagaaaaaccacaggtttcctgacctttaacaacttcaccaattataagaaaataatacatggatttacttgaacaaatgcatcttcctcaagagtcttagatcaacagctcctgtatgtatcttgcacaccttcaatgcaacactccttttatgttccttaatggatcccttgacccccttgttgaagtttccacagtactggcgcaaacctcttccaactaaatgaatattctgaaggagatggaggcttaacactctagcatggcttaggttatcaggaggctctctttttatataaaataagtctatttatattcctagtgacaatttaagagagtttccagccttttaaaataccaaaaacagagtttgttttgagtaaaacacgatttaggaagtcaaaaggagcattgagtgtttgaacacccatcttaggtgtttgaactttcaaggaagaaaaatatattaatagaagaaaagatacaagagaaagaagagatacaagagaaagagaagaaaccaagagaaggatgagaggtccttcccataaaaacaaaaactgaacaacagagaaaacacccaactatagaaaactaaaaacaaagaaaaaccccaacgctctcaaacttttgaatcgcaaaccgcaatccagttgagttgtaaaacacttaagaggaactcctttaaaagctgcagtacaagagacccaaagagaggaatagaataaaatcaagtcccataacatctcttccgttctccccttatcctcaaaagtcctattgtttctctcttgccacaccatccataacaaagtaaggcaagcgatttgctaaagtgtcttgcctcttaatgagttccctaagcctttaaaagcaataaccagcatgtcctcaatactccttggagggacccaagccaaccctgctagattcaacaacttgtgccagagtccaatggtaattagacaatgaagaaaaaggtggtcgatcgattctccatttcctttgcaaagaatgcatcattgaggacagagggatttgtagggtcttctcaattgcaactcgtcattggtgtttaccttcccatgtgctactaaccaagcgaggaccttaacctttgagggggcttttgaactccacaaaaacttggccggaaggaacaagataggatttgagacttttgacaaggccaagaaaaaagatttcactgaaaacaagcctgatgatgacaaagaccacgctcttgaatctgccaaagaaggagagaaaaacactgaactaagggagggcattaatctctgaaggagatcaatttctgaatcagtaagattgcagcgaaaattaaaattccaagacaatggaaaagaattgccaaggacatttgagacaatgaggtttttcacagaaacaactctataaagaccagcaaattgatagcacaaagtttggttaccccacttaagatcttcccaaaaacgaattctcttcccattccccaccactaggcggacaaaagaggaaaaatcctgtaaaacttgagcaatagccttccaaggacatttgtgtgaccatctaaccaccatgttggcatcccatctattaggatgtgtcccataaatactcgcaataaccttatgccaaagaccactcctttctctagggaaccttcaaagccatttccctaagagagcaatatttctcaaagaagtcttcccaaaacccaaacctcccaactcctttggtctactaacaatatcccatctgataagatgatctttctttccttcccccgccccagaccaaagaaaatcccttagcagcttctcaatctttgaggctattgatactgggattttgaagagggagaggaagtatctagggatgtgagacagacttgactgaattaaagtaatcctcccttccagagacaaaaaggtctttttccaaccatccaacctcatcgaaactctctcaaccaccggatcccaaaagcctattgtttttgggttccctcccaatggaaggcctaaataagacaaaggctactctgacactctgcaataaaaaaccgaggccaaactagacaacaattcctgcctagtattaatacctaaaatggtgtttttttctaagttgatttttaaacctgatacttgcccaaacaccaaaaggataatcttgaggttttgaagatgttgtagagaggctttagagaaaaagatggtgtcatctgcaaactgtagcaaagacactctagtcctatccctccccacaaagaaacccttagttagcccagtttcctctgctctgatcatcaaccttcttagaacatctactactaaagtaaaaaggaaaggagaaagggggtctccttgtctcaaacctctagagaccttaacccaaccctttgcattcccattaactaggattgcaaaacttgatgaagacaagcatccctttattcaagatctccatttcgggctgaaccccttcctttctagcacatgatctaaaaagccccaatccatatgatcataggccttctcaaaatcgattttgaagacaaccccttcctcccctgaccttcttttctcatccaccacttcattggctatcaacacagcattcaaaatatgtctcccttcaacaaaggctccttgagagcaagagattgttttatggaggactttgagtaaacgccctgataagaccttagcaattatcttatataaacttgtaaccaagctaataggtctataatctaagattttaaaagtttggcttttctgaggcaccatagcaatgaaggtcgcatttgtactttgatttattatcccattggtatggaactcaagaaataccctcataagatcctctttgatcacatcccaacactcttgatatactgcaatagtaaaaccatcaagaccaggggtcttttccttattcaattggaaaactgccattcgtacctcctcttcagaaaaaggcctgtctagccaaaccgcactctcttcaagaatagagacccaatctactccttcaaccctccaagaagcaccttcgggtttgaaatagagtttcccaaagaaatttacaatctccttagagataacctcaatgttgcttaaagtcacctccctctcagagatcagagacttaatgaacttcctgtttcgccttccattggccattctgtgaaagaacttagaattgcaatccccttctttaatccacttgaccctagatttttgtctccaatgaacctcttcctttaataacaaatcctctagctcccttcttcttaaggtcctttctgaaaccaaatcaagattcaaattcccttcttgttcaattagatcaatcctacctaagtccgaaagaatgagctttttcctctctcttaaatctccaaaggtcactttattccaatctttcaactttgatgcatattattgatgcatatctacgttgaattttgcaattgtgaaccttatcgaacttaattctattgaagactaaagtttcataaactctaagacccattgagataaatgcacccacgcccataagaaatgaaacaaaattgcaacctaaaattatacaataacaatttcctttctggaaattttgtgacaaaacataaagattacaaatgacaccttgtcaggttttgtgaggattcccaagatcaaatgattcatctaagccgctcatgtggtttaaggctttatcagggtttgaaattaacctagataaaagtgaattgattccaattggagggattatagatgtagatatattattgactttggaattgggttgcaaggtggggaaaatttcttctacttacctaggattgcctttaggagccccttgtagatataaaacagtatggggctatgtggaagagaagttccacagaagattgtcattgtgaaaaagatagtatattttacaaggagggagactttcattgattagaagtactttatcgagttctccattttattgtatgtctttgttagtcatccttagaaaggttagattgagattagagaaaattcaaatggactttctttggggaggtaggactttaaagaaaaagcctcatttagttagttggtcgattgtcagcacgtacaaaagaaatggggggttgggagttagaagtctctctctcctaaatcatgcccttcttggtaagtggagttggagatatgttttttatgggagtgttttttggaagcaaattattgagggaaggtatgggaaggaaggagagggttggcacccttgtgaagttaggggtagttatgaggttggtatttgaaaagtcatcaagaaagcatgggatctcttttttagtcgaacctcctttgaagtggtcaatggcaaaaggtttaagttttggacaaactgatggtatggggaagagcccttgtgtaggttgtttccttctttatatgctttagctttgttaaaggaggcctaggtggtagatttgtgggatgacacaggaggagtgggttattggatcttgtgcttcattgggcactttaatgattgagagttggatgtcgttgagacttttttctccatgctgagcaagaaattggttaggagagatgatagcaacaaggtggtttggaaagacactaaaaaggggattattttcaatcaaatctttctatgcagttctagaagtggggagggtggtcctccttctaacgaacattatctggaattcgtgggtttcgtccaaagtgagcttttttgtaagagaagatagttgggaaagagttctagctttagataacctccaaaagagagggtgaccattggggaattgatgttatctatgcaaggagaaggggaagtctattgatcatttagttcgtcattgctctaaagcaaagattctattgtacctatcgttttccttatttagaatatagattgaatgatcccttttttggtgaaagttttgctcttaagttggcaaagctcttttgtggggaagaaaaaggtgtggaacattgctcctctttgcattttttggacaatttggaggaacgtaatcaaaaagcttttgaagagaaggaatagaatgaccaattgttaaaactttcattcctttgtaatctttcttgggttagcatgtactcaagtgaaggctcaatgcctttgtttgattttgtagagtgggtagaatcttgttgagtgttcgggtgttttttgtgcttttcttttgagggcttgctttaggtgctctttgcatacgtcatgtgtactttggtgtaccttgttcttttactaatttatagataccttcctttacctatcaataaataaataaataaataaataaataaagattacaatgaggcctccccccccaaatctcgtgaaaacctcactaaaccccaaaaataaaaagcttagtctaaaccacttcttatgcatgaaaaacccccaccactagtcacgtgcacacacttaagaaacttgtgaaagtggcgaaaagataaataaatatgatagaaatatcacaacaatatctaatgagatatggcatagcaaatatggaatcaataaatatgaaaacaatatgacaaagcaattggaaggaagcatttggagatgaatcttgggttattgcacttcatgaggaattaaatcaatttattagggatgatgtgtggtacttagttcctaggcctgagagagtaaatattaaaaagactaagtggtttttaaaaataagtgtgatgaaaatgggacaattgtaagaaacaaggctagattggtagcataaggatacacttaaattaagggcattgattatggagagacttttgctgcaattgctaggcttgagcttattaggcttcttttttagtcatagcatgcttattgaaatttaaactataccaaatggatgtcaaaagtgccttttcttaatggcatgttggaagaagagggacatgttgagcaattcaagggaattgaagatcctgactatcctgattatgtgtatggattgaacaaggctttctatggattgaaacaagctcctcacttggtatgagaaacttattgcttgttaaagcaaagatttaagaggggaagggaggggtcggagtgggtggggagggattcgattggaccttatttattataagattagaggacaagtttatagtgcttaggttttaaggagatgaaaatagagtttgaaatgagcatggtaggtgagttaactttcttcctaaaattacaagttatatgagttagtaatggtatatttctttcctagtttaagtatgctagtgagttagttaagaagtttggactcacttcaggtaagcactttaggacacctatgaacacaagtacaaagttttgtaaggacacatttggtaaagatattaagcaaaagctttatagaattatgacaagaagcctattgtacttgacaactagccagcctaatatattctttagtgttggggcttgtgcatgttaccggagttgtcctaaagaatctcatcttaccccagtaaaaagaataatttgttatgtaagtgggactatcgagtatggcttaattccctatccagggtagaggctgaatgcatagctgcatggaggagtcatacacaacatttgtggaatgctcaatgattatggctttgagcaaggaaccatgagtattctttgtgataatttgagtgccatagatatgtccaaaacttctgtgcttcatttcaaaacaaaacacattgaaattcaccatcactttcttagcgatttagttgagcaaaagttaatatccttagaatatattcctattgagagtcagttgacaaatatctttacaaagcccgtagatgctcttaggtttgaggactttaggaaatctttaggacatcattttctagattaagattggattccttttagattttaggaccttgtgtttaaggggagcatctttttaagttttgagatattgagtaatatccctcaaaagtccaaaatactcattgaattattgcattctttaaacttagtagagatttatgaaatttaagaacaatggacatgattttattactctagactatgattgggaacattataattgatctagggagttctcttgcaagggggtgagtttttacttctctttactgtacattttgagttgctattttagcgtcttcccgtaatagaacacttatcttacttatcaaaaaataataataataataattgatctaggcagtaagcttgaaaagtaaagaatttttttaaatacttctttgtgtgacttgaataattctaaaaattctagagttatgaaaaattcaattttttctgtttttcaaaggaaatcaaagcaaattgttttatcttcttaatttttaggcccttgacgcgtttaacatgtttaacccatcctttgtgcgtgaaagacaaatcttaaagttttctgaaagttaaagaaggtaccttagacaaataaaaaattattatctttagttcaaacgtgaaagccactacttgcaagagtggaataccccctagtggaatgtgcaacatagatggaaggtaatttttcaatctatgaaaagtttcccgactaaataaataaataaataaataaaaagagaagagaaaaaattattaaaatgggggcagaattattttctgaaaagatttcctggaaagaaaaagacatgttaaacaggctcttgcttttgattttcttctgttgacatattttataagaaatattggggctgaattatgctatttttaaaaaattatattatacatctaatggtgaattcaatttttttttttgataggtaatggtggattccaatcttattctccactcaccacacaatatctgtggactttctttttaatttaaaatatgcatgaacaaaatttgtggattaaaaaaaaagaagaagaaaaagaaagaaagaaaagaaaagatgttaccacattgagattattgtctcctgtacccaatgaagatgtgtatttaagagatctagactgctgttttagattgttcattaatgggtgttcttggattttgaagccaaaattagttaaatttcttcagtgtttcatataactgaaaattgcctttgctcaactttaatttgtgattattaaacgaattaatgcaatccctaacaattttttaggttagagaagaagttatgaaggttaataagtggcattcagtctgatctttcaatttttgaacctaaagaactatcaagctatgcatagccgctattctaagctttgagagtttttatttatagtccttctgttctattttgtggatctatcataaatgaatgaatcatgtttccagaactatgtgcaggcctggaa

SEQ ID NO: 10944 - DNA, 2207 bp, Vitis vinifera
  Intron number 12 from transcript GSVIVT01028167001 (locus GSVIVG01028167001) derived from phytozome v7.0 (chr-ID chr 7; pos 4354441 to 4356647 reverse strand)
aagaaatattgactctactaaaccttcagaaacaggtatcccttagcttcaagttgtttttaatatttatttttgtttaattgtatttgatttatatcaatctttgaatgtgatgtctttgctcattgctaaatcatctttccatgtttgatggtttcttatttaaaataataaaaaatgttgtgcaagttttaattttccagaattctgggcaaacttttcaacatttctgtaattttcactttgtgtactataatatcctgacattccaaaaaattagagtaagtgtgtcattttcttgtctcttctgtgttcatcttcattcagttttttacttgtttggccataaagtccctgtactttgattaatactggcatattgataagtgtttgcatgtaaacatgtcaactgtccacaaatatattgcaacttattgttgttgtgatgttcagatgcagttcttgttaatcctactgccaggtagtagtagctgttgggggtgatgtgacatcatcaagattcttttattaactctttttgagaaaaaaaaaaaaaaacttttttcccactagttatgatggtactggtcaaccaactggttccttctgggttttgttgttaaactttgttactatatctccagctcttggttgatgattctgatgttgaattaagggctaaacttactccaatcttgttacaacacgattaaacttcctggacaaactaacttttccaggttatggtctgtcattcctatgtctggggtcaacactactgaacctattgcctttctccctcctaacaaacctcgttttcaaccacatatgccaagggaatttcagatatttgcagaaaaagggatatacaggaaacatgcattcaagacaactttgagagctaattaaaactactccatggttcatagcttacaattttatgaattcttaatatttgagcaggcttttacactctgttgggaaccaagttcttcaagagaaattactcgattaacagaaatgaaattaatggaattgaaattcagttcctttgtcctgtttgaaatagagggaaatgatataaagtcaattcatttccattatttggtttagtaatggaaaagaaaccgatttgtgtatgtgtatacgcacacacacaccattgtagaacttcttaaatcataagaaaaaatgtattattttaaatacaatgtatgaatttatttattgtcctagatttataaataatggatgactgattcaccacaaaaggttcaaatcctgcaaaatcaaataaacctaaactacttaaagaataatttgactcataaaaaaattaaaaagatataatacatttccatggaactatcttcctttcttatctaaataagaatctagttaaatatttaaaaattaacaaatcacatatgcatctaggtttagaggtttatatgagagaaaatattctaaacctgaaaagaaaaaggatcatcaaactcatttgattttatggagatttcaaatatgtaaaaaatctaaaaatcttaatccaagtgaccaatgatgataaaggtggaccaagagaagaacaatggtaataatgatggaataagggaagaaacacataacaagttgcaaagaacagagaatagtaaggatgatttcaaaaaaccagaaattgtatcttatcttctattttaatgaattttaaatcagattcagccttttctataaggaattcagcactttcataagaggctaccacatgatttgaaatccttttccatttacaggtcctatcggtttcaaaaattggaattaataatgttcattcaattgctttcatttctcctcaggatcccttctttccaaattcaatattggaacctggagtatataattggttaggaaggagaggcatgagaattgtgatttatcagcaataggtttagcagttaaaataacaggtcttaaaagaggtttattaggacatgacattcatatgccatagtcatattcaacagagacaatggaagtatagctataatctgtttctattattaaagaaaaaggtcttaagggaatgcttcgtatgatttgtaagagtgggacacagggttctgcactgaatagatagtgtagatgtttaacctctatgtgtttgattatcagttgcaatacaaggaagcagaaggttcttcgcatcg

SEQ ID NO: 10945 - DNA, 5497 bp, Vitis vinifera
  Intron number 2 from transcript GSVIVT01032627001 (locus G SVIVG01032627001) derived from phytozome v7.0 (chr-ID chr1 3; pos 2069313 to 2074809)
ctatacttaaggtgagagtcatggtatggtattccttaaaagatttgctattgagaattaaggtgcaaatttggaagtgtttgttttgtttaatttgtttatttgctgaaagagttgaatagccaaatactgatatagttctctaaattgtaattttaagtctggaagtgacaaacatattgctataggagaactgttcaatcacaatgcaaagttgttatatataaatcatgtactcttactgcaattatttatagatgtattatagcccatgtgatgcatcatacaagattggcaattgaaagtcactctgtatgcagaagctaaaatctttttaattagctcataatcatagaatgaataatgttgtgctttcacatcttgggtcacttgattctatatgttacaaaatttcaaagatatttagtcatatcttggtatcatatctctacctagtttggatcaatatttagtcatatcttgatatcaaatctctagccattttttcttatccaagatttcgttttggcatctacttcttcaattttgcccttgtatggatgctaagttggattagtgacaaaacatgaaagggtggagtgggaaatgattgcttctatgagaattgggggttaccatgatggggacggttttggaagaaagtctctgaaatggtctgatcatgtgcaacaaagagtttgatcactgcacctgtaaggcaattggcttgatgtggatagatgaatcaatgaaaggccaaaaaggatgtagttgtggtagtttatctcatgatggtctttgacttaacatgcttgtatctagattatattagtgggtcagttgatcctcaatagcttcagatggagaataacaattaacaaagcttgtgggttataaaccttctataccataagtacagatcagcaaacgatctcttggagattaaaaatgcatctggttatgatccagccagaatgaatagagaggtgatcaaggaaggatttttctatacagcttagccatcttgggtgggggtttagatgcaattggatgaagacattgacacttgaaaagagtccttacagaaaactgaattgagatgcaacctattgatcttcaatactaacatgttctccctatccttactgattgcaacgttagaaatgcttgacatgaaagactccaccaactctatctcccagttatgagaccttggaaatgattggctttaatgcctttttttttttctctttaagcatgaagcacaagtagttgtctacatcagcttctttatttgggtcaatattgaacaaattcggaaaaggattctctggagggattttccttgatcagatgtgaaacaaaagcttggttggaggtccatcttctataaagataataattaaaaatataaaaaccgtcttgtcctcttttgatagctttccaaagtctcaattggcagactctagaaccccagtgactcccatccccacctagggatctaattactttattatcatgaatccctttcctacataactacaaagaacttgcatttccatgtttgttttgtttgtatttgtttcctaggtttgtgttggtgctttataagttctagtttaatgttttgcaccatctgaaaaatttcccatgtgtcatcattattttttgttcaaatgttgggagttcctttaaatgcatttacattacaagcactagtgaactatatgatcccgctggcttactaatttagggctttgattaggagtatttggtggatgaagtgcatataagctcacaattggacagtgtatttgttaggcaagagttccacttaactaaatatgtgttgatttttgtggatgtccaattttgtgcgctccttatggacccatgcttccatgaaatgtattttagtgcaacatgttgaaccacctatagtgcatccacgcttgtatgaaattattgttcattcactcagttctatgtgtcttgctttgacacttagagcttgacatcaatgtactttgctttaagttggaagccaagattggcgctaatgttgacctacttatcgaatgctcttttatggtggatgctaaggaagtggacttatcaccactattggcatgatacttgtttagtgatgtaccactcattctttccacatatgaagaagaagaatgggtcaaccccttttagttcgtgcaggtaactccttagagccctcatagggatggtttaacttgactcttgtaggggtggcatcaacttaggccccctcacaagggtgcatcggctagctctgccttttaaggttgccattgacttgactatgaccccacacagggtggtattgatagccacctgactttttacattagtatcatcccatccacttattacatggggggtgcttccactttttacatttgtatcatcccatccactattacatggggggtgcttcctataagtttgtaccactctatgacctatcaacttagtctccaggctcctttggagaagtcacacttaggatgtagaaccctaatgttgtctattaaaacacctaaaaattcttttttttttaggaacaacattaataacaagttgggaaggcttaggattagggtcttgtctcttaataaagccttgcttgaaaagggagttcctttggagacaggttacagtggggaattttggggacgaacctggaggttggtgctctcttgttggcaaaaagggttatggtgttggcttgtggaaggcgctaagaggaggttgggaagcctttaaagctagaacaatttttattgttggcaatagaagaaggacaaaattttggcttgatgttttgtatgaggatgctcctttaaaggattcttttccatttctcttctcttttgcttctaataaaaaggcttgggtggtgagcacttgagaggtcattagtggacaaggtgtgtggaacatgggatttatgaggtagttttaggattgggagctacatactgttaaggggttacttagaaggcttcatgtgcttggcaagagcagtgaggatgacaatttagttgatttggaagagtatcaagagtgggaagttctcagataaatctttctactcttccttagggttggacaaaggtatttctttcccctcaaagctagcgtggggctctttggtgcctttaaaggtgggttatttttgcttggccatggtttgggaaaggttcttgaccttggatcaacttaagaaagaggatgggtgttagctaaccattgttgtttatgtatgaattcaaaagaatcaactaatcacttgctaatccattatggaaaggcaaaaggtctttgccatttgttattttctctctttggatgttcttgggtcctcttttttttgtgaaagatttgcttaagggatggtatgcgagttttattagctaaaatagaataaagatttggaggacaacctctcttcacttgttttgaattttttggcaagacaggaatcaaagatactttgatggaattcaacgctcggatcaagcactaaaggactctcttatttatatccttttccagtggactcgccaacatattcaagagggccttgattcctttttagattttatcaactagttgtgtattagttagtgagagggtgttttgtatacccttttaaggtgtttctgttttttggctccctttgtatatctcgtgtacttggggtgtgcccccgctttttgtttggtatctttggtatattcttggttgcctatcaaaaaagaaaaaaaaaagaagaaaaagaaaaaaagaagccaaccataacaacattttaagttatctataccaaacatttttcttacgactagatatagtctcttggtccttgcgaaaaggaaaaaggaatttcacattcttccttttgggaagggaggattaggaaaatcctattgattgcagctttctcctaacctttgggaaaaacatgaaaaaaagagagactcaaatggtactatacctccatcaccccaaaatgaaggaggtgatatcgtagttcttggtcaatggagatgcattgttaggtgctccattttattttcccattgaggctgaacctaaacctatgctcgtgagatagttgtccatacatcaataagggatgtatggattcttgagaagagaggagtcatggtggtcgacttggggtaatttggtccttgggtctctgtaaagagctcatctcctagggtcctctcctaagtgttctttgctgctctatccccatttgggaccacagcactcaccgtcttcagatctccttgttccatcacttattcccaatcccaagcattctccttgtagtctgctcgactcccctcttaagccttccacctcaccatccatgtggctcacgtcctctcctactaagaatcctacaacaattttgaaatagaatctttttttgctaattctttctgatgataatgacattgttctacaaccttatatatatttgaatgaatacaagtatatatttacatgaatgttataaaaaagggattggaaaattaattaaaagattgactgataaagagtgtaaaaaagcgatagaataaaaaaaattgaaaaataaattaatttaaggaaataaatccatgaaaaactgagatttaaactatctaatgtttttaacatatattacaggagaccaccacctctcagaatcatgcctccaaagacctggaaatcctcctagttgatggtctggacaatttaactgctggtccctgtttcttaaacactgtttcatatcttaatctgttcatctatacaagttagttatagatttgggttgatccatatcagtctaaacttttaagtcggttgtaaatgaaggtcctcttcctttattcagttttttggattggttgggttctagatgagggctggtgatttttgtatctcctctttttttgtttgtgctttattgcgcctcttgtatacaccctgtatgcttttgggttagtcttaaggtgccctttttctaatatatttctttctctgtgcttttacttatcaaaaaaaaatatcagtctaaacttttagctttacttatcatttcacacttttaacttttagccatattctagttcgtgtcaaaaacacgtgcaaagctggcttgtatcttttgtttagtcacttgttttgattctgaacttcatttattgcctttttgaaatgtaagcaggccaggttccttaatactttctgttaaagatttgctcttaatataatttgtcatttatattgcctgtcatgttgttgtgctatgctatgcgcattttattatattgctcttttgcctatttatagaaaagaaatattgtcatgcctaagttgcactagttcagttctttgtgtgtttgaggattcatgatatttgatttcagagaagttattttaccttttttgcctgtagcctgga

SEQ ID NO: 10946 - DNA, 1367 bp, Vitis vinifera
  Intron number 9 from transcript GSVIVT01001980001 (locus G SVIVG01001980001) derived from phytozome v7.0 (chr-ID chr1 9; pos 5998135 to 5999501 reverse strand)
aattttcttttggtgactcattgtatctttgggaggtaggatttagcctctgtttgacctttccaatattcaaaattagcttattgaaaggagagccttgttctggattgcttgattttattccttgaaacaccagactctgataatctcaattttttttccatttatatatatatatatatatatatatacatatatatttctgatggaaggacttggtcttgtcaaatctgaaaattgagaagtgtcggtttacatgcaggataaattttgttcaagcaattaaggcacaattttttcatacttagtatatttactattacttaatgcaaatttagtcaaccagggatatgaccatttattaagaataaagaggatttcaatggaagtccatgcacatgtatactactagacaacaaaactttctttttctttcttttgcattgtccttggtcagcatctacttttacctgtgaatccaggagccatatttctcttgctactttttaaaattttcgaggttattcttttatagaagaaacatcctacattttaatagggtgagagaaattttttaaatccaattagacaacaatttttttgcaaattaagcacaggagaacaacacctagagtataacatagatatatagttatatcatatctatgtatattcttatttgcctataaaaacaatataaatatacagttagctatatctacaaaagatacacgtaaacaagatattaaaatttctaatagaaataaaatacttgaaattagctgaaatatcagagaattctatgattccgtgtaaccataaaattcagtcacatcttaactaaatatttttgaatcatttcatactttggatacctatataaccattgaaaagtattgaaacaaccaatttggggaaattaggaggtattgatgacaaagaaattgctggagttaccatttctatctcgtatagtaccaacaggtatacactttaagttaagatccagtggtggactaacactgcagtgctgtgcctaattaacacctgatcaaatatgtgaaattcatcttgaaaattcctaaaatcttgtgttggtcaaattctactggagcatttttaaaaatattgtttttatattttggttcctttatttgaaaggagtttcaattagagtattggtttttactagggttgtgtctgtttgtaaggttgataagtatggcctaaaggaatgggaaaaaaagcaatcctgaccatagatgactgacccaattggtccaattttccagaactctgattgttgaacatgaaatttcttctttcctctgatccttttgtatgtatgaatgttgagcttttaacag

SEQ ID NO: 10947 - DNA, 8395 bp, Vitis vinifera
  Intron number 2 from transcript GSVIVT01013764001 (locus G SVIVG01013764001) derived from phytozome v7.0 (chr-ID chr1 ; pos 7814830 to 7823224)
aagcaaacggaggaagttctatccataaaaaatacgtgagtttttatctctatccttcatcctttattttgtgttatgccgaaatcgttgctttgtttatgtgcatttgagtagccatgatctgtaggtttatgtggatgttctgccagtagactttctttctaaattcatggaagcagagattcacaagctatactcaacatggaaaaaggcctagacctagattcaactatatgttgctcacctagccgttgacataatccttggcaatcatttttttcttcaccatcttgatgaaccttctgttacaacctctctttatcttgtcctcaattgaatccacaccaaacttcctatgattgcattttctatcccttcttacattgttgctcaccatcttaacatctacatctacaaatttagggaacagggaggtgagcatttccacattgctcaatagggttccttgcatttcaggggtataaaaaataaataatcatacctaaagaaataaaatgaaataacctaagcatgcataaataaatatttcagtttcaatttaacatataacatatatattattgctaaaaatgcaaatgaaaatgaacacatgcactcacacaatgcaccataattctcaagctttcaccaaattgtatgtctatatccaaatacactcctcactcagtcttcttgaggtaaatttttgtgtctttcacaccaaagatccccctcttcttaattcaccctctataggatcttttcattttctcaatttcttttcttttcatttccgattcacacaatataatattttacgttcaacattgaaatctcaacaatcaattctacaatgccaatttattttattcacaacaattctaactcaacaagttattccataaaatagaatgtttatgaacaaaatcccaagacgcttattctgaaaattagtctttgcaacaactataaaatcacattgataaaatctaaaacaaaaccaacttatatcttaaatggaagaataaggagtacaagataaaggcaaaaaatagaagttcccataaaaccaccaacacttcaagcacaagccactttaccaaacccgaatattggataattagtttcaaaaacaaagttcaccgctatgttccttgtgttgagataagtattctctcaaaatttcacaagaacccaagcaggatacactttcaaagttgttagtctttcactttgagaaacccacatgatcttagcagcttatgcttttatttattttttcaaaaccactttgcaaaggaggagattatctctctttgttgtctttcaaagttgttgtctttcactttgagaaacccatgtgagcttagcaacttatgctcttattttattttttcaaaaccactttgcaaaggaggaggagactatctctctttgccctcctctctctctctctcttccaattaggtgcatgtgccactcttatgcccattacttctcttactccaacgaaaaaaagaactaatatcattcatgaatgaattcattaatcccacatgcaaagtctcaatgccttatatatttaatctaaaattgtgatgggggactacatacattcccaaaagcttaagctaatgaggggtagaggtagccccaaatattaggcccaactaacattggtaatcagtcaatgtgggacaatggacttttgttcgtcctatgccaagttcccaccattccctccaaccactttaatctataccctccatttatatgcttcaacattacgtacaaaatcaaatccccataatttaatctctactcatgtatcatataactaatcagcttttataatttttctcaaacttaagctccactatatcattctccaataacttccttccacgatatcatcccaccatgtgtccgatcaagatttttagtatcaattccacaattataatcacctaagcaatatgaaaattagctatgaattaagcatgaagcacccaagttcaattcttcacaattcaaatcttaattgtttaatatgatcccaatttaacttcagttaaatctcaatcttactttagatgaacgatattgagttgattaaatctcaacttcagtatccttgattcatgtgatgtaactaaattctcaagcaatcgattgtatcataatgacatgttgcaaattcaacccaaattagttgacgaaaaatctagcaaatcacccaatctgaagtggacacatgtactctcactatagttttctcactcattcaattgacagtaaaatttttcagataatgcattattcagatattacaactaaaccttccaatcaaagaatcctcacctagggttatgtatatgcatattattgaattatttgttataagaggttactaggagtcggggatggttactaggagtctcttgcaggagtcaagtctaatgatttaacccccacttggaaagggtaagaaataggtattcattgatgtactgttcctgtctttagtttaggtttattatggtagttataagttctgtatctttatcagttaatttggtatcatttattaattgcagattttaaattctttacttactaaatagtttgattcatttcagttgtaaaattttttatgatacctgacaactgtttacttcaagaaatttgatatttaaatttttcacccactaaaattcattgcttctcttttgtacttgatcttcaatttttaaacacctactagataatgcttgggaacttcagtttcttgtcatttaaatagtccatggaaacaaggttatgggttttagggttgttgttttttaaaccatagcaacataattttttttgctttctcataatcatgcacacaagaatttctttagtatgaacagagatgatcatctggtctatggtgaaagaacaccatcacaagttttagaaggtggtgtaaaatagttgttgagaggaatttatattgatggttgttaattaggaaacatatgtgtgctagttaactttgaagaggaggtacttctgttagttgatcatcattagtgtttagttaaaggtggaagagaaaaaaaggaacagaaagctaatctcctttttttgataggtaagggaatgtatattaaaattagagaaagtagccaagtacaccagcgtacacaggatgtatacaatgagcaccttaggcaagccctccaaaaagagcattaaaaaaaaaaaccactctattcctcaacaagaccccacccactctacaaatcaaactaggtcattgagtcttcccttaaatacatgctaacccaagaagagggattacaaaaaaatgaaagttttaatcattggtcattgtgttccttatcttcaaaagctctttgattttgttccctcaagattgtttgaaaaatgcaaagtggagtagcgttccacacctttttccttttgttcccaagaaaggagccttgccaacttaagaacagaaccctcactaaagaaaggatcatccacgccaccctaaataaggaaaacaaactttaaaggaatgaagaagcaattgattaatagactccccctcatgcttacacagataacatatatttaccaagggttgccctctcttttggagattatctaaagttagcattcttccttaactagcttcccatgcaaaaaagctgacttcgggtggtaccaacagattccaaataatgttctttggaaagatgatcaccctccccacatccaaaacctcatagaaagatttgatagaaaacaatcccctcttatcgtctttccataccaccttgtcattatcgcccttcctgaccaaattccctgtcaacctggagaaaaaagtctcaatgatgtccagctcccaattattaaagtgcctagtaaagcgtagggtccaatgccccattcctcctgtgtcatcccaataatatgccacccaagcctccttggaggccaccaaagtatacaaaaaagggaaagacaagcacaagggctcctccccactccatttatatctgtcaagaactttacccttcttccattacccacttcaaaggaggttttactgaagaaaagatcccaccccttcctaatagctctctaaacaccaaccccatacccacctctaacttcacaagaatgccaacccactccttctttcccatatttcctctcaataatttgcttccacaaaacattcccattagagacatatctccaacaccacttaccaagaagggcccaattcaagagagagacttataatttccagccccttcccccccaccccacccacccacacacacacacacacatttttctcttctttgtgcaaataatcaaccaactaacaaaatgaggctttctccaaagccccacctccccagagaaagtccctttaaatcttccttaatttcaatctaacccttctagggatgacaaacaaagacataatattggcaaattcgataaagtacttctaatcaaagtaaatctcccccctttagaaatgtattgtcttttccataacgacaattttctgcgaaacttttcttccacaacatcccatactgtttcagatctacaagaggctcctaaaggtaatcataagtggaagggagtttcctacttatatataaaaaaaaaaaaaagtgaagggagtttccccaccttgtagcccaattctgtagctagactttctacatttgtaacccttccaattggaatcaattcgcttttatccagattgatttggagtttgataatgcctcaaaccacatgagcaaccaattcaaatacctactgctaggaatcctcacagaagaccaaagtattgtttgcaaataagaaatggggcaccaccaccccttctctcccttcacaactctctcaccttgaaactagacaagtagcccccctcttgggctctctccaacaagcagctcaaaacctctatagcagaaacaaatagacaaaagggatagaggatccccttgtctcaaccccttcgaactctgaaagaaacaaggagttccattaaccaacactgaaaaccttcttgtggaaatgcaccattgaatccatctaatccatttatggttaaaatccattttttccacaactacaaacataaaagcccaattgacatcatgaccgtatgctttttctatgtccaacttgcaaatgacaccactggagccaaccttcaagcttgaattagttgcttccttcgctacaagggatgcatctaaaatctgtctcccctttacaaaggtgttttgaaacttagaaaccactttttccatcactttctttaatctacttgttaacactttcaccaaaagtttataaagacttcccctcaaatttatagatctaaaatctttcaaatactctacaccctacttctttgggattaaagctaaaaatgtagcatttaaacttctttcaaacttgtcattggcaaaaaaatccgaaaagaaccccattggctcatccttaacgaaatcctaactaaattgccaaaaggtcatagtgtagccattagggctaggagctttatccccacttaaatcagataaggcaacacttcctcctttgaaaaagccccctccaagcccaaagcctcctgctaatccaaagtattgaaatatatgccactaatgcttggcctccaatcaccagaatcagacaaaagatggtgaaaagcccgtgtcattccttgcttaacttcagattcctctgtaagccactccctgtccacctcgatcttggtcaaaaaattcctctacctatgagcattagccatttcgtggaaaaacttggtgttcttatccccctccttcaaccaagtctccctagacttttgcctccatgaaacctcctcaaaaagggcccatttgtgaaactcttcttttgctgcctgtctagatacctcctcctccagcagtagaggagattccatctctttagagtcccagaatcccacctgcttcaaagccaactccttttggatatctacatgaccaaaaactaacctccttaatatttctattcctaagccatcgacaaaattgataacagaaagattagcattcatcatcatcccatttgagcacaaggacaaggcttttctaaaaacaaatttttcacaaatataacacctattcctcaaaggttcttctattgcattattttcaaatagaccaaaagattcaatatttaaggtttaaactaccatgcaattatcactcataagaacaccatgcaattaagcaacacctctctaggctattggaggagaacccatgacacaaaaaaatggagaaaaacaagtatcacaaaccggaaacccgcgatgaatatgagcatgctccgcacgcttatgattttgttacaaacctggagtcttggcaaagccaacccaataatctttgcctcttggtgtactactaaattagccaacactagttaatgatctttaaattgctctctccatgaaaacttgctccaatggagctgacaactgaaaactcatgttcaggaagaaaccattccattgcttcctaatggcttttccacgacctcaaaacaattggctactttagtcacctttttttttctttttttttttaaccgtgaatgtccgggccggcttacgcacacctcgactaatcccacgaggccctgaagttaacaaccgggtaaacctccagtggtcttaaggggactcgaattagtgaccattgcggagcaaacccaaagccggaccaactgagctacccctcagggttggcttctttagtcactctaaagcttcgtcttctttgcatctccatggatttcctcacagttgcctatctccataaactatggtgatttacttcactgtgaaaatttaaagcctctttcccagcaaggccttacttttttttgatagttatatatatatattaataggtttcccagcaaggccttgttgagagcctcaagacatctaatgcccaagtaccctatagccttctctgaacagactgtttactgcctcaccaaatgatctttttgttaaaatgcagtccctttgaatcttttttaatctgtcctttaccttctgaggaattgctggaggcagcaaaaagcatgatcataaactggagaagatgctctttcaaaaggataagtgtacaaccgttagtgcaaatatttttttcttccatgtaattgaacctccccttaactgaggaccaaacagaggacttgaaagacacacccaagggtaatcccaaatacttggcagggagtgttcaatccacgtggaagcccaattgcttagccccttaactctccctgccggaatgaaacagtggaaccttttatagtgatcacatttggcttctatctagattctctgcttagtttttctgattcatatccttagagcactttggaattctggagttgctttgaattttttggggaatagttcgaggaagattttaagttgtcagtgaaagaaaatgtgttctagaaaaataagcatatgttgtcattttaggattattataatcttgaggattctgctttctactgatgtttaagatttttccaacataagtccttgaggcctgatgaggaaggcattggggtaggggatgttggaaggtctagggttgagttccagcaagaaccagagaaaaaaaaaggttactttcccaatgtaattcaagattttgcatatagttgaggagatatttgtggtattggttattcacaatagattcactattgaagtaatatggtggaaatcctagctatgtcaggttcaagataagctatgccctgtgcaaactaggaaaatgatatgaaaaattcagaggagtttcttgctttcttgcttttgtgtgggctcccagctaatagtttgggattgaagaaagtttttaccagctgatacaagcagtactaattttcaaaatgcttggtttattgttataaagtgtataattaactagcatgatttaacaggaaagggaagctaattttcttccttttatgcattaaaacgacttggaattatttgagttctcttgatatgtcaaagctgttttggctggttttgaataaaatttttacagaaagagggataataatggtttgcatttcatttattttccttcttttatctttaataagacttttgtggttacctatgcctgagaacttgcattatattttttattgttgctactgatttctcgaagtttttatttttaatttttgtctttttgttctgatgtgtatatttgatgacaatgaagggagattgccaaacatctctctcttcctccagtga

SEQ ID NO: 10948 - DNA, 5914 bp, Vitis vinifera
  Intron number 23 from transcript GSVIVT01021589001 (locus GSVIVG01021589001) derived from phytozome v7.0 (chr-ID chr 10; pos 7598365 to 7604278)
tggtattgttctattcggcctatctatattaccaggtatgtggaattttctcttactttcatacacgtctcaaccattttagagccattaatcattctcaccacatatagacagaaatgatacatttttaggtgtattatgttgccaaaatgttgccaagtttatggggaaaccctgattgacaagtaatggaaattattggcagtcccaaaagtttctcaaatttgaccagaaaatttgaatttcaggaaggctatatagatcttttttcgacattatactctatcttgggtcaagttaagtcataggtgttcacgtctcctcaatttccagagctaaggggaaaactttcaatcaaaggcaaattaaagtaaatcagtacttattactatttggccattgatcttcattgcacatgattgacacatagcatgggattttctctcattaggttttcaattgaagctaaatccaaattctcataaatgcatttggtttttattctatccattactttggtacatgatctttgttaccagttttaggagctagtgtgcatttaggtgtttgattcatttaatcctcgaatccaaggaaataggggctggttcaattatggaagtttatgactattttttttttctttatacctagggacaaaatgaaaaatatatgtattatggtaagaaggaggatacttcactcaaatttgacatacgaatgcaacaaatgaataggttaaaaaattatttgagggaacttattgttgtcaagcataacatttctctttttatgcattggacacacctgctggtttcatatttgacagaaggcatgtcaaacacctatgcctacatccatactcatttattatcatgtctggtacataatagattaggaggaatccctactttatctctctttgtttttcaaccattggctcagaattttcatttcagctccaatcatttttggggcacatgcttgtttttagattcctccctttgaggccataatcagaatagtctttcttaagaaggagcctttggttgatagtagtggagatgaattaatccaattggagaatgcattttacttggatgcaaagaaacaagaagagaatttgactcctaaacttgcagcaaagaggaccttaaggaaagggaattagaagaggtgttgttaaaggaggaggtgttttgaaggcaaaaaaaaaaaaaaagtcaaatagataagagaaggggattgcaacactaaattttttcatagggtggccaatggtaggcggaataggaagttcataaaatctttagtgtcagaagatgggaaagttttagataacattgaaaacattttggaagagattaagcaccattttgggaagttattatccaaatctctaggtggtttatggaggatagaaggactagattggtctcccatttcagcaaagagtgcgccgattggctagatcgcccattttcaaaagaggagattcacaatgttgtgttgcaattaaacaaggattaggcccttgagccagatggtttcaccatggatttatattaggagtgctgggagatgattaaggacgatcttttaagagttttcttagagtttaacaataattggataattaatcaaagtaccaacactactttcattcctttggtgccaaaaaagagtcaaatgagcagaatctttgattttcaacctatctattgggttacttgcttgtacaaaatcatagctaaggtactatcaaggcgattgtgtaaagtcatctgggatgccattttcatgtcctaaggagtctttgtagaggggagacaaattttggatgttgtcttgattgctaatgagttggtggatgagaaaatgagataaggaaaggaaggggtagttttcaaaattgattttgaaagggcctatgaccatgttgattgagatttttttggaccaagtacttgaatgaaaagggtttagttcaaaatggaggtcttggatgaggggatgtttgtcttcgacaacttttgcagtcttaatgaattgaaatgccaagggttgggtgaaggcttgtagaggctgaaggcttctagatcctctttcccatttccttttcaccattgtggttgatgttttaaataggttgatggtgagagcaaaggaaagagatttttttaggggtttctaatgggtaaaaataggactagtgtcttatttacaatttgttgatgatactatctttttttctagagcttccttggaataaatgcaaacccttaagctcatgttgttggtttttgggaggttttctgatcaccattagtcaagatcaaatctccaggatgactttgatgcttgattgttcaatctcagatcgacctttaacgtatttgggtcttcctttagggttccaaaatcaagttcattttgtgatctggtgattgactgagtttctaggaggttggatggatggaaaaatgttttttcgtctttaggatgtagaatcactcaaattcagttttgtttaccgcacatctaaagctacttctcattccttttcaagatttcggtatcaatagcatcaaggattgaaacttatcaaaaaaaaaaaaaaagcatccaggattgaaaaaatgcaaagagattttttatggtcgagttttggggagggtaaaaaggatcacttggttagtttggatctagtgtgtaggcttaaggagttcggttgtttagggtttgagaaaattactctaaggaatcaagctttattagggaagtgactttgaaagtatcctaaggaaagcttcgtcctttggcatcattgcccctagaaagccattgcacttacccctccttcttggaatcttttgtttcatcgtaatctaattgatttggagatcggggatctcaaaagactaatgacttttctttcccatgtacatttgtctccatctattccaaatgcgaaagtttgggtacctttttctttaggattagtctcagttaaagctttcttcttagccttgaccaatttatcaaatttagttcctttccatccaactaattttttttgtggaaatcaagagtcccttttaaggtcatgacctttgctttgttagtgacacttaagaaggtaaatattaatgatatgctacgattgagaaggcctttcaaagcccttagtcctgattggtgcatcctatgtaggagtggagagatgtttgatcttcttttcctacattgtctgattatgttggggttatgacacaagctattctcataggctagaatggtgtgtgtttagccaaggagtacttgtgatatgatggttatttcctttatgtgctttggtaattatattagaggtaagactctttggaagattgcttctctcactttgatgtggattgtgtggagagagaggaatgctaggattttttaggatacttgcaagatgcatgagatgatgtgggacctgattcatttctttgtttctttttgggcctaccatactgatgttttcaaaccttttcccttgagtgctattcagtttagttggctattggtttgtacaccttagggttgggcttacttggtgaggagttgagttgagcttttcaagttgtatgttgtgtatggtctttttattccttttgtacaaatctccctgtaaagcggaaggttttttgggtgttttgatttggtttgtatttcatggggaggatttctcatccttcttatgttttcttgtcagtactttaaacatcttttgtttctaataaaaaaaaaaattcattttactttaaattgcataagttgtgttggtttgttgtctctatttccctctgcttatatttggctgctacttgtatactccatgtgtaccttgtgtgcctgatccaatcgcttttaatatatttgctctatgtccttatcaaaaaataaaaaattaaaaaatgaaagttgtgttgcctttggtttttgttccttgataaaaaatgagaattcattgaaccaaagacaagattcgtaagatatcctttgcaacagcaaaaggcataaagcaaacagaaattagagagccaaatacataatgaccgctctatgccttggataaatcaagtgggtaggggtcctaaataaacaactacaaagatctagcacccctcttagtgaaattgtcagccatctggtctgtcaactaaagggtttgggaagaagtctttttcctaactggaaacaacaaaaaccaagaataacaaggatcagctatccttaaagctttgattctcagactctccaacttcatgaaatgttctcaggtctacaccatacaacatcgatgtaggtataagatccatgttggacatcctattttgctttagatacagtttttttattttagtcgatttctgtttttactttcatcttccttggcatatagattacattgaagatagtcagagtttgctggaataaaaacccttttaggaatatcagggataagaaaaaaagatgagagataaaagagagggaatttctataacgaatgcctttactttttatctaattgatttttttttctttcattatgtggggtccaaatatccctatctattattaagattctttttaaccaagacctcatatcctaaatttggacctgtgaaggattggacacctaaataaatgccaacacctgacatccacattcatatccatgcaacagagccttaaatccacattaaaaatgataaaaaggaaaaaaagatgcagagctaaaacctcttaactgcacaactgcagcccataaatgtacaaaatacagatcttaagggagtatatattcccagatgaagagtttagaaagagcatgaatccttctatccaatgaatgagttgccaagaacctgtgccttctgcggagatccatgagataataactgatgaatcccttccattagatagtatagtttgtacagcagaaccagtagcaccatttacacttcccatggcattaaaaactcaatatcatatagatcccattgcttgcggatttggagaaagcctgcaatacttcctcactgtagtctctaagaataaaagcacaaactttcaaaaatgagcgtaagtcttccaaaggatgacactaaggacacagtatccttttcctctggttagtcaatcatttttctatccaatgataatcccgtggaaccttggtgacagaccctagaatggatgtgagggaacatattttatcctacaaaatttctgcagatccagtcctgttctcaaaaatcttgagtttcttccactatattgcccaaataaaaaacagaaatggcaaacttccccaaaaatctatgctcccctcataccaaagtccttaaaacaagctattaatataccagcaatttccataggggccacgtaaaggattcgggtaaaggaaaaaggtctctactaaaacatagaagcaagggagctatgaagaaaatataatactgtttccctgctgaacacgtatagaacatttatcagcgcaaaaggttttataaggtttctggatttgaaccatatcattgatattgatgatctgacaggcatattaccttcagttatgaatatgaaaaaatacgctattctaggaaatgggaaatgcccacttttgggtgttttaattagtacattttgttgattttgttaccttttaaattggagaacgcatgcatgaattctccttttttattaaattttattattgactttcaataaatttttcatgaagaatgggtttagactgtatattatggagccccttgtctatagatttactgtttgcttatggaagcataattttgttttgacagaacacagcccgtgaagtaaagcggttggattccat

SEQ ID NO: 10949 - DNA, 6417 bp, Vitis vinifera
  Intron number 2 from transcript GSVIVT01011697001 (locus G SVIVG01011697001) derived from phytozome v7.0 (chr-ID chr1 ; pos 5031167 to 5037583)
tttcttctgcaaaccttgttaaatcgggttcagaagtgagttgttttttttgggattttttttaagcttcctgataccgtcccagttatctacctgggtcccttattcttgtttaatttctattattggcaaattttgattccttagtaatgttgctcatttatttgttcttattatttcaattattatcatttgtatttagtccatagccaattgtatgaattccatctctactactttcaagtgcaaactgtgaagatttttgaatcacgctggttttcctatgtttttatttttttaatgaaggtatgacctttaattatatgtccatgctatatatatatttacttcctttatctgccatctagtggcctcactccttttcctttctttttattttttaattttctttccagagaagaaattcatcttcatcaggtccatatcacagtgatgacaactgatgtttttccagttgctatatatattcatctagtggtttcactttttctttggcgaaggatgatagagattcatctccactggtcccccctattacagtgataaccaatgttttcaaaatgtgattgaactggaaaatttatctgttcacggttcaatggtcagacctatagttgaactggtgacatcataaatatattatttttatattattaaagttaaaaatgattatagaaatttaataaattccaaaatctttatatatatatatatatatgaagaaatttaaaatcaataatgtttatttatttttatctttgatattattaaattaaattatgagtgagtacaaatattcatatattttaaattctattaaataaaataaatataatatttgaatgagaaaatatatattaaaaaaagaaaaaaaatttatttaatttttcttatatattggaaattatatgcttatatatatatatattatgttatttttaattttaataaatattatatcatttttaattatattagctacaaatttattattaccaaattttttgaaaaaaaattatgttattttattattttatgcatttaagcaacatggcatcaagctcaatggagtcttcttcattctttcaaccttaggtcttaggttcaagttctcatgcactatattctactacattcagtgttgcagcccatgaagactgacccattagggtgagaagcccattttgccaaaataaaaagggaaatagcaaactcaaaactagactaattggttcaccaattcaacggtttggccatcagtcagtttggttcaagcttgattcaaagcctctttcaactcaaatggtgaattgaactagactaggggtccaatccaattcggttttaaaacattggtgataacaactgatgtttttctagttgctcccacttcatatttattaaacatagtctagcgaaagagagattaatatgtttatgttctaaaaccaagtccaatgggttggagatggtgggtttgatttgaactgcaatttagtagcttttggttaaataggtcttgttcaagttgttcatcttttcacaataccttggattgtgtggtgggagagaaatactacgatctttgaggaaaagttgagaacggtagagattttgtgggatttacttcacttttattcctcattttgagcctcttaaaccaatgcctttaaaggcattttattcaatgttattaagcttagttgacattcggtttgtaaatcaaaagggttggacaacaatgagaggagcctagttcgaaattgaagagatttcacctatttctatagttaagtggattaaacctttgtgtatagttttccttgtatagtggaggagtttagtcatactttgatcaatttcttttattttgtggaaggactcctcatcattgtcatgtgctttttttcacaattaacatgtttgtttttgataaaaaaaaaggtagttcattttttgacactgaaaacaaagtgactttttgaatattctttattgctctctcatattgcattggattgtgtggtgagaaaaaaaatgttaagatctttgaggaaaagtggagaatggtagagattttgtgggacctacttcacttctatcctctttctaggcctcgtgtaccaacgtctttaaaggcattctactcaatgttatttaacttagttggcattcggtttgtaagtcaaaagggttgaataacaacgagaggagcttagttcagaattgaagagatttcatctatgtatattaagtggactaaacctttgtgcatggttctccttgtatagtggaggagtttagtcacactttgatcagtttcttgtattttttggaaggacccctcatccttgtcatgtacttttcttcacaattaatatatcttttgtttctgataaaaaaaagtagtttattttttgataccgaaaacaaaatgactttttgaatattctttattgctcatgttctaacattcttttagattgtgtggcaagagagaaatgttaggatctttgaggaaaagtgaagaacaatagaaattttgtgtgatgtacgtcacttctattcctctttttgggcctcttgtaccaatgtctttaaagacattctactcaatgttatttagcttagttgacattcggtttgtaaatcaaaagggttggataataatgagaggagcttagtccgcaattgaagagatttcacatatgtatatcgctaagtggactaacctccgtgcatggttctccttatatggtggaggagtttagtcatactttgatcattttcttgtattttgtggaaggacccctcatccttgtcatgtactttttttttcacaattaatatatcttttgtttttgataaaaaaaaaagtagctcattttctgacaccaaaaacaaaatgactttttgaatattctttattactcatcttcttacattgccttggattgtacaatgatagggaaatgctaggatttttgagaaaaagtggagaatgatagagattttgtgggatttacttcacttctattcctccttttggacctcttgtactaacgcctttaaagacattctactcaatgttacttagcttagttggcataccgtttgaaaatcaaaagggttggacaataatgaaaggagcttagtctggaattgaagagatttcacctatgtatatcgttaagtggattaaatctttgtgtatagttctccttgtacagtgaaggattttagtcatactttgattagtttcttgtattttgtgggaggacctctcatccttgtcatgtatgtttttcacaattaatatatttttttattcctaataaaaaaaagtagctcattttctgacattgaaaaaaaatgagttcttaaatattctttattgacctattaaggaaaatataaattgcaagatgatacaaaaatttggggatgttaagaggctagcttttcttaccatacattatttgcatattccaaaataataatgccactccaagaatcaaaattgattgaattgttctccatagtttttaagattgtggcatctataatgtggttgtaagtaacaaagcttttgctaagagaaggctttagagatttcttagtgaacctgaattctctttggactgtggctatccatgtaaatctgaattggttctacgaggtgcatctgaacccagtcaatagaaaaactcttttaagtgattactgataactttgttgtgttttcctgcatcattttgtctttgttccctttgttagctacttttctaatctttatagatgggaggcctctttactagtattttcatattactttccattattttactatagaatgtttgcattattgggaaccctggattacttcgctccttgaccctaggtctcttagaccacatgcaatctcatcctaggtgctctatatctaatagagcggaaacatatgggaacaaaaaccataatatatcatagattgggaggtaaaaggctcatacttgcaatttgaatgttcctaaatcgaattcaatccgatgaagatagtccataggtgttgtagatctcatagacccaatgattttccccgtgatctctcctttcaagaccttggcacgagagaagggtggtattctctctcttttaaggggtggctagggtttgccctctagagtttagaagacataatgcaaaagtaaagccctaaactcttaacggggtttatataggcttccttatgggtttaagtgatttgaacccaacttgagcttgagtcacttaatctaactcacttgggttttaattaattaattagccctattggtgctcattaattaattagtctaattcagaaataccattcataagatccaatgcaactttgcatttttaccaaaacattctttatgcacacttatgaattacaaacccaaaatgccctcaaatgagtatgtcaccatgaattaggagcttgaaaggggaccattaagacctgtaggaaaatactaattccctcataatccaattctgaagttgacttagcactccacttaaaagagtcaactacccttcagtatcttatgatattacaacaaggctaatttcgcgtccatgacttaccatctactacatgcagactccctatgaattagtgtttttaatctaacgaggtatatgctatcaacttctcgagatcacctttcccatccttgagctacaaatcctcctattatgtgatcaactaacatgccttacctcacaaagagcatatgtcaaattccatttaaagaattactacgaccataattttcctattacatgtcattaggattacctaagggaacaagctgttttgatcccatgatatatcatgatgtctctatcaagaatacctgtgaaagcctcctattgacttcaacataaactcaatattctctcaaggttgagagcttatgcaatatagtagtttggtgaattatgattacccaatagctaatttcatgattaatcataggttatatccaacatgtaattatacacactagtgtacttatcatgagaaagctatcttgatgacgaagacaagttatcattccaatattgaggtagtgtattacaatatttgctggattgcccaaatccatgaaccgattatgaacaacttattatcttgcgagaaatctatgacttgtatcttttgtacaacttctaatgtattcaggtcatgtacaatgcaagtgatagaggtgcgaatgctcagaatacccaatcaatgcaaataggatagtaaaggaaactagaattataaatagttaaatttattaatgaaactaaagtttgttacatcatagcatgctttctagggctctatcctactatgctttctctttgcctttgaaacattgtcctcttgggtacctatttatatatgtttccagtttgtctattagacaaatatagaaaaaaaaagggaaaaaacaatgcccttaggtaagaaacacttggaggtttctttgctctctcaaagagaaaaaacactttgctatgtttgttgtacctttttggcatacctcttcatgtgtttttttctaaatatttttttatgtgtactctctctctttttctcctctctttccctctccctaacaggcaaccatagcaaatctattgaaagagcgccaaaaaaagggggcacaccctatgtcatacaggaagcatccacaaaaaacaaagaaagaaaaatgaaaggagctggccaaaatcaccaaaacaaccaaaaaaccacagctacctgtaattgggaccatctaggaaatcgaatgttggcaaaatttccaaatctagcttagtgtttgtccattccaagagggctctaatgaggtcctcctttaacctctaatctgagagctctttactcctaaagattcggcgggtgtgctctttccaaatgcatcataacgaacacaagggaggcatcaatcttcttcaaaatttctgagatcttgatcttagagaaatttcatagtttctcaggacaataacaaatttttaattcccttgttttcccatccaatttctgatgatacaactccaccacaaggtacatggaccctataatttccattgctttcagggtagaattatctcttcttgaatctgacggtaattccaccactttctctccaccacgctcacttgcctctttttaattattgcaagtacttacttcaatgccaattcttatttttcttccttatcaccaactacccaaatcaaacatagatacttggaacttgtcttgttgctgtaatggcctgccacagcatgctaatgtttgccatgttcattctgcagtcttgagaaaggagttgaactggattacca

SEQ ID NO: 10950 - DNA, 8227 bp, Vitis vinifera
  Intron number 2 from transcript GSVIVT01025340001 (locus G SVIVG01025340001) derived from phytozome v7.0 (chr-ID chr6 ; pos 1854962 to 1863188)
ggtgtggagactggtgaaaagtagcaacaatgcaggccaaaagatcccataagaatgaaagtaggacaattcatgcaataaatcatttttagaatgaagcaaattcctaaatcccctttaaccaagctgggcttagaaggcctgttaatggcctttggactagactgaccagatccacttcccataacacaggatttcaatctgaaatcaaagacttggttcatttgagaatttgtaccttcattctcagggcattgttagcttcaattagcatatgttcctacactcacaatttcttatcaaggagtctaccttacaagtcttgaacttgattgtaaagcaagcggttcttagttacaaccatggtaatcaacaccatataagacatcccaaaatacaacatccaaaattaaaaaatatccataagcttaacaacattgaaaaaaaaaaaaacattacaaagaaattgttagcaaaatatatatatatatatatatatatatatatatatatatatatatatatatatgtctctaatatcatcttaagtaaaaaatctaaagcacaagtaaatcatcattttcatccatcattgtgagttggagttgtgggtcatgaattgatgaatcacctagtaaaaagaaagcaccaaaaaaaattagaaaactttactaaatattttaatataaaacaattcataaaattgataattaggtaaattggttaccttctttttccttccataaccaactttgaacacacattaaggcctccaaagtatctggatgaagcctactacgatgttttgataccaccctaccacccgtgctaatggctgactcagatgcaactgtagataccgaaatagcatagatatcacgaacaatcatctgcaaagtcagatacttattaccatttgtcttccaccaacttaaaacatcaaaatttgaagtctttgacaaaatagactcctctaagtaataatctaactccgacttcgtatgactttctccaatggtactatgaacacataagtcaaactttgaaagaggatcttgttcatcatagtttaactccaaaatagttgaacctaataaagtaccataggatgaagttttttgccccaacttagactttgattggtactcagaaagcaactcataacacattccacatattttttctatctcatttgaagcttcagacccatacattagtggaaagtaaaactctaaaatctttattatatcttaggtcaaatatagttgttattgccatcataatacgacacccactccaatacttgtcaaacttttgcaatatacttgatgtcatcgttttcacaacatcatttgagcaaataaaccaatcatacaatgtctctttgatctcacacactttgatgaagaaagtatttgcagtgggataatttcatcctaagaacaactttgttatgttgtaaaacaatttcaatcttccacatatttcctttgtcatatttcattcttcctctgatggcacaaccatgtagcatatttcacgttgcttcaaacatgggaacacatctttatatgttatagcaattgataacatcaagtatgtggaattccatcgtgtcttacaatcaagacttaacttcttattgcatagaatacgcaattggaaagttgcatcttcaaacttttccattcttgatggggttgctaaccaatatgcaaaactctcacgaattttttcaatttctacttcaatgacatccaaaccttccttagcaattaagttcaacacatgtgtcgcacatcgcatgtgaaaaaaatttccactcaataagagtgaatgctcaaagataatttttccaccaagatattgatcattccgtaattacttgagtaattatccacagtgactatagatacttctctatccatattccaatccaacaagaaatccattaatacatctgaaagaacttcttttgtgtgtggaagaggtacataaacaaacctacatcaagaaaaaaaaacatatcattaacacaaacaatatcattaaatgatcaaataaaaaaacattttggaagttaaaaaaataacataactaaccttacaatatgatgttgcaataaccaagactcatcaatgtaatgtacagtgatagtcatgtagcctttcttttgatttgatgtccacatatcagttgtgacagcaactctactttgaagtttctctaagtagctaatcatcttatctttctcaacctcataaatcttcattatatcacttttaatcgtattgcgggaaaccatcttaaacaagggttggaggctagtagcaaaatctctaaaccccacatggtcaacgattgaaagtgggtactcatgcaatataattgcatgtgcaagcttctctcttgagatttctttatcaaaggtaaaaccaccaatttgaacttttccatgaccttttctctctactaccaataattgttgcctaatatcaacatttcttcatttcatgcacctatctatgtgtacatgtaaatgttttgtcccattcttgctattggccttgagttttcctttatagtgcttacaaatagcataatcttgtccatcttctatgattttatcaaaatcattccaaacaaccgaagtcaactttcttcttttagatcccaatgttccatcagtagttgaagtactgcctgtaattggagttaaacccacgcttggcatggaaaagttttccctttcttctgatgtcatttttcttaatatgaaataaagtctataagtaaaacattcaaacccaaattaataacacttcattaccacatattaattagatggatttcaaagctcttttcctagtgttgccaaaaaaaaaaaaaaaacaatgagttacacaggcactcgaactgagcaccttgtgtatgttatttctttactattggggtttgggacttgacaactactaactagttagttccacatgagcaacatgttgaaatcagagaaaaaaaattaggaaaaataccacaccttgttgtcaccagattacagatctacagtacgtttggactctccaaattttctgattaagttgcaattacaatgatccaaataagaaggacaatcccaaatatctcatccaaatctctcatttttttccctagaaactgacaaagaaacaccctaaaccaaacaaattaacattcaaaaaaaatatcaaacgttcaagacacaaaaaataaaacaaataaatacaaatcaacaaagaatcataccggtttgtagatacatgaagatatgattcctatggagaaaatggcagtagcgtaaactgatgagactgctagtagttgtgaatatgagataaacaaggatgaatcgagagtagatggaggaaatgagattattgaatggattttcaaatggattagctgatggatttctgcattaagtgggaagaacaaccctagcgtcaagaggaacgaaaaccctaaaacgagataagaagacttgaaatgataagatgaagcaaatatttatagttggggggtaaagttgtaatttcatattcggggcagggtggggcaggtcaaattattactaaacccgatcccgcctcgaacccgatttgggttaaaaaaaaaaaaaactgaacccggcccatccttgatttctatgttcccatacccattctaataagggcaggtgaccagaaaaaccagcaaaattgtcattcctaatgatgaatgacaaagaactcagaaaaaataaatgaaaaaagatggagaaaaaataaaaaatactcaaggaatcataagaaaaaaaaactagtttatgcattaagcttttggataacagagggattagattaagagtccgtttggcagtgatttttaaaagtgtttttacccttaaaaacacttttaagtgtttttgggatgaaaataaagtgtttggcaaattttaaaaaacacttttaaaaatttggaaaaacacttgaagtgatttttagagaatcccttgacaagtgttttttttttaaattttccaaaaatgccccccccccccgtgataaatcaattagaaaaatcttttttcttttttagaaattaataggtggtcatatattgttttacttttaaaattatcttttattcaatctttttttttttattgatttagatgttttttgtaaatattttttaaaattttagtatagtgataaaaaattattatttttaattagaaaagtcttttttttttttagaaattaataggtaatcatatattgttttaattttgttttaattttaaaattatcttttattcaatattatttttttagtgatttagatgttttttcattaataaaaagttttttttgtttatcataccattttttttaattaaaattgtatgtccttttaggtaatttattaatattaaaagtgtttttatatttatacaatatattatcaaaaacactttagaatcattttttctgattatcataaaagtgtttttcacataaacactatagcagaaaacacttcaaataaaaacacttccactagaatcactatcaaacgggctctaaatcttgaaaagtaacagtaaaagaggaacaattcacataaaagaagtaaaaattataaataaaaaaaattaataataataataatataaaaaaaaatcatcttattccaataacaaattctcaaaaactatttttagtataaaaaactaatcaaacaaatttttaaaatttaaaaactattttctattttctcttctaaaaagaaaaaattattttaaaaatagttattagacaaagcctaactctttctctttttttatcataaaaaaatacaaataaaaattaaataaaatgttttcacacacgttcattctaagtaacatattaaacccgttttcaatttcacgagtcggagagtttaaaatcaaaagtaaaaattatttttttactaccacgttttaagtattctcatttttttaaaatagaagctaacgaccgacgcgggcctacttgtaccttaaaaacctatatagtttggagcatatgatatgagatgttcacaagttgtttttactttttatagtggaggaagattccttcaaaaagaaaacgtactcctttttacttcaaacttgtaaccacttggactagtgcatgcacttgctttaacttaccctatcaaaatccaattttaaatattcagtagcttaacttatcattagatcaaacaaagttgtcattaattgaaaatttaaaaattaaaaattaaaaaatagataaataaaagagaaaaaaaaaatcctattgaagtcttagtcattagatcaacatatttctacagaaaagagaaaagtcttacaagtttgactacaaaaattttaataagatttttacttttatttctattttttaaaagagatttaaatttaggaagccgaataaattaaaaacgataatacgagtaaatttctttcacaataacaagattcataatacaaatgaaatttggttgtggtctcaaatacaactctattaataaataattagcttgcgtggctcatgagtgcgcacaaccttatccacaaatatggctaattggatcataggtatcacgtgcgtttgtacaaccatctttgaaatgtaaatgggaataatgtcaatgtaccttctctattaaaaatattaaatatccaacttgtatgattttaaacaaacacatgcccttatacaaacctatatttgaaaaaccgaaatcccttgtgccaaaccacagctctctctctctaggagaagaatggaaattggccaagtcatcgtgacccatctgcttaaatcacatcatacagagtcatgcttactagtcttcgaattgttaacattaaccacaatgttttaagttagatttaatttcccatttgactgtaattaagttacatcaacattgcatggaacaattcaatggatttgaaaggactaatcaattggcctaatccttcaaaaagcaaacctaatccttttttctttaaacaagtaaccacttggactaatacactcatttgctttcaacttatcatgataaaattcaattttaatactttgtgatgttgatattacatctaacaaagttatcattccttgcaaaataataataatataaataataaaatagacaaataaaaggaaaaatcttattgaactatacatgcttttataatttttatatgattaaaatcgaatttcatatttaatgattaagacagtttaactcaaaagtcttttatgttacttcactcctaaacctttaaggggctttcatactaccaatactaattaagtctcagtaacacttgaacctaactataagaatgaatttagtcatcatatctatgggattatccattatagggatttttttttcactgcaatagcaccatgtgcaatcacattcctaataaaataacatgaatatgttttatcctcttgtagaacatttgattcttgatcaaatgtataatactttagctatcacaatacacaatagccaactcatgttgtaaacctaaatcgccaaccaaacccttaagctagccaaatagcttctttcactacttctatagttgctatgtattttgcttctattattgacaaagtaatttaagattgtaaagttgtttttcaattaataacactacaacaaaaagtgaatatataccctattggagaccttctatcaaaatttctagcatattaagaatcaacataaccaataattatcctagaaacatcactacttttaatatatactaaaccaacatatgatgttcctctcgagtatcaaaatatccatttcactatttgtcaatgaatcctttcagggagatctttatatctacttatcacattaactgcatgtgaaatgtctaacatagtgcaaactataatataaataatgctttcaactacactagcataaataccatgtggtatttgttctccctctgcattgatttgtaattataaagcacttgaaagttcgaactaagctatcagtgaagtactcactagtttttactctcacgttccaaaattaaatgttccaacaccttttcaatgtactttttcggactaaatacattttttgtgcttctcggtcctatgattatacttaatattttctttgtaattagatatttcctttataataattgaaaactccttcacacaaatatgtcttgttataaaattattaatttttttaattaacttaaaataaaatgtatgtacattaaggttttgaacttgattttgacatcggaggcctgtttggcccttcgggcattaggtatcgacctttgccctaattcctcgtccattcttttaggatcagcaaagtacgaaactcacatgccattaattgaatgctcagaatccacctcatctagatcccatgggttagagcatggccttctaaacattgctgtagcagtaattacttgcactaaatgcattagtgcaagtaaaccacaacagcaatgtgggcatgcaaatcctgccttgtaaatatccattcacaaagtttcattgtatgtaacacgtttttaacaactaaaatattttatttctttgtttatttagtattggagatgaaagggaagataggaaggactagaatggggtaccttcgagaattccagtgaaagtttcagattttccacgatttggagatgaagtaatcccatggaaatgttaatgaaaattctaaggaagaaaaaaaaaagtgggaattaaagaaacgagaaaaacatctcctctataaaaaattttccttcctttccatgaacacggcattgcgatggtacgacgtcatccacgcatggccgcctaccacgcactgtgttatttgacttcgtttgattattttaaaagaatgatttgagtgtccccatgttagggttttgaaggcatgaaggtggacaaccaaacacagagaaaaagaagaaaaaaaattcaccatcgttatgtaaactgaaagaaatttccgtacatcccagattgaatttcaagttatttcacaaggacacgtctctcgttccactgctctataaagacagaatccacctcgtaatgggtcttatctcaagccaggaaagttagacatccaactatccaaggcacacttc

SEQ ID NO: 10951 - DNA, 10924 bp, Vitis vinifera
  Intron number 3 from transcript GSVIVT01034782001 (locus G SVIVG01034782001) derived from phytozome v7.0 (chr-ID chr1 8; pos 21472494 to 21483417 reverse strand)
tggagagaagctcagaattctgccttgtcgtcacagtaagttttccttgccagaccaaacattatgttgcttactgatgtacagtattaactacatatttttttaatgtatcgtttaattttattgagtgttcttctggcatttgctctttgacatcttacctttcatgagtaaataatggaggagagagagagagagagcgaaagggacggaggagtgcgaggtctcccgagagcgaccgagaatgcagaggacaaggtccttgcggggccttggaagggcttcaggaaggggggctttggagtggagtccaagtcgttttgaggttgaggtggaggagaagaaaggtagactgcaagctacgattgtggagaggaaaagagggatttcctcatggattaggctaggaccggcgagtcttggactattcctcgattgtctggtcctctgtattaaggatgtgagaacggtaaaatgggtaagaaagtggaaggaaaacgggaaggcttactctctggtttgagatcaaaacaaaggagggtgtttcctccggttagatgttgtggatctagagaacaaaaggtttagcacattcatccctaaaggaagaggagcaaagggtggttgggtttcaatggtggagacactacggcgcttgggctgtgctaatggaggaatgataagccaaaaagaagaagagctacgtttgaagccaagtatggtgaaaacctttgcggaagtggtcaaaatgccgaggggtaaagatagagcaacaatcagggtggaggtcacaaagaaggagctatgccggaacttaaacaaactggctcactgtgtggctaggatatggaaccctagcatagcaaagagggatgatctacgaagttaggggacccatctagcgaaaatctagagtctgaagggcaacctagggttagcaaaactagagaggggcaaggtattgatggaatttgagctcttgatagaagcagagcaagccattaactttggaagcatctcggttggggggatctttcttcgcctggagaaatggaggtcggagacgagatatttgagggagggggagaacaagagtgaagcttgggtgtgggttataggcttacctgtctccttatgggagcgggacattctgagaaggataagggaggagtgcgggggttttcttgcagtcgactcccaaacgaagaagatggaggaattgcagtgggcccggctattggtgaagcgtaacggcgaggaattccccaatgtggtggaggtttgggttgaagagttgtgctactcgctaactctctggtgggaggccaggccagtaatgagagcaacgatggcaggaaagagagggaagaaggtcgcaacaggagaggaggttgggggtgaggcttgtacacgcgcgggcgagcatgtgctagaggcgtaggacggttcaaggctcgaggccctgttgctgcctactgatgggatgcagggccagtcaagcgggtcaggacaagatatggatcctttccggagctttgatgggtcgccaggtgagtcacaaggattgggcgggcttaccttgttgggccgagcagagccctcttggtgttctaaggaagcaaagcccattgggcttgctcctttcttggacttaccttgcgaaaatgggtcgtcttttcttgggctgtggtttaggaagatttctgggcggaccaagactttggagcttactgtgatgcctgggctggacaaccgaggcccgcctatgcctttagctgtggttagagcccagttgggggaggctcgtccctccatggttattggccaaagcctaatggggggtctagacgctggtatttcccctttctgggtgaaagacggcatgtggaggccttttgaggagttacagtccgaggggagatctaagaccgactgtgccttgttggaggaagatgcaaggtatgaaaacgaccctatctcatctggaccagtggtttctggatctcttttttctccctctcctatttatggtcggactccattgggggagtattacgacctttctgggcctggcttggacttaacccagggggttacacctcgattgtgtaacgtctctgggtctatagagcaagagatagttaagcgctgggagttgatagaggttaattctgacagtattgaagagagcagagaggaattgtgcttagctctgtctatgccacaagaaggtagaggatgggaggaagcaagttgggaggaaagcgatctagctaggttcagcaagtttttgggattttcgacagagggattggagaaagatattttggagtttctagtcaaaattagaaagaagagggaaagagttcatagcaaaactcttctggagaaatcgagatttgaaagggaattgaaaaggcttgaatgctccatcaattatgaggaggggaagaagaagaagtgtgttgtgcaagtaagagggtgccagattatggaagtccaatgaagataaggctgttgagctggaatgtgcgtggaactaacgatagttctaaaagaaaggtgattaaggctataattaggagctagaaagtggacttgttttgtatccaggagacgaaaattcagttaatgtcagagggtttggtgaagagtttgggctctgggaggtttcttgattggggtgccatgggtgctcagggagctgcaggagggattttgatatgttgggataaaaggaccctagaggttcttgagatggagatggggcagttctcaatttcttgtaggcttaggaatgtagaagatgggattgtttggatcttcacaggagtgtacgagccgttttctaaagaagaaagggagattctgtgggaagagctcggggtaataaggggcatctgggatgacccctggtgtttagggggtgacttcaatgttaccctctaccaaagggaaaggagcaatcagggaaggctgactggtgcaatgagaagatttgctcaggttgttgatgagctagagctcctggatctccctctgcaagagggtgtgttctcatggagcgggggtaggaacaatcaatcttaggctagactggatcggttcttagtgacccagaattggcttgatcactttagtggggttgtccagtgtaggttacccagacccacctccgatcactttcccatcttgctaaagggtggtgggttaagacggggcccttccccgtttaggtttgaaaacatgtggctcaaagttgatgggttcaaggatcttcttaggggttggtggcaggggtcggggggggagagggagggccagttttagattggctactaagatgaaggtcatgaaaaaaaaaatcaaagaatggaacagggatgtgtttggtaggctggaagctaataaaaactcagcccttcaacaagtcgcattctgggatggggtggagagtgaaaggagtctgacagaaggtgagaaggagctgaaaagagaagctaaggaaacctttaaaaagtgggtgatattggaagaaactcattggagacaagtgtcaagggagctatggcttaaggaaggggacaagaacacaggtttctttcaccggatggccaatgctcaccgaagaaataattccttggataaaattaagatcaatggggggtggttggctgaggagcaagaggtgagagaagggactgtgaatgcttttcagtagctgcttgcaaaggagccaggctggagagctgatattgaggggttgcaccttcaaagtctaaactgtaatgaagctgaagtcttggagctacccttcactgaggaagaaatccattctgctctgatggaaatgaatggagataaggctccaggcccggatgggttcacaatggccttctggcagtattgcttggactttgtgaaggaggagattatggacctgtttaaggagttttttgataaaaaatcttttgctaagagtctcaatactaccttcctagtcctcattccaaagaaaggtggggctaaggaccttgggaacttcaggtccatcagccttctacggggattgtataagcttttggccaaagtgctagccaataggctgaagaaggttttagataatgtggtttctgcggaccaaaatgcttttgtgagaggaagatagatcttggatgcctcgctcatagctaatgaggtgattgattattgacataaacataaagaaaaaggggtgatttgtaaactggatattgaaaaagcctatgacagcatgaattggaatttcctcatgaaggtcttgcacaagatgggctttggatctcgttggatggagtggatttggtggtgcattttaactgcaaaattttttattctggttaatggggtgccagcagggtacttctccaactccaaggggctacgtcaaggatttcaagctgtagtcttcaagggagggggggaatggagatgaatgtgtctcatttgctctttgctgatgacataattattttctgcgaagtaaggaaagaacacctaacctctctaagttggattttggcttggtttgaggcagcctttggtctaagaataaacatagctaaaagcaaagtaattctgattagggaggttgaagacattgacgaattggcagtggagttagggtgtagagtagggtctcttcctactgtctatctggggctgccccttggagccaaccacaaggcctcgtctatgtgggatggggtggaagaaagaatgagaagaaggttagccctttggaaaagacaatatttgtcaaagggcgggagaattaccctcattaaaagtactttggctagcatacctgtttaccaattgtccctctttcgaatgcccaagttaatagcaaaaaggctcgaaaaattacaaagagactttctttggggagggggaagcttggaaaggaaaatccatctaatcaattgggaggtggtgtgcattcaaaaggagaaggggggtctaggcattcagaagattaatctcttgaacaaggccttgttgggcaaatggatttggagattttcctttgaaaaagaaatcctttggaagaaggtgatcggggtgaagtatggccatgaggtttttggttggcgaactaatgaagctcgcggaacgtttggagtgggtgtttggaaggagattttgaaggaggcaaactggtgttgggataacatagggttcaaggtgggagaagggatcaaggtcaacttctggactaatcaatggtgtggtattgaggcgctgtcccaaacttttccccagctttttgccttggcggtccataggaacgctacagtcaatgaagtgtgggattcaagccttggtcaaggaggttggaacattaaactctccaaatattctaatgattgggagctggatgctataagagagttgtttcatttgctgagggacttgaggatttcttcagaagaggatttagtgatatggaaaggaggggatcacgattcttttcggattagggatgcttataagctgttggcagctcctagtgccaccaccttcccgaaaaaaagcatttgggtggataaggttccaaccaaagttgctttttttgcttgggaggccacgtgggagaagatcttaactttggatatgcttcaaagacgaggttggcaccttcctaatcgttgttttttgtgtggttgtgaagaggaaaatgtaaatcacattttcttacactgtatagtggtcagggtcttctgggagatcgtacttgccttgtttggggctcattgggtgttcccagagacagttaaaagggtgttacttagttggaggggcccctttgtggggaaaaagaggaaaaagatttggaactccatcccgttgtgtattttttggacggtatggaaggaaagaaatagactaacttttaagagggactctttagctatacagaatttgaaaaattcttttgtatgtaatttgtggagttgggctagagtgtatatgggagaggagtcctctttgctttcaggttttttggaatggcttgcggttccttaagggctggtaaggtttttgttcatgtgttttttgtttttaggctactatgtatactccttgtatgctttgtggcttttcgccctttaatatatttgtgctcatttatcaaaaaaaaaaaaatgtggtagaatggtgttctttttgtataggattttcaaaggattttatcaatagttggagaatctctttggggaggtatagctaagattggctaatgattgcgttggtgaatgctcataacttccagactggcttttttccttttagttgctagaaacctgagataaaggatttgcagttattataatttggaggcatataagttattgcctttctagattgaggagctgatgccttggattagggaacagatactttcaatcaagcaaatcaaaatctggagatgcaaaataaatgaaaccttggaatccccctaaaatgcggattgcccttcaatatgagactcaaagaagagaaaaagagagagaataaaaatacaagcaagttttaagcattcttcaacattctctaaaagaacattaaagatgccacacaaagtgccaatttttctgctttcaggatcttacaagacggagtatctgtaggatttcaattttagttttaaacaatcaagaaaattacaattagtttatttgagatccagcctccattagctcttgatttaatttctagtttgccgccaatcataataatgttatgctttggaaagtcaagcaccagttttttggagcttttacaacttctgaaagatagtaattagagtataaactataaatgcacacttgtcaatattggcaattaaaacccataccaagacttccataaacttgctcgtaggcataaactaatccaaagatcttgactgaccattcatacaactcagcatttttaggagttaataagcaagaaactccaaaaagactcaaccttacttgcacaaagtctctagtagacaacttattagcttgccatttataatttatttgctccttatgatgtgtatggtgggcaaataaatctaggaatgaagaatctagaagttgatcaatatgatgctttggatttagcataggtaatgattcattattttgtattatgggaatcaggttactagaatcaaccatctgttgcacttctttgggctctcctacaagctactttaagattagttccatcacatcttgcattctagattcatcatcgccaacttctttcttcttgtaatttcgagttgcttcttaatggaagtatttgatgattcttttggtttcaagtctactaagttcaaagattgtagaatttccttaattgaatggaaaatcttcttacgccaatcatgcataagcgtatatgtattctcataccatcatgttgtacacttccataaaaaaaccatggtcttccaagcataatgtgggtgactttcatcattagaacatcacaccatactgataaatcaaaattattactagaattaaatattactaagcaacaagagctcaccaaaataaatgtgtcatttgcccatgctactcgatagggatttcgatgcttctctgtatttagattaagctttccaacaagttcctctgaatctaagttggacctactaccttcattaataatcttagtgcatagtctcccttggcaagcaacacaagttcggaagctagtacattgccaatcctcctctttgtttgggctgcatggattataaccttaatctagaataaaaagattatgttagaaaatagaaagtttagaactttttactagaattttaaaactcccaaattcaaaacaaaactcaaatacaaattactaactaattatgatacctaaataccctttttattattatttcatttctttcttgaatagatgttggagattcattctcctcagcttctttattcattgtgctacttttgcccagcaggctccttttaaccatgctctattttttttccctttcttggagaaacattggaactcttacaatgaatttttggaagttgaacttttatgtcttggttctgaaacttaacaatatctagtaagatgctatcagtttttttccctttactctttagatcttgaatttaaatcaataattctgactaacatcctggagtttgattatcactcaattagggctgattgtaggtaaaatatattcattccgggaattaaatcatctagagacgaatccattttttaaggctatcactgtaacatggttatgttgtttaggtacaatatactttggacacaaggctttttcttaattactgaaatcccacaaaagccacttttttatttgcccttggtcatatgtgaccatgtgttgaagctaattttactccaataaatgcaaactaacttgataaagaatgcagatgccatacaacttaagaaataggtcttttgtctttcagtgacaaattttatccaacagaatggattacaagagagtttatgttctcaccaggccgattttatgtatcacaaccctacttatttcattgctggggcctgtccttgatatctaaacaaattttgtcttatcacagaatttctcatgaaggaaactctattagggccggggagatggcatgctctattaatagtttgtcagatcttaagacatgctatttttcctgttggagttattgattttaaaagaaatgtggatcctgctgtcatatgaaaacaaatctcaccatcagtaataagttgattgtggaagctttcaagaaaaagtgaaatcttctaaataggggtggagaattgtgaaagctttctttctttgtcaattatgataatggttggatcatctccattgtttatccctgaagtttagaactgtcccatggaatactagaggattaaataatgatcataaaagaaaggttgtaaaattcttttcaagatcccagaggggcagacttgattaaactaaattggagactttatctgaagaagtgcctagtagtatcaaggtgggctgatccttaggatggatttctttctggctgaagaagggagttttgtttgaagttctggatatggaggtgggtaccttttcaatatcattttgtttcaggtgttcttatgatgattttggatgtttgttctcaggtctgttgttctgttgtgggaatgagaggaaaacactctgggaggagttagggctgtaagagtgtgtgggatgattctttgtataacagagattttgatgtggttcaatttccctgggaaagaagggattatttgaggatttcgactgctgtatggaattctccctagtttattgggaagtttgattttttagatgttctccttgcaggatgctagtttacttagttgggtatgcacggggaagtaatctatgtcccagttggactggtttttattttctgtggagtgaaaggaacatttctgaaatatgttttatagtattttatcaaggtcatttcagattgttcaactattctctttgaagttgaagtcgagattttgtagaactcctatgttcgagaatatgtggttgaaggaaagaaagttcagtaattttgttccggaaaattattgatgttgcaagtgacttgaaatgttctttttcttggattgctcatgttgctaaccaagaagtgatcatgtagccaagcaagggcccattcccttggtatctattttgggcattttttttcctctgagatatgtagtgctcttaggttgtgcattgttggtttctttcataagatgtgcagtttattttgctttcttttaagaattatgaccatacttcttttttatcagttttcttttgtaaatatttgaaagatctctcatgctttattattcgttgtacttagtttaaagcaatgaattatcttgttttttattaaaaaaaatggtggaagttttctcagatgaatggaaccctgggctttatcttagcaagaaagtgaaagctataaaagaggatcttagtaggaatccttcggagaatgtgccaatttgtgagcccttgagcagattaataggaatccttatcttaacttagactggcttatgagaaaggggagagctctagtaaattgatgtcaaatgtaaactggatgaagaattgacttgtcacttatctactgtagaatgggtcagaatttatggtggcttctctcttaaattttagagtttcttgacttcacgtttgccggtaatgtatttgttgattaatgcgatgtaaaggcttctgtgtaaggataggagggaaccatggaaaacactgctttgtgcctgttttagtgcttatgagtggagagtgattgatgaatatttgaaggttaaagactggttggacttgcagtcgaagattttattttttatactctgtttgtgaggctgggtagagttttttgggctaggatcccttctctaggttgtattgaccaaatggctgtataagactgaaggagattctgttcttttacattttctttagctgttggatgctgtgttatataaaaagatgtctcgttggcaacaattagttggtttttatatgtttatgggatgttggcatctgatggtagcatttaacatctcgtattgcatagcattgatatccagtgcatgtacagataaagatttttttaaaagctttaattttagtgttctgctgtcatattttgtttatttcattgctaaattgagatatagttttctccagtttctaatatcattagcttaccctctgcactgaatggtattattataaataatcttgaataattttatttttattttttttttgaatttgtagagtttc

SEQ ID NO: 10952 - DNA, 12541 bp, Vitis vinifera
  Intron number 3 from transcript GSVIVT01023509001 (locus G SVIVG01023509001) derived from phytozome v7.0 (chr-ID chr1 4; pos 10642473 to 10655013 reverse strand)
gctaaagtaagtttctatttcattcaagttctttaccttttctttattaggaattctattattagatatcatttgcttggtgcatggtgagctttttgcccattctcttggctactttgtttttaaagttcatagagatcttaaaaattgtatgcttttaaggtagctttcttaatagtcttctcaatgttttaaaaggctaaaggtggtcttgaggtgttttgtctaaatgagacgaggcgtaagcctcgagctagaatgaggcataagcctcaaaacaaataaataataaagaattatcaaaaaataaaaaaaatcataaattcacaataaagttgagtaattaaagaagatagaatttataatgataaaattaattcttataaaaaaaataatgataaaattaattatttttcattgttaatagttctaatttagttcctttttctcttgtaaattttagctttctctcatggttttaccaaataattttcaatattattgttatcatcactaggatctttcaaggaatataatcatatcctattgttatattatcttccccattggtgttaatattcacccatccttcttcttcatccactaattatagtggtatcttttttatctatcaataattagattatatgtgtgatcaaccactaagacaatcaataattcctttattcttctcaatctctcttttacccttccatttaaaaagttaattgaaagtcaagtaaacatttattttgtaaaaggtttaaccaagtagggacctaatacaaaattcatgaaatctatattagaagtccacaaaagcatagatgatagaacctactaaaactcattgaatattgagactaaaggctcttataaaatatatactaaaagccgataaagaccgaaaatcctttagatatttgagacttatgcctcaatagccttgaggttataacatcaaagctataagcctcgacaaggtgaggcttaagcctcaattaccctaaccaaggctatagcctcaaggttaatttgtagagcctcaccttgaggttagtctcgaggtataagccttaatagccttttaaaacatggagtcttctctctctctctctctctttctgtttttttttttttttgttgggatggtcatagatttttcaatagtctttttgtttgttagatgtctgaatctttgtagaaatttgaaagacacatgatatggagaaagttcaataaacaatattactagatgcaacttagtgtttagtttccgatgacttattttttagagcatgacatttgcagtatgttatttgatagaaaagcaaaatctatgcagtcaagtatttcactattcacatcatatattgccaaactccaggatagtttatgtctcactatcattgtggcttggtctgttgctattatatttgaagtttatattgtttcttataaaggtttcttctaagatgcctagcatttgatgtaaaatttgttaatgatatattacaattgttattatcttgattgtagttggcactcttttttccttccctttttctctataaatcaaataatttataatttgtatgcttttttttaaactaactaaaaatcaagtgtatttagaaggttgcttcatattcctttagaattatatgtcccaaggattctaagtgatacaataaattttttgtttcttgaacatgcgattattattattttgattatgattatgattcttatgattatgatttatgattatcaccatcatcgtgatcattattattattattattatcattatcattatcaccaccttgacaacctttggaaccattatttacctctgcctgaccctaagggcctttacaaccttcctcaccacctctgcccaatctcaaggaccttgactactttcctcaccatctttgccaccttgacaacctttggaatcattatttacctttgcttgagggccttgacaaccttcctcaccacctttgcccggactcaaaggccttgacaacctttgggatcatactattactattactattactattactattattattattattattattactatgactattactattattattattattattattcaaaacattattattattattactattattattcgaagaaatagtattattattatgttttgaataataataataataataataatgtttcgaatattataaaggaattaagtagagttagttcatccaaatctcttaggatagataatattgcatcacatagttttgcatataatttagaccgttagattgttattcatgtaatctagacagttcttcatatactatagattcactagttgcatcatttaatcaacataattttgctagtcaaaatttagattcttcatcatctaatcaaacaaatgttaataatttgaaattagatctataaatgattcaaattgaaaatcaattaaataatttgacaaatattttaaactttactccaaaagttcctatttttgaacaaaaatctttgtcaataacttctactcattttgctagtcaatactttttatatcaatacaattataaaacgttgtagaaaaacttctccttttgttccttacaatggtgcaaagagagattatttcaaaagtctcaaacctcaagttagaaatgctttacgtaaataatatgaaaactatatgcaacaaatcaaaatgacaattccctttttccattggtttttcaaatttaggaaaccttttaaaagaatcataacattaacaatagaacaagggataaaaaattctccaaataatccaaataataaactttttaatcaacaaaattcaaatcttaatcaagaagagttaaattttaacaaaaatgaaataaaatttaatcaaattttgttttcttctaccccgagagaggtagaagtaggagaaactctagaaataaaagaagtggaacaaaagaaataattgaataagtaactgaagattcaaatgtatagaaacaaacaaaacaaacaaaacaacaaaataatgaaataaatgaaacaaatgatttgtttctattggtttgtcgagtttatttgtttcatttcattattttattattttgtttgtttgtttgtatgcatttgaatcttcagttacatcttcaattatttcttttgtttttgcgtcttttgtgtctactatttctcctatttctacctctcccaggctaaaagaaaacaaaatttgataaattttgttttatttttgttagaatttgactcttcttgattaagatttgaattttgttgattaaaaagtttattattttcctatcaaaaaaaaaaaaaagtttattatttggattatttggaaaattttgtattcttttttctattgttaatgttatgattcttttaaaaggtttcctaaatttgaaaatccagtggaaaaaaggaattgttattttgatttcttacacgtagttttcatattgtttatgtaaagtatttctaatttgaggtttgagagttttgaaataatttctctttgcatcattgtaaggggagaaaaaatctagtttaatccattcagtgtcaagaacaaaaggagaagattttctataatgttttttgatagtatttatttaaaaagtatgatcatcaatgaatagaagttatttacaaagatttttattcaaaaatagaacttttgaatatatttgtcaaattatttaattgatttttaatttgaatcatttccaaatctaattttaaattattaatatttgtttgattagataatgaagaatctaaattttgactaacaaaaattatgttggttaaataatgtagctaatgaatgtacaatatatagagaactgtctagattacatgaatatctatctaaattatatgtaggactatgcgatgcagaactatctatcctaaaagatctggatgaactaactttacttaattcctttaatacattacttattgtcacagaaaataatcacaattatatcctttgttaaattcaaataattttttgagtagggaccaccacaattggatcaacataggacttatgttccttctacccttcaaacactgctatttaggctgactaaactgttcatagaaaattcaatttgaactaactcaaggctcaataaatgattatagattgttccaagtcgtaacatcactaatattaacattaacccttcaagttctgatatacattgcaccccaatggatacagatcttgaaaatttcatttgcagggaaaaaatagaagaatccaaagatgcattttcaatagtttttcaaaatgaatttcaaaaagaactttcaaaaccaaatgaagattcaaaactttctgaggaaagccaaaaatgtcaaatttctagattttcatttttcaagctaaagaatttggatcttcttgaaagtattagacagatgatctgtgaaaaggctaaagttacaggagaagcaaagtaagagcatattatgcaatttcttgctgactgtaacacttttggaattactattcaagggatgagcttcacttggatttcttattatgacaacacttataataattgtccaaagatcgatcccttgtgtaagaaaattccattagaaaggcatgactgtaagtgtgctcttacttacagtatttgcaaagccaacattgacttagacagttacaaaccaataatcattaaattcaaaaatgagtcaatagagctaactccttttcttctcatggattatggagttctttatcaactaattttctttcattctgatcaaaccgatggatttggaagaaaattagcagtctgtgttttaaatgctttcatcagagattttaaagcagttgaactcattatagaaagtaaacctcctgaatggtcaaatgatggaggagtttaccctgctcaacacctcatccttctcaaagccaatcaaagaaaatatcaattgttcggtacagagagcccttggtcttgtactaaatttgtcctcaaaaaacaaatcagacactggaggtcaagaatgatttcaagaaatcttgatgctgagatttatagttcttctaactataatctcattgctgaagacaacaataaaaaaatcatttcttcaatctatcttccaaaagtccctcttcttttctagactcaatttacttatcttgttgataagtacagaaaagaatgtccttaaagaagaagccagacgaacttttgaaaaatatctcttagaaatgctcagttaagagatatcaagaatcttttgtatatttgtaattatccaaaaaaaaaaaaaaaaaagtgaatagtgttttttttaaatagtaaatttcgtcttttactatgactcaaaagcaaaatagtgacttaaaagcaaaaaggtgactcaaaggcaacgtgatgaaaatgaaaagcaagaaaggagacttaccttctgcaatcctcatacacgtggaagaaaatgaaagactcaaagttttcttgaagcctagagcctcgcctataaatagagcttcatagttcttcttcaggcagagttgagcaagggttagagagttggaaaagagttcgagagagcttcaagagcagaaaaaaattagagagtgcaaaaattttgagagttcaaaaaattttctcttgtaattttcttctttgagttcgagtcattcctctactgtcaacaacctgtattcattagctctctatattaaggtatattttcaataaacaaaattttcagactcaaatatttgtgttattatgtttaaatttatgcaataaattagacaatattagacattaaatatttctgtttttatacttggagataattagacagatttaattattgcgtacatgaattaataattgcgtgcatgaactgttgtatgtcctgggtgcaaatggtatcagagccattttctgcttgagaaccaagtggtgttacgagttggaacagtaactaatcgcagatttagtcctgacttagttcgggttgaatttcctgtgaatggattggtcagcctgtgataagcggtgtttaagggcagaaggagcgtaagtcccgtgttgatccgcttgtggtggtccctgttcaggaaattatctgaattgattaaggataaaattgtgattattttctgttacaatgagtaatattataaggagattaagtagaggtagttcttccagatctcttaggtctaataatagttctgcattttcatcagataattctgcacatacattattgacacaaaatattgtcaataggcaagaaataaatatagcacaaatagaaaatcaattaaataattggttaattcctcacatgaaaattaatacaatatatcaacaaaaaaattttgaaattagtcaaaattattcaataaaaactgaagaaaaaactatatctcttaatcaaaatttagaaagtctacaattattaattcatgtacgcaataattaaatctgtctaattatctccaagcataaaaacagaaatatttaatgtctaatactgtctaatttattgcagaaatttaaacataataacacaaatatttgagtctgaaaattttgtttattaaaaatataccttaatatagagagctgatgaatacaggttgttgacagcagagggatgactcgaactcaaagaagaaaattataagagaaaattttttgaactctcaaaatttttatactctctaatttttttctgctcttgaagctctttcgaactcttttccaactcactaacccttgctcaactctgcttgaagaagaactatgaagctctatttataggcgaggctctaggcttcaagaaaactttgagtctttcattttcttccacatgtatgaggattgcagaaggtaagtctcctttcttgcttttcattttcatcatgttgcctttgagtcacttttttgcttttgagtcactattttgcttttgagtcatagtaaaagacgaaatttactattaaaaaaaacactatgcactttttttttttttttttggataattacaaatgtacaaaagattcttgatatctcttaactgagcatttctaagagatatttttcaaaagtttgtctagcttcttcttcaaggacatattcttttttgtacttatcaacaagataagtaaattgagtctagaaaagaagagggacttctggaagatagattgaagaaatgattttttgattgttgtcttcaacaatgagattatagttagaagaactataaatctcagcatcaagatttcttgaaatcattcttgacctccagtgtctgatttgttttttgaggacaaatttagtacaagaccaagggctctctgtaccgaacaattgatattttctttgattggctttgagaaagatgaggtgttgagtagggtaaactcctccatcatttgaccattctggaggtttacattctatgatgagttcaactgctttaaaatctctgatgaaagcatttaaaacacagattgctaattttctttcaaatccatcggtttgatcaggatgagagaaaattagttgataaagaactccataatccatgagaagagaaggagttagctctattgactcatttttgaatttaatgattattggtttgtaactgtctaagtcaatgttggctttgcaaatacggtaagtaagagcacacttacagtcatgcctttctaatggaatttccttacacaagggattgatctttggacaattattataagtgttgtcataataagaaatcgaagtgaagctcatcccttgaatagtaattccaaaagtgttacagtcagcaagaaattgcataatatgctcttgctttgcttctcctgtagttttagccttttcacagatcatctgtctaatgctttcaagaagatccaaattctttagcttaacaaatgaaaatttagaaatttgacattcttggctttccttagaaagttttgaatcttcatttggttttgaaagttctttttgaaattcattttgaaaaactgttgaaaatgcatctttggattcttctgttttttccctgcaaatgaaattttcaagatctgtatccattggggtgcaatgtatatcaaaacttgaagggttagaaaaactttctaatttatcatttaactgtttaaaatggaaagataagacatttaaagcttccaacttttgaatatcactttttgcattccagagattgtctaaaatgcatttttgtgatctgtctaatccttttatgtctttatgaatccggaatgacagattacatttaggaattactggaagagtaaatttcccaaatgtaattcttcctcgctccatttgtagacaaaattcaaattttagtctctattaaagaataaaacaaatatccaatggttgtctttatcataccaaatttgaaaatatattgagtttatgagaggaacataatttcgaataatgatgttaaaatgagtttttggatattttgaaatcacatttattgacttatatgagcatgcacaaattccatcacaatccttttgattatctgattcttcttctaaacttgactcttcacttgatatttcttgtgttattagtatttgattgtcttcttctgagtcataattttcacttgattcttcattttctttatcaatcattaatcctatcattagatttttaagtttatagcttatttctaatgaattaatcttgttttctaattgacaatctcttgagtaatgtcctacttttccacatttataacatgttggtgttttcttttttaaaattgttttatttgaagattttgatttattaggagtagattttacaaatttcttttgaatttttgattctatgtatggttttttactttttactttattttgtttattttttctttttgaaggagcaactattgtatcataaccataacatgaacaaaattttcccaattcttttttactatcttgtttttcttttttcatgtgactctttaatttaagatctgtataaagggctaatccttcattattaacaaaagtaattaattctccatatgttaatgactcataaggaattctaccattatgaatatttcttattctttgtttaaccttttctgcaaatagagtgggtaaacctgatataaatttttctttccaataatgacttccacaatcatgtcttgtcataactttgaccaaaaatatatctttataccacttgaaatcttgaagtgttgggcatctaagattattaaggatttcagaagttctttcttgaaaataaactggatctcctataaaatgttttgttatagcaaatattaatgtattgacagcatcttcttcataggattgaactgatgttccttcttctttaactattgtcttttttgcatttaatatgtattctctatcattttgactcaaataatgatcccaccatcctttaagtaaaccagtgaatcctattactagggcactggcagcatgaaagtcagaattacgggttttgattctataggcgtcagcagccatcatcatttcatgaagtaaattaattatttgatgttcactcattccatctatattccattcataaaaactactaccatcataactagcagctaattgataatttctatcttctaattggacgtcaggaaaagagggttttgaataataattttttctacttacaaaattattagaaattgcattgactattgcaggaggtttttctattgaatcaggagacattttgaattgttcttctaatttatttatttatgattttccttttgttatagtttgaatttgattcttaataccgttaatattgagtttgtctaatctaatttgtatttcttttaacattgtttctgttggtgtggataattgaatatttgattttgcagcatttataggaataataaaaggttgttctaaagatttagaggatgatgatgatgatgataaagttgaggaaatttttaaggattttgatgataatgtttctgtttctcctatcttccctcccgaggtagaagaaaacaaaaatttagaaatttttgttgtttgttgatttagatgttgaagagaatgatttgtataatttaattgttgttgaacttgtttaatatccttgtaaattatgggactttgttcatctttggttcttggaattttaaagggtgatgcagaaattgaattattatcaaaattaaattgatgattatttatgggtggttgtgaacctaattttgaagttattgttaaaattcttttttgaacatgttctgagtgttttattgctaattgatgtccttctttatctctttaggttatgatttgttttctttattttttaagtttgaaaaaccaatagaaaaaaggaataataattttcttttgattcatatatttttcatattgttttcttaatgcatttctagtttgaaggggaaatgattgaaaataagctcttttagtattattataagggacaaaataatctgattttatccattctatattaggagtaaaaggagtctttttataatttttcttataaataatattgacttgattaggatacatatccgaatgagtcggtgaagcaggaggagattcttgttgctgatatacaggaataggaatttttggagtaaaatcaacaccatttagactaggatttgaggtagaaggtcttgcagatataaaatcttgactaaatgaatatctagaggctggactaaattctacttgaatagtaccatctgtatgttgtataatttttgaaggagttgttaaaggtttgattggttttggaagagttaaatcttttaattcccatttacctccttgagtaatttcattccattttaattttttaggaacaaaggcttgagtattattaggattatattgtaataataatatttcatctttaacagattgacatatagctctaggatttattattattattatatatgatgatgatcatcagtatcatcatcaccaccttgacaatctttggaatcattatatgcttggccttaagggccttgacaaccttaggaatgataattattactatcattcaaaacctttccatctcctcaccatcttttccaccctgacaacctttggaaatcattatttacctttgcttggcctaaaagggccttgacaacccttcctcaccatatctgcctagcctcaagggccctgacaacctttggaatcatcatcatcattattattattatttgaaacattatcattattattatttgaaatatcatcattattattattattatcaccaccttcacaaacattggaatcattatctacctgtcattatctacctagcctcaagggccttgacaaccttaggaatcatcactattattgttattattcaaaatgtttccatctcctcaccacctctgcttggcctcaagggcctcgacaacctttggaattttatgtcccaaggattctaagtgatgcaataaattttttatttcctgaacatgagatttaaaaactaatcaagatcaggtccggccatgtaatatgggatatggggagttagggtggatattaggaattgagttggttaaatttgatctgatccgctgaatagctttagttatgcatctgttggcttggcggcttgactagaggttacatggaatcaggcgaagtcttgtaatatttacccagaatggtttgggtacagttggtgttgcccagctaagattggcaataggttgtgttctgagttgagcatagaatgtaaaacaagttctttatccttattggatttcattgtttttaatgctggcctaagcttttgttctatgcttttaatttcctgtgggtggtccaatgattttgtaatggagcaacttagaattgaaatgagcaaacagtatttttccaaactaacctctttcatcatgttgctattgagcatgtcgaactggtgtagtttccttcaaatctttggaagtgttctaaccggatagtggtttcccacttgagctttgggtagctgttgtctgagctatttcatttcatttgaaagaagacccatctgttactttcaacataatatgatcctaatcatattttgggctgtgcgagattcagtgggttggtggatgggtgtgctggattaggctctgagctatgcaattgcaggcacattgtgatgggttacctatactaatttattggctgcattccattgtctcaaatcttgtgtctgtgcatctttgtgggacatttcattaattactgtgatcttgcaggctggctgttaattttttgaatgaggacttgtcatatcactttttatggttggaaactaatgcatagttcctcacactcacaggttgtcagagataagcggacaggaaaaaccagggg

SEQ ID NO: 10953 - DNA, 1963 bp, Vitis vinifera
  Intron number 4 from transcript GSVIVT01013489001 (locus G SVIVG01013489001) derived from phytozome v7.0 (chr-ID chr1 3_random; pos 1651713 to 1653675 reverse strand)
gaagggtatcctctctttcaatgttttggtagttgtagttgacaagtgacatgcttccacataactcttattagtgtccactaatgcatctgatctggatcttcttttatttttgcaagattttgcttgttgatcccattaatttaatcaactgccactatttatcctttttgatccagtatattctcaaaaattcttgctttcctatgtcgattaggtctttttaaggtcagtaattttgtcctaaattctgtggaagattgtttgctcttgaagtatgtttcttctgtattgatgatcaggcaaatggtacagtagatattcttctgttttgatatattccatgttaattcagtgaagaaataatccataagcaagggagaaaggctattctggaatagtggataagcaattcaactgtgagatatgacttacagctatacaaggagggagggaatcatgccatctgggctgggctaggtctaagatggcagcacatactgataatcttaatgttgtattttagtcatttggcataggaaaatgtgtaaagggcagttttatccaaaaattaatttgaatatttacagatggatggttgatggttgggtttttcagacagttctttttttctagggtgttttggtttctccaataatttttgtggatttcataaagtgttaattttttcaaaggtttttgatatttttccctgattgaaatgtgtaaaatgttaaatgttctattacccttaaaaaatatgttatgtcaatgtgaggaaaaaggggggggggtgttgggattggagcccttgcttctttaagccttttaatgattgggagatggagatggatgaggtggaaaacctgttattgtgggaagagtggaaagagtgtggttgtggatgtgggggatagggtgaggtggggggaatcaaaggatgacacgttttcggtaaaggctccttacaaagccttagagctggaatcaacagggtgcttcccaatgaagataatatggaactcatgtgtgaccaaaagtaagtttctttgcttgggaagcaacatggggaaaatttctaaccttggaccaagtttagaagagggggtgggctttagcaaacaaatgttatttatgtcaagtgcatgaggagtccattgaccatcttcttctccattacaaaaaaacaagggaagtgtggaagctgttctttagtctgtttggagtgcattggatgtttccttcctcggttagggaaaccctcttggggtggaaaggggtttttgtgggtaggaagtgtagggctatttggaatgtgggccctttatgcttgttttggttagtagtttggaagacaaggaacaagattgcctttgatgatggtgtgctgtccgtgtaaaagctgaaatctttttttgtatatttgctttggacggagtctaaattgtttataaaagatggtcctttgatgctaattgatttcattgattgggctcctggtaagggaggggttgttttttttttgtacatgtctggtcagtttttgtttcagttgtaagggggtgagtctctctttcttgtacatcttaagtcgctattttagctccttttttgcaatatattactctcacttataaaaaaaaaaatgttagttgtgttactcggttgtcataaaggaacatgtagagggcggtcttaaccaaaaatgaatttatcaatagatacaaatggatgcttaatggttgggtttttaagacagaaagtttacttttctggggtgttgtggttttaccaatatattttttttggtttaagaatgtgaaagttctttaaagtttttagtatttcaccctaattaaaatgtgtaaaatattgaatgtcctaatgctctcttccttaattaagttatgcaaatttacacttgacaggtcgtaggatattgttacactttgaagctgttgat

SEQ ID NO: 10954 - DNA, 15547 bp, Vitis vinifera
  Intron number 2 from transcript GSVIVT01012939001 (locus G SVIVG01012939001) derived from phytozome v7.0 (chr-ID chr1 7; pos 13935557 to 13951103 reverse strand)
cagcaagcagtataggcaggttctcaatttagtatattcaacattttcttttaaggttttgttggctactgaaatcatttttggcttgttaaatggaattggttgtcatctaaagaaaaagttggtggtagtatgatgaaattaagtcacatatgataaaaagagaacccaaaatatatttgataaaggtgttgaaatgacaagtttgaaagattattaacatgctgaaaaagaagttgagatgactgtgagctcaagtattttttctatataaaaagttggctagataataggcaacctgttaaagaaaatgagtgtagctgagtggtggtgttgcaatggaaacatgtcattcaagatatgaaataaaaattaatgcatctttgagaagttcctagtttcaattgaattagtcttttttaatatatatatatatagaattgaattagtctttttgagacctccattagagttgataattcatccttaatgatgaacccattttgttgctaactaagccctttgatctctaaaaatccccaaatgctcagttttgcgttttacccgtgggcatcctttgaagttgagctaggtaccaaaaggggaggatttgtggacagtgaactcatatctactatgttttgttgagcagagtctctgatcaataaagatctaaaagaatgccaataaactcttaattgactaatgtttaacgagatctctagaaactaatgttgttcctcatcttattcactaactttgtccttgaagacttaggattcattcccaaccatattacccatacggtgctaccaattgcaatgctcaagcaccttgtctctactccttttgccaaagtcttgataggagttaaccaacactactgtgatatcttttagagctgcccaaataagccatctgtgggaagagtcttttccatagctcatagaagttagcgtaatgcatgaaaaagatggttccccctcccctctcttgccatttgccttgtgttacacacatccatcaagctcaatgacagatgactctgtactgtctcctcaaaagaagcttattatttgaattaaccttctttgggaaactaacctggaaaatttttgaagttaagacttccatattaattaggttggagtaccaacctaatcaacctaattaataaggaagtctaactccaaaactttcccggttagttgccctttttaatgtcttctactttgtataaaaaaaaaatagaaataaaataattaggttggagtgtagatgatcagattctcatagggtgacagaaaagaaagaagcaaggagatgagatccttcctatttgagaaccaatacctatcatcaagagcaaaagaatataaatagaagttttctatggatcggagaggatagcaataataagtatttgttcttttggattttaactaccaaagttgaaattgcaatgaggagagtcattttacttgggagtatgcattagatataggagtgcccatacaccttggaagaagattttctgtttttttttttttgtttgttgggtgggggtgtgttgggggaatgtggtggttggttaaggtgaaagagaaaaaggctgttccctctagaagacttcaaaaacctaatcttagatccatctccaatgtgaatctcactctaagaatgatttcttgatgctcttggcattggtttttcgataataatgaagagagtactaatccaatgaagatgctaatctctgaaatcgttcaaaatccaatataagtaccatccctcatcttttagtagggatttctcatctagaaatcttatggacaatcaaatccacatcaaggattgacctttgattaatggaggcttgttgggtaggggaaattgcctattgaaaaaccttgtcaatttttttcaagagaacatgtatatgatcttaaagtccttaatccctttaggtttgatttgttttttctcttctctttaggccttagtcattgaaccttttgtcgttattcttttgaattttctattgttagatttgaagaatttttgctactcaaagagacgacatatgaaggctatacttgattacctcctcagctcctctactaggttctataaagttatactttgatggatgctctatttgtagtccttgaaaattaggtataagaggtgtgatcaaagatcatttaggtacaatactgagagcttactctaaacctgcaggggtgggttctgttgttgaggtggaattactagcattactggagggcttgttgtaggctgaaggtttgtgcccaaccaatttgactatagagggagtttttgctattgtagtatcttgggtgtctaactggaagagaaacttatgaaagttcaacaattggatccataaaattctagatgttgccactgaagtgagattctcctcttactttccttgttcagctaatcaaattgcagaccgctggccagcaaagagcaaagcacttgctctcctttgttggatattcccaccttgattgtataaagtttttatagcgtgtgtacaatggccttttttgcctcttgactatgttgatggttttaatttttgtgtagtataaatgcttgttttctgatcaacaattgtacatcttggaagtattgtttgtctttcttgtattttccatttaataaatgaatataattgtttttgattaattttttctttggtttactagcccactagaataaagcttcttgagagctttcaacatgttcacttttataatctcctaacaatcttcataatctgaagcccatatctctccatttcaaaactggctctttgagtcatggtcttaaaaaattctactctcttcttccaattgaattatgataaaattttcttccttttaatcctatgaaaaatcttaaatacaatcttcttcctttacccatgtcaccctataattttttggctagctcacttcctctttgaatttaagttctgaagcttagacttcatgaacagattggcatacctagaggttgggcttttttccaaactgccaatagtttacatgttcacaatcttggacttttttatcctctatgtctccgatactttcttgttctggactataagattatctttgatgaatttgagcttttgatatgtaaagaagcctttgatatatttggcagtgcttgtttattaaggtgcctggtcatgcaaactcaaaaactgtttctctttccaaaagaggagccatagattttagaggtatatgttgaaacttcttgttccctaagtcaattttttcttcttcttttccttgttctactatccatttggacatctttcctcctttatctctttccttctggctataaattttcattccttatggaaagagaagcttccaatctgttgttaggaggattctcaccgcacattgatgtttgatcgatcaactaaaagaatatgcatcaattgaaattagtttcttactctaatatgttattagatctttccatgcaaatgaatgttgttggaagccattggaataggatgtttgttttttaatgaaggtagcttctgttatcattcaagtaaaatatctatgaagctcgttattgttatttattattattatatcatgattttaatatgaaacagaatttattaaaagaaaatatcattatcattatcattatcattattattgtttttgttgttatgtttactctaatgaaacaaatatttaaaaaagaggtacaccatgaaccagaattacagagaaaggaagaattatagtgtcaagaaaaggccttactaccactgtgaatcttttctgcatgtgatgacttggatgtctaatagacagttggcgatggttgaacactgtttgtagaggttccaaaagtgtgttgttgaagatattggttgccatcatcatatgcttattttgttatatgtttatcattttttattttatatatatatataagaaattatctgatagataggaagttttttaatgtaacctagaactctataattctcatataaatataaggagtttctagtgaactagagatatagtggactgtatttcttctccactgccatgatttacaacatggtatcagagcaaatccaggtctgattctggttggctgccgctcctttcatattcatcattcttctatttcttcttctctcctagcttctttctttcttccatcctctttcatatctggttctcatttcaaggtagtctactctgtgctggtgatgtaaatttacatttgttagccatgctagtggttattgattgttgaagtagatgtggctcagttatagcatgttgatgttggtggctgcccagtcttcattgctatttttttgttgattaaggctttatggtgtgatctcgaaattatggttgtcaaaaacactgataattctgctgtatttttttttgtgtggttatttttttgagtagcaatggctgccatatctgaaataaaagaatttcttcgtaattctgagaacacaattgttgttcagtaaaatgacaatccaaatctcagaattaccactatgttactcaattcttaaaattatatgcaatagtctagatcagctcaaaagttttttttttttgataagcgagagcaaaatatattaaagaaggctgaaaggccgcaccgcatacaggaagtatacaaagcagccacaaggccaaaagtgcaaaaacaggaacacctcaccagcccttagggaaccgctaaccactccaagaatcctaaaagcgaagaggactcctctcccctatacaccttagcccaactccacaaactacatacaaaagaattcttaagagtttgaatagccaaagaaccccctctaaaagctaacctatttctttccttccaagccgtccaaaaaatacataacggaatggaattccatatctttttcctttttttacccacaaaagggccccgccaacagaataacgccgctttgaccttctctggaaacacccactgaaccccaaataaggcaaagacgatctcccataggaccctaaccactgtatagtgtaaaagaatgtgatttacatttttgtcttcacaaccacacaaaaaacaacgattagggagctgccacccatgcttttgcagcctatccaacgtgaggattttttcccaagtagcctcccacgcaaagaaagcaactttggttgggaccttgtccacccaaatatttttttccggaaaaacgagagggttgccagtagattgtaagccacccgaatccgaaaaatgtcaaaatcccctcctttccataacactgagttctcctctggggttaacctgaagtcccttagcagaagaagcaattctttaccagctcccagtcattagaatctctagacaatctgagattccaccctccttggccaagccttgggtcccacacctcattcaccattgcgttactgcacactgccaaggcataaagctggggaaacgcatgggacagcgctacgttgccgcaccaatggtcagtccagaacataaccttagttcccctccccatcctgaacttcatgttatcccaacaccagcttgtctccttcaaaatctccttccaaattcccactccaaagggcccacgaacttccttagatctccaaccacatccctccaaaccatgcttcacctcgatcaccttcttccacaagacatccttttcaaaggcaaatctccaaatccacttgcccactaaggccttgttcaataacccaatcctcctaatgccaagaccccctttctccttttgagtacacaccgcctcccaattgattaaatggattttcctacctgggcttccccctccccaaagaagatcagctcaaaagtttatatcaggcaaagtagagtgggactacagtcacagaaaagttgcaacaccatctgaaaaagatcccaagtataaggattgggttatgactaatgatttgatttcttcttggttacttaatttcatagaaccaaacattagtcaaggcctctctgatttggatacatgtaaggagatatgggacacatgttatgagttatgtgtagataaaaataatcatgtcagcatttatgaactgaaaaaggaaatcgctacttatactcggggggggagcaatcagtttcagattactgtactcagttgctcttttattggtaacaacttaaatatttgggaggtgctacttaagattgtctcaaatacttaatacaattcctttgccatctttaaattcagcatatgccctggtacacaaggaagaaaagtgtctcaagataatgaactccattgagaagtcaacacttacaactgctggcaatacttgtgggtgtggaagagaccatgagacttctcgtggaagaggtataggtagaggagctgcatctagtggttgaggtagaggttgatctacaagtgagaagatatgtatccattgtgggcatagcaatcataccatagcatattgttgggatttgcatgggaggccttctgcaaatgtaacctctttagaagataccctagttgtgccaactaaggaggttaaccccaagaaatgatatatccctttcagggtcagattttgatatactagttcaatgcatctctgagagagtttctcaaatgaagaaaccttcatcttcttcttgcactgctttggtccaaacaaatattcctaatgctgttctagtgtcttttgatgctaactcctggattgttgattgaggagctatcgaccatatcacaggtacatctacaaagttctcttcttactctccattagttacacccatttcaataaaacttactaatggtgttattactaggattgctggtactagttccattagtttgactcgaagtttgcccttgaactgtcttacacgttcccttgttgactcataataattaagtctatactcaacaaaaatcattaattgttttgtatccttcttttcttcacattttgtcattcaagatctggggacaaggaggacaattggttgtggtagggaggagcatgacctatatgtctttcattcctcaaatatatctatagttggtgctacacacaatgtatggcaccagaggtttggccctccagccattagtgttttagagagagtaatacctaccaagtacgagtctagtttgtgttgttaaccatgtctgagagcaaaacattatgatctactcatccctcaaataaaattaggcattgtgctatgttctttgaattgatttattaagatatttggggaccaaccctggttgactgttcaaaattcaaatattttattacttccattgataatttttcaagaatgacatgggctgtttactaaagggtaaaagcgatgttttatttgtgtttagaagtttccatgcttagatttaaaacaattttaacacatttgtaggcatattttgaagtgataatgcaaaagtgtatttgtcacatgcttttacacaatatttgcttgatgcagggattgcatcaaaaacatcatgtccatgcacaactaaacaaaatggtatttttgaaaggaaaaatcatcacttacttgaagtggcgcgatgtttactttttatgatgaatctacccacattattggtctgatgtggttcctacaacatgctatctaattaattggttaccaagtgttgaaataatgccaaagttaggactttaatttaggaataaaaaaggagagatcatttaggatatttccttatgatttagtttcctaattttaggagagaattaagctagattgattttttcttattcagtcatttgtgtatatatatgtgtatggtgtgtaccgattaatatcaataaaggagttcagaaatttcttcatggtatcagagccagttttctgaaaccctaatcccttctggccatctcttattcaggccatcactcattccggccaaatctctctggccatatctcaatccgatcatctctctctctctctctcattccggtcatcagtccctgctcgctttccggtcagtcgaatcgtcgtcagaaaacactcaccgccggcaacttttccggcgaacttttccggcgactttccggcgacgatttttttctacaccgcaaggagcgcctggaggagatctccaatttgtcccaaagcaccggaaccagaaacccatccacgcgccgcccacgcgcgttttttcggccggcgactgcatctcacgcgccggcgcgtgagggcgcgtgagccactttccggcgacgcgcttcctcctccaggctcgcctgacgccgaccagccacccttcctacctgtttgtgcaatccgagccctgcacgtgcctcttttggggttcttttgcttccgcgggccctctgatcagatattccggcgtcctccggctattttttctcaactccagtccctgcacgtgccttgaaaagtgttcttctacctttccggtccatgacaaaatacggaatggcatcatcacaagtatccagcgtcacgtcaccagaatcagggggcagatctgaaattccaaaccttggtggcaatgattcctctcctattctcatcacaggacacaaattaaatggccataactatttacagtggtcacaatctgtgttgctgttcatttgcggtaaaggaaaggatgagtacctcactggagaagcagtcatgccagaaactacagaaccgggtttcaggaagtggaagattgaaaacagcatgatcatgtcatggcttatcaattccatgaacaatgacataggcgaaaatttcttgctgtttgggactgcaaaggacatatgggatgcagccaaagaaacttactcaagttctgaaaatacttcagaactatttcaggttgaatcagctctacatgacttccgtcaaggagagcagtcagttactcagtattacaacacactcacaaggtattggcagcaacttgacttatttgagactcactcatggaaatgttcggatgatgcagcaacatacaggcaaattgtggaacaaaagagactgttcaagttcttcctaggactaaacagggaattggatgatgttagaggccgaatcatgggcattaaacccctgccaagtctcagggaggctttttcagaggttaggcgtgaagaaagtagaaagaaagtgatgatgggatcaaaagagcaacctgccccaacattggatgcctctgcccttgctgctcggtcatttaatagtagtggtggagatcgtcagaaacgggataggccttggtgtgattattgtaagaaaccaggccattataaggagacttgctggaagcttcatggcaaacctgctgattggaaaccaaagccaaggtttgacagagatggcagagcacacgtggctgccaactctgagagcacatctgttcccgagccgagtccattcaacaaagagcagatggagatgctacagaaattattaagccaagttggcagtggcagtactaccggtgtagccttcactgctaatcgaggaggaatgaggccgtggatagtagacacaggtgcttctgatcacatgacaggagatgctgccattcttcaaaattacaagccaagtaatagtcattcatccgtccatattgctgatggttcaaagtcaaaaattgccgggacaggttctataaaacttactaaagacttatatcttgactctgtcctccatgttccaaacttggattgtaatcttttgtccattagcaaattggctcatgatctccaatgtgttactaaattctatccaaacttgtgtgtttttcaggacttgaaatcggggaagatgattggcagtgctgaactgtgttccgggctctacctcctttcatgtggccaattctcaaaccaagtctctcaagcaagttgcgtacagtctcagagtatgtcagagtctttcaattctgtgtcaaattctaaggtcaataaagatagtgagattataatgttacactatcgccttggtcatcctagctttgtttaccttgcaaaattgtttcccagattatttatcaataaaaatccagcatcttatcactgtgaaatttgtcagtttgcaaagcatactcgaacagtatatcctcaaatcccatacaaaccttcgactgttttctctctagtacatagtgatgtgtggggtccctcccggataaaaaatatttctggcactcgatggtttgtgacattcgttgatgatcatactcgggtaacatgggttttccttatgaaagaaaagtcagaggtcgggcacatttttcaaaccttcaatcttatggttcaaaatcaattcaattccaaaatacaagtcctcaagtcagataatgcaaaggaatactttactagtagtctcagtacttatcttcaaaatcatggcattatccacataagttcttgcgttgacaccccacaacaaaatggggtggccgaacgcaagaatagacatctcttggaggttgctcggtgccttatgttttcctctaatgttccaaactatttctggggggaagctattctcacagctacctatttgattaaccgtatgccatccagagtgcttacctttcaatccccacgtcaacttttcttaaaacagtttcctcacacccatgccgcctcttctgatttaccactcaaagtatttggttgtacggcatttgttcatgtgtatcctcaaaatcgtagcaaatttgctcctcgagccaataagtgcattttcctagggtattctctaacccaaaaagggtataaatgctattctccaaccaacaaaagattttacaccaccatggacgtctctttctttgaacatgtcttcttctatcccaaatctcatgttcagggggagagcatgaatgaacatcaagtttgggagtctctttttgagggtgtaccttcttttcactcagagtcaccaaatccttcccaatttgcgcccactgagttgtccacacccatgccgtcattagtccagccagcccagcacacagatgttccttctcccgtgaccatccagtctcccatgcctattcaacctatagccccacaacttgctaatgagaacttacaagtttacatcaggaggaggaaaagacaggaattagagcacggatcacagtcaacatgtggccaatatattgactctaattcaagtcttcctgaagagaacataggtgaggatagggctggagaggtgttaattcccagcattgatgattctactttgccaattgcattgaggaagggtgttaggagatgtacagatcatccaattgggaactatgttacgtatgaagggttatcaccatcttacagagcatttgctacttctcttgatgatactcaggttcccaacacaatacaagaggcattaaaaatttcagaatggaagaaggcagtacaagatgagattgatgcacttgagaagaatgggacgtggactatcacagatttgccggttgggaagaggcctgtggggtgcaagtggattttcaccataaaatacaaagcagatggatcagtcgaaagattcaaggctcgtttggtagctagagggtttacacaatcctatgggatagactatcaggagacttttgctcctgttgcaaaactgaacactatcaggatccttctctcattggctgtcaatcaagattggtgcttgcaacaactggacataaaaaatgcgtttctaaatggggacctagaagaggaagtctacatggaaataccacctggtttcgaagaaagtatggcaaagaatcaggtttgcaaactccaaaaatcattgtacggccttaaacaatctcctcgagcctggtttgatagattcacaaaagcagtcctgaagctgggctacaaacaaggtcaggctgatcatactctatttgttaagaagtctcatgccgggaaattggccatattgatagtctatgtcgatgatattattctatctggaaatgatatgggggagttacagaatttgaagaagtatttgtcagaagagtttgaagttaaagaccttggaaatttgaaatatttccttggtatggaagtggctagatcaaggaagggaatcgtagtctctcaaagaaaatacatactcgatcttcttaaggagaccggtatgcttggatgcaaaccaattgatactcctatggatagtcagaagaaacttggtatcgagaaagaaagtacaccggtagacagggggagatatcagcggcttgtcgggcgcttgatttatctctcacacactcggccagatattggctttgcagtgagtgctgtaagtcaattcatgcacagccccactgaggaacacatggaagcagtctacaggattcttagatatttaaaaatgacaccagggaaaggcctattcttcagaaagacagagaaccgtgacactgaagtatattcagatgcggattgggcaggaaacatcattgacaggcggtccacttccggatattgttcttttgtctggggaaatcttgttacctggaggagtaagaagcaatcagttgtagccagaagtagtgcagaagctgagtacagagctcttgcacagggaatctgtgaagggatttggataaaaagggttcttagtgaactgggacaaacgagttcatctccaattctgatgatgtgtgataatcaggcagctataagcatagcaaagaaccccgtgcatcatgacaggaccaagcatgttgagattgacagacactttatcacagagaaagtgactagtgagacggtcaaattaaactatgttcctaccaagcaccaaaccgcagacatcctcaccaaagctttacctaggcctaacttcgaagacttaacttgcaagctgggattatatgatatatattctccagcttgagggggagtgttgaaataatgccaaagttaggactttaatttaggaataaaaaaggagagatcatttaggatatttccttatgatttagtttcctaattttaggagagaattaagctagattgattttttcttattcagtcatttgtgtatatatatgtgtatggtgtgtaccgattaatatcaataaaggagttcagaaatttcttcaccaagtcccttgataacaaatcatctattgaattattttctcaatattatcgtgtgacaaaatctccattgcatgcatttgctatgtatatgattattctgcctgtatgtcctccttcgtttcttaccattacatttcaccttctcataaggcattctacttgatcaatcttatgttccccctcctaaaaagaagcttttacatgagatgattctcatggcattcttgcttttaagaatttcttgaagagcacttttgaggtaaaagatcttggccatcttaaatatttccttaggatggaagtctcttacttcaacgaagggattttcctttgtcaaatggaagtatgctatagatttgtttgaatgtacaagttttcttgtcaattgagtgatattcctattgatatgagcaaaaaattatctgcaaattgcctaattctcatcgcaatcaaagtctggttggtaaacttatttatcccactataactcatcctaatctagcctattcagtaagtattgtcagccaatttatgcatgcgctacgtacagaacatttggaagcaattgaatgaatattttgttatatcaagaatgctctagggaaaggaattttgttccaaaacaaaggtcacctaagtattgttggctattgggctggttcaccatatgatagtagatctattacaggattttttacatttatgaggggtaagttggtaacatggtgtactaaaaaacaatatgtgttgcttgtagtagtgctgaagctgaatagagccatgtctcacaacctaacacctaagtccatgacacatggctcaaacatgtagtgaattgatttggcttcgaaaattggtagctgagttgggttttccagtttcaactcctttctctatgcattgtgacaatcaagagaccattcacattgcatctaatcttgttttccatgaacgccagaaacatgtggaaattgattgccacttcatttgtgaaaacttattagctcgagaaatttctactcgctatgtttgctctataaatcacttggctgatgtttttacaaaagccctttctagagctgcgttacaaaatgctttatccaagctaggcttgattaatatctacacattagcttaagggggagtgttgaagatattggtttctatcatcatatggttatttagttatatgtttataattttattttattttattttattttatttatagataaagttatcttgttgataaagttatcagatagataggaagttattagttaagatagaaagcagttgttgtttttatttatatttatatttatattttttatgtaatctagaactctataaatctcatataaatataaggagtttccggccaaccaaagatatagtggactggattttttcttcactgccatgatttacaacaggtattaggatttataagaagtgagttaaaagaaattagggtttaggaatatagtagtgggatttaagttaggaccagggtttggattagaggaaaaaggaaaattggaaaagtagttcttattcttcaagttttactacgagcttttaggaattttagctagaagagagattggtggagttttttcatcaattttaatgcacaaatctataaaaaaaatctctaatttactattctatcatgtctgtagaagtcttttgttgttcttcttgaacgctatcaatcttttattacaaaaacatagtgctaacccttctaactcaagggtagaaaatattcaatcagtatatgaaatttcttggtatggaaagaatttctgaactcaaaattaaggttatagtcattccaaaaaagaaaacaagagtgagaaattctgagaactaaagtgcagctgacttggatcacagacagtgaagtttattaaaatgacttaaaatttattcctggaaaagattttcaattggtttgaaatcctaggatgctgtaaggaaataagtttttccataccccctttatagtcttgttccttgtagtgtggcctacatgggctccctcaaattattgtgctatttgattgtaaaatttggaggggctagtgggtattatcttcttttttttctagttccagtctcttgcattgtgttggacattcatttatgcagtctagaaaatctaaaaaaattgcaattttacttcttttctttagtttatttggcatggatctaaggattcaaggaattgctcttatatgttaaacttctttatgttggtcttttccgtggtgtctgatacaggttcaccaaactgctaaaagtcctacctcggatcc

SEQ ID NO: 10955 - DNA, 1250 bp, Vitis vinifera
  Intron number 12 from transcript GSVIVT01023393001 (locus GSVIVG01023393001) derived from phytozome v7.0 (chr-ID chr 14; pos 12801632 to 12802881 reverse strand)
ctccaagcatctctgccaaattgaaagtccatcaggtttcttcctaaacttacatgtatctgtgttcttctgggatccttgctatttagctagattgctttttcaaaatggcttgaatttaatgtgtccctttcaatcatgcctcctgcaactttcaaatgtcttcttgtttccaaaataggacattcttagaaactgactttgtttaattgttttatttctactttaaatcccttctgccctcttctcttctctctctctttaattttcttcatttcagaagtccttgctgtcctcttttttcattccaactaagttccttccctattataaaattgaaagtgtagggttttttcttccttggtttgatagacaactttctttatttgatttggatacttgtacaatttgctagttatttagtgatctgtctattgatacatgaggggctacaatagagagatggcatgcagccaattctgactgtcatggatttgaactgttggacatactggcatgggttaaagaatatatgaaccgcaaggcagccagagttttgttgacttttatgtgcctcatgcctgctggccttgatattcctgcacagaaaattgaaattggcaagaataatcttgctttgtcacttttggttgttatggagtgttgttccccatttaaagtatttgtttgctattagaagattggatggcatgtcaagacttttcctacaccatttctccaaatacataagccaaaagaagggtaaagaaaagagagaagaaatcatcatcatagtaaggttggaaattttttgttcaacttggtccagtgactcagaggaactagaggcagagaggatagaaactgttccaaaatccagatatcctaaactgcctgtgtttattttgaccctgccacgataacttgggactattgctttcctgcttggtttagtcctactaaaacaaagttgagatgtcataaatttgagctgatgtattctggaaaattgtaacaagaagtatgcctttaaatttgtttacttaaaattagccttttatctctaataatggtgttcttgtgtcgtgtaaaatacttgtttcttgtaaagtgcttgtttgatggcctcctttaaactaatgatcatgaaggtgttagtatattggtgttttgtttgttttttttttgtttttttttgttttaatgaaatcttatcttgttcattccttcagatcacagggatacgattt

SEQ ID NO: 10956 - DNA, 5950 bp, Vitis vinifera
  Intron number 6 from transcript GSVIVT01036887001 (locus G SVIVG01036887001) derived from phytozome v7.0 (chr-ID chr2 ; pos 18205064 to 18211013)
atactgcagattgtcagcttagatcatctgctgtatgtcacttgaatcaatttcacttcatttccatttttgtcaattcttatatctattcccataaaaaatgaatacatgttactatctatggagggtgcttttgtggtatatatgattttttgtcttcttgttttttttattttttatgtgaggttgttggtgaatattatggtttggatgtgaattgaatgtattggaatgtgctctgaattattttttggcataactgaaacataataatggaacaagaggtaatgatgatggaataatggttttttttttcttttgcattttatccagtaagctaaatatgttaataatgctattgtggaagatccatcttgtgtaatccaggaggatgaagacttgtcttttttgtagcttcaatatttcgaacttgcattaggccatgtttacttcctcacccatttagaaagaaaaggggagacaaagctctcaattctattagatttattgcttttccgtacaatagaaagggacgtgaattgtctttatttgactttattgattggctgggctgtaagtgaggcgaaggtgttgttttttgtgaatccctcccctttttggccttgtatacactgtgtatgctttaggcatgttttaggcgcttttaatataattgtttttacctatcaaaaaaaaaaaaaaaaggacgtgaattcttgagttgttaaagttgccatttttgaacaagtacgactttctttttgggggattgaaacaaatatttctaataaattgaaaaaggtttaatactatttattccctcaacctatcacatgttttgcacattgccccctcaagtttaaaatcaaacaaattgccctccaaacttcttaaagacaagtgctatgcctttttttttgttggatggtgttagcttgattggaaggaaatgttatgtgttgtgcatgtgacttaataagtgaaggtagatttgttatttgaatcaccaaaacaaagctctcccttcttcttcttcttctttgttcttcctctaaaaccttaaatcctcaaacacccacaaatccgaagtcctagaatcccgaaactcaagctttgtgaagaaaaaacgcaattgaaagattaatggatcctcttgttcattactattgtggtaatgaggtttgtattatgacatcttggactagtctaaatcctgggagaaagtttttgggatgtgataaatataaggtaataatgtctttgaatggagagcttgacacaaacaattaaaaaaaaactaaaagttcaagaccatgacacaaacaaattgttcaagagcatgaatgcaaactggtgttataaattgaccttctgctcacaatcaacaaatctcgtcattccattaatttcaaaacatgattttatagcttaattccatcaaggccccaaccacaacttctcatctgttcaatttgtttacaaaaaatacaaaactaaaaccaagttgggagccttcatccgatttacaaatttccaggtaactttgggtacagagcttcaaagccttcattagaaataacaccatttctttgtagcatgatgacctcaagaaccaaacatatcgtccatggaatgatcaaccaaaacatgcatttaacccttttcgataaacaaacacttcattccccttcttcttccatctattcaacaatccaggaatgattttctttgacctatcacacattggagcatcgtaccacaagaaaaatccacatcctccatattttgtgtcaaaaatttaacacatataataataaaatgtctacaaaaagcaaatgatcaaaaataaatctggaaatcaaagacattattaccttatatttattgcatcacagaaaccttctccctggagttagattagtgtaagatgtcataatacgagcatcattaccacaatagcaatgaataagaagatccattaatattctagttgtgttttttcttcacatagttcgagttttaggattctagggctttggatttgtggatgtttgaggatttaggatttcagaggaagaacgaagaagaaggagggagaactttgttttggtgatgcaaattacaaatctatcttcacttattaagtcacatgcacaacacatgacatttccgtccaattaagttaacaacgtctaacaaaaaagacatagtgctggtctttaagaagtttggaaggtaatttgtttgattttaaacttgaggaggtaatgtgcaaaacatgagataggttgaggtagtaaagtgtattaaacccaattgaaattaccaaacaatagaacaacgaaagatgggctattctttacagaaaagtaagagaatctacaaccacaaacaaaaccacaggccctactctactaacaaaggggatataaatttccaagaaattcctctatggatctagctccctctagcccaaaccattgactgcatgaggtaccacccttggatctccaagagagggggaaaaaggtcttgagaagggtggagaaatctccttgtccaagatcaagccgcataaggcctttgcctcatcaagaagtggagaaaatagcagatgaggaatctccttctgtaatgaggttctgaatacccaaactaggtgctgcttttaaacctttcaagagatgaaattgatgctcccccacctttttctctgtttgaatagagctgcctcttttcctatgtttcaaatgagagggtatggttttcatgtcgtttctatgtgtgatccttctcacacctttcctcaggcaaattccatttgtaaagtaaaagctctcttagggtcaatgtaaagctctcttaaacattgtatctagttcatgagagttgtatccttttctcccattgtaatgatctgtggatcatcttttttcttcactcttgcttcaaagttttggaataaactcttttagtgggtttgcattggtttcccacttgtggtatggcaaatttgatggtcattacttccactggtcttggggacggtcgaaggggtagggtgatttggtaaggggccaagctcgccattaatagggcatttggtcgggttagggatgctataattttttaagaaattgaagaatccccaaagtccatgtgggaagtagtatactccctttacatgctttaccaaggaaaggtatgctaagactggttgtatggtagtctcctcccttagagactccaaaactctttttttttgataaataagagaatgtattaaaagtgcaaaaaacacacataagattacacgggatgtatacaatgagcgaaataagcaaaacaaataaaggaaaaacaaaaaactactcccttcctcaacaaaaatccaaccaatttacaaaatcaattaaggacataatactcccatctatatacacgagaatccatagataaaagactgataaggaaagaacttctaagactttgatctaacatctcctcatcttcaaacactcttcgatttctttccctccaaatagtccacaaaatacgtaagggagtcactcttcaagccttcttatgccttgtacccacaaaagcactatgctatcctagtagagtgtcccttactaagatagaaataactcaagggatgtcaaatatagaaaacaccaacaaccataagattcttgccttagcacaatgaagaagaatgtgatcaatggattttgactcctctttgcaaagagcacacttgttgactaatgaccaacctcttctctagagtaggtccaaagtcaacaccttcccctaacacacttcccaagcaaaataaataaataaataaaaaactctacaaggaatccaagaattccaaatagttttctaaaggaaaagggacgacacactctggttccaacatagagtaaagggctcttacaaaagccttcctttgtatcatccttccaaactactctatcctcctcctccttattcacctactaaccttggagtttaattaggaaacgctccacaacatccaactctcaatcatctagattcctcgcaaaacagtagtttcagtctcttcctccttttgctctcataaatttgctaccacgcctcttttgcattggataaggcaaacaaagtgggaaacatcttgcaaaaaggcttctcactacactatctttcaaaaatttcactttgctcccatcccctacaacataggaaactcttgagttgaagaaatcccactccttgtttttgatgagaaacaagagtatagtatattgaagtaagtaaaaataagatgagaaatcctccaaaaagtacacaaaagaaagcaagaacctccaagttcaagaatttatacgactatgaggttcaagaaagcatttcagacatgatgttcatcaattataaagattttggcacttccaagagagggatagttctgtggcaaaatgcgtgcattgttgtaatttgggttgtgtggcaggaaagaaatgctaggatatttgaggagatagctaggaatttagagaatctttgggattccattcatttccttgcttctctttgggttttttgttctatggtttttaagggcattccccttaacgtgttagaactggattgactagcagtgtgtagttccaacgggatggtctagccaagagagcttgctcgtagttttcatagtgtagttttttgttcttttattgtgttgtttagttttttctttggagggaggattcctcatccttcttttgtaattctttttctatcaatatatataattgttgtttcctataaaaaaaatgaggttctagaagctatgttccgagtgggaatatacaaaagtaatctatccttgctagcccacacccttggaaatcccactccttgtagctttccataaaccgaccccatgagagtctcacctcacaagactgccaccccttttcttcctccccatatttcctctttatgaccttccaaagtgtttccccttcacttgagtaacggcaacaccatttgcaaagaagagctttatttagtaaagagggagaacaaacacctaatcctcctttctcctttgccttaaattttgatgagtgtttgtctgggaattcagacaggatgagaattggtgttgttaccaaacgcatggctgtgttattgggcctttctcaaagctctcttgttctgtgttgactatagaggtgaagattctagccttgtttgaaggctggttggtggcaaaggctctagggctaatagcattcttgttgaagggaatgcagctgtgatttatctcttgggtgtctgagggtaggggtgcttgggtaagcaaaatcttggaacactctagagatatataacttggcatggagcatccttgttagaggttttttaagaggattttcttccaatgaagtttttgtagagttatgagtatatttggttttgttggtgcaggtctattttttccttcttgttttggttgaggaacacatctttccttaaatttccaacttctagccaatttgaaacaacttgtaattcctgttcccgatgttcttttatgatgccctctgctcagctgacactaggcaaactatcaaatccagtttgagagaaaacttgtaatgtcccgtaagtacctctgtgtgaacaaatacaacttatgggtcacatggttgcagattgcactggtggtagtgtttctgataaaatttgttctagcactcgttattaacaccacttctggacattcttgggtgtttgttctctgttattccatttctccatctcaacatcctgatttctacttattcttccttcttttgtgccttaaatgggaactttattattttctcattttttttctggtttggctgcaggtggaatcgtatttacgtatcattggagagccaaa

SEQ ID NO: 10957 - DNA, 1788 bp, Vitis vinifera
  Intron number 10 from transcript GSVIVT01001079001 (locus GSVIVG01001079001) derived from phytozome v7.0 (chr-ID chr 1; pos 22425462 to 22427249 reverse strand)
gaaccttatatcaatcaggtttgtgtttatatttgcctttattttttatacaaatatgctatattttgcttgattacttaggacaatatataatttggttgttcaactttaaaagtctgtttaggttgccacagttgttacattttaatcattcaagagaccaatcaaaagttcttcatggaatatgattggagttcctcgacttgcatcggttttggattggattgcttgatgcttttgtatttcacagagatttagtggcattagaagagagacttagtgcccaactggtgcatctgtagcttctagtgaaatgcttctttaaaaaattctggaagttcttccaggactcttttacaaaagcatttagcccttcagcccgctagggtggcccagttggttagggcaaatgctaggatgtgtggtagaggcgcacgatcgtgggttcgaatcttgccattggttaaataccctgatttacctggtgctggttgttgtgggcgtggtcatcaccctgaggtttgggtccccatggagagtcctaagggcttggccatggaaggttcctcggttatcgaataaaaaagaagaagaagcatttagcacttcaatctttactgaatagagcatttaagccacaaatctcttgtagaccctttttaacagccaggaagagcttttaggttggcccaaactgtgctaaaaagggccttagattatcctgctaaaactacggcatgactcttgaaatgacaagtgataattcatgttgacaacctcgaacagttgagagaaagcaatgctgatcaatgtattaaggggtgaaactttgatgggctagtttggtatcttcctaacctctgatgataaaactgattgcaatgacaaaatgggataatcatcatataaatttacagatcagaattataaaatcttaattttctggttttcataaggcttaaaaatgtattatatgaatgggatatgataataattattatcaaaggatacgaaagagtaaaacatgcagctttcttggatgcagttccatcaataggcacaggtatcaagttttttaagtttcagcatatattttattatccaccatggtgtctattgaggtgagagtaaacataagaataatctaatattattttagactgtgaatcaattctccaagtcaatcatgttatgttgcctgactttaaaactattggttccttttcctcaggaaattataaaacatggcgattagtgggctgtgtctcaggctacaaatctgaataagatgttatatttgcatccttatcttagtagttctatgtgtaagaacatgcaaatgcgctctatatcagtcaaaatatttcaggataaggaagatttggtactttgtaaatgattaatttatgtaaatgggagattggaaaagaggggatggtcaacatcagtgcttttatcccaaaagtgatgttgtcttaggtcaatcatccaaaggcgtataaaggagttgaaggggaacagtccattgttttaaatctggagtgatgctgtggtggtggtgtttagttctatttgtagttgggaactatgaagtgtgaggtttgtgctagtatgatctaggtagggcagaatgggaaaaaggggatttgtatagtgatgccaagtagaagtttcatttaatggaattcatgatttaaggattcttgcaattctgagcttatctttttctatttatagttgggaactaatgaatcactgtggctctcatttgttgacaggttttgactt

SEQ ID NO: 10958 - DNA, 13046 bp, Vitis vinifera
  Intron number 9 from transcript GSVIVT01011175001 (locus G SVIVG01011175001) derived from phytozome v7.0 (chr-ID chr8 ; pos 7761797 to 7774842)
taccaggtgttaattcttttcaggatacgaacaaggtatggcagcatagtagttctcttaaatgatgatttctttccttaaatcattgattcatttcttatcccgcctgctttgtaattttttcagttgaccatcatctgaaaaacgggtagcatgttatctctggttgtgacctatgagagttccttgtttgtccctctctgtttgatgcattggcagttctattaatatgttattatagcccaatttctgatgatcttaataaaagactgacattgtttatcagccttattgcataacttaaagataaattggtttcagtttgatgagaggcttgccttttccccccatatagttttgtgtaggattgtctcttcatgtattgtatttgattgtattcaattgacagaatcacaatagtgtagaaagagaacttctgtataatgacaattttatgtcattaactcaaaattatgtgatgttggacaaccctaggatagttgcctacaatcaaataggtgggctagggtttttatttatttttagggtttaaggagaggaacaagggataaagtttatggtaaagaaaaatatggagaaataatatagaagaaaaaaaaatatagaaaccttagtcttactaaggccttctaggagtttcacgtagaaggaaaccaatggagtctcaccattgaaaattgcaaagtatgcaagaaaacatgatgtcattaatcatcgatccattactttggcttacatcaattagtcttatttagaagcttctctaagaaatttaaagggtactaagattctaataacctaatatgactctaattctaattcacctattacctcattagctattcctagtttaactccaacaaatactgatcttaatttaatttcaagtaatattaatcatactttaattaaaactaatactaattctctttcttcatgtatatcttggagattcattctcatcaaactccccttcaacttgaaaaaaaacttgacctcgagttttagtaattttccacaatcaattgaaatcccgagcaatgccttccatcctttctttcttcgtcgacacttaaacatgatagaacaggatcttagaatctcaagatctcttaaacttgtttaatatcatgcaagacaagtaccaagcttcaaaaaattttttagtgttgtaaaccaagttgatagttgtcaaaataattatgtcatgaacaagcttgtggagagttgcttcctacacttttctttgtaaattgtgttaaaggataacaagattcttgaattccctatattcaaaagaaatttcagcaattcttgttatatcatagatttcttcatgtttgccaccaatcacgataatgttttgccttggaaagtcaagcactagtttttctaaagctattacaatttctttgagctctcctacaggttgttctaggatcgatttcatcacctctttcattctagattcatcattgacgatttctacctcctttctagtaactctgaattgctccttaatgagagtatttgatagctcttttggttttagggatgctatttaaccttttggttgtttaagtggtgaaatttccttccttggatggaggtttttcttacacccattgtgtacgtgtgcaagtgttctcatatccatcatgttggaccctttcataaaaaagccatggtcttccgatcacaatttgaacaactttcattgggaaaacatcacaccatatagactcttcatagtccttaccaaaaaggaatgtgaccaagcaatggaaacttattggaatagatgtgtcattaacccatgctactcaaaagggatttagatgtttccatattttaaggtttagcttcttaacaagttcatttgaagctaagttctatcaataatcatagtacatagtcttccttggcatgcaacacaagttcgaaagatgctaggaagttgtcaatcctcttctcttttcacctttgggacaactaacaaaggttgcattgcaagactataaccttttgtcataccatcatagtaatcacatgtttcactaagttcatcttcaccatggttctcttattcctttggataactctccaattcagattctggttcttcaatacaataagtgtaaacccagcttatgctcacaacaacataatgatcatgctcaccacacttaaagcataaaggagtcatacctaccttttcatctccaatactaattgaagtttgaccctttttagcatctctattaccacatttgaagcttgttgattgttgcacttaccatttacatggttagaagtttggaatttgttgtgcttaatggtttgcttgctgtttgattgaagaaagtagtctcaatctgtgaacttggatgttaggaaggctgaaacttaagccctcttctattttaagggctagttgataaatatcatccacggtataagtgcatgcaactatcatctcaagttcaatctccatttgaagtctagatttataacgggttgctagttgagcctcactttcccgcacttgattccgagtgctcaactcatgaaattcttttgtatattcttcaacttagtacattgtttgagagaaaacaattttgtgtacatgagctatttacagtcagttgggagaaagtgctccttcatcttgttccatgtgtctataggttgtgtggttctataaagttcattctcaatattatgccaccatagcgtgttgctcctttcaattctgtcttcacaaaacagaccgttctgctttcaggcatatcacaccaatcaaaacaatcttccatcgacataatccaatcaaaaaaagttgttagatgttattttctttaaaattcagccacttcaagttgtaccttttttgtcacatcatcatcctgctcaaagattttgccccttctttgatttcttgtcataaaatgccttgtttgtcacatggtctatgagactattgtccgaattggtggcttgcaatctcatcttcaattaggcatttttcatgactcttttctaataacttcatgatctcattaagtttgctatttagttgtattatagcatcttaatgggattgttgtatgacaaaaattttctctaacaatgttgtaatgacatcttgattgttaaaagtattttttgaactcatgtttgtgtaatttgctccattccttaattgtatatgccttcaagccaagaacttttgctctaataccaaaactgatgtaggacaaccctaggacggttgcctaccatcaaatagttgggctagggaatatatatatttttttatttaaaaaaaggggtttaaggagatgaataagggataaagtttatggtagagaaaaaaaaatatagagaaaaaatatacgaagaaaaagaaataaaaaccttagagtctcattaaggccttttaggacttttacatagaagaaaatcaatggagtctccctattgaaaattgcaaagtatgcaagaaaacatgatattattaatcatcaatccattacttaagtttattttggtttacatcaattagacttatttataggcttctctaagaaatctaaagtctagtaggattccaataacctaatatgactgtaattttaattcttctttaacctcattagctactcctaatttaactctgataaatattaatcctaatttaattttaggtaatattaatccgactttaattacaattaatactaattccctttcttcatatatatcttggagattcatactcatagctaagacttgaaatcttattatgacataacaacttagtccctgtaaaggacaacacagtaaaaaaattgattttgtttgctttccaattgaaaaaaaaaaaaacacttatttttattctttaggttcaatgataattgtattaattttttttttcaatccctagatttaaaagagaaaaaaaaaaaaaaaaccctcttttgttgccataagttgtaggacaaagaaactcggaaccttaatgaaaggtgaatttcaataatggactacacctaggaggggggtatataggtgttgttgaacaatttaaaaaaatctcccaacaaaaattacctaaccttggaatttctcaacgtcaataaatttctcttctaacaacttttcaacaaagcataaaatttacaagcaagtatgaatgcaacaacactctcccaacaatttatagatgtaattcacatgcaaatgcttcaacactcctcaaaattaatttaaaagaacaattctctccttaactcatttccaattactacaagatatcattaccaaaacgaacagaaaaattattcaaaatatccaatggataatcacacctatttaaactcatttttcttccattaaacatatatgcccaagtacccaatgatattaaaatctgaaaataaattaaagagtagaatgagagaaagagacgatgtaaccaaattttaatgtggaaaacctccaaataaattaaaaaactacagacttacaatcaattgaaaacatccactatgaagaacaaaaaattgaatataaagttttacctagcttaagtctaccaatcattcctggaccacttgactagaacctttcactttcaacaaaaatttgaatgcaaatgggacgagagagcgagcgtgaagagagagaaaatcgattggagattcggaggagactgaagaggcgtagatttgtagtggaattgaaggtatttgagattgaagtagaggagaagaaaggaagactgcaagctactttagtggagagagagaggaatctctttttggattaggttgggaccgacgagtctaggggtcttcctggaaagcttgaatcaatgcattaaagaagtgaaagctagaagatgtgaaaggggctggaaggaaaacgggagatcttcatcccgaaaggtagaggagaaaggggaggttagtttactatggcggagatgttatgaagtatgggagtagtcactggaaggagggaaagaaagcaggaagagacgctaccgttgaaacctattttggaaaagtcttatgcggaggtggttaagatgccgagaagcatagacagagatttagttagggtggagataagatagaaggaaattagcagaaatttgagaaacttggagcattgcctcgtcggatgttggaaccctagttcagcgagaggagaagatttggaaaaattggggattctaatggcaaaagcttaggggctgaaaggtaaactagggatggcaaagatggaaaagggtaaggtgctgttggaatttgaatcgttggttgaagctaagcgagtgctcaattatgggaagagatcgtttggagggattcatttgtgtttggagagttggagccttaagactgggtgcttggttgaaggagagaaaaaaagtgcggcttgggtaaaaatcgtggggttaccggtcttcttatgggatccgatcatattgagaagggtgggggaggagtgcgatggatttttagcagttgattcccaaacgaagaaaatggaggagttacagtgggctcgtattttggtgaagacgaacggcgaagacctacctaatgtgttggagatttggatcgaagaggtctattactccctgattctatggtgggagattaggccatcactgagaaaggcatcgttcgatagtcgagggaaaacaaacaactcaagagatgaggtcgggggtgatgttaacgcacgcgttggcccgcgtgtggtggaagaggagggtgatgtggggctcaaggttctacagcggctagtcgaagggacgtgtgggcaggcgagcgggccggggcgtaaagtggactcaagacggagccaaaataggttggtggcccgaccctttgaaggacttaagttggtgagtgggctttctaagttaagcctattagtggatttaaaagattttaagttggtaggcgggctttctaagtcaggctcattaatggatttaaaattaaaaggggttgcagtggctgaagatgggctgtcgtcttcaaaggatttttggtgggctagtgaagaggagaataatacgactattggtatagacgacttggatggggaatcaagcccaggcccttctcagcttcctctagtggacagagcccagaatgttatggcccattctccagcctggtctggcccaagaaattggagcaactctaaatcagagtttattaaactttgggtgacggaaggaatgaggaagcagctggtagaagagcaactgatagtggagaggtcgaagactaatcaagctttagttgaagaagctttgagggatggggatgattttgtttcttggggaagaagggattcttggtcatctccatctcattctttttcttttggtcggattccaatgatgggggagtattatgacttttctggggcagtaagtgaggtagtttagggggagattccgttgcgtatggtcactgcatctgggattacagagggtgtaaccactgcctgttaagatttgataaaggtgaataatggtagcaataaggaaagaagagtggagttgtgttcaactcaatttgagtcataggaagataggggttgggaggagaatagttgggaggaaagtagcttggcaaggttcaacaactttctgggtttttcgacggaggggttggaaaaggatattctagattttttttttatatcaaaattagaaaaagaagagagagaattcatagtaaaggtttattggagaaatcaaaaattgaaagggagttaaagagactagagtgctcaattaattatgagggagggaagaagcagaaatgccccatgcagggaagagggtgtcagctcttggaagtcctatgaagatcaaattgttgagttggaatgtgcgtggagcaaatgacagcttcaaaaggaaattaataaaggctctcataagaaatcagaaggtggatttattttctcttgaggagacgaaaattcatgcaatgactgatggtgtggtgaggagtttggacactgggagatttttagaatgggggactttggatgcttttggctcagcgggaagaattttgatttgttgggataaaagggcgttggaagtactagatttggaggtgggtcaatattcagtctcttgtaggttcaggaatgtggaagatgggtttgtctggatgttcacgagagtatatggaccgttcactagagaggaaagggaatgtttgtgggaagagctaggggcgatcagaggaatttgggaagacccttggtgtttagggggtgatttcaatatcattttatttcaaagggaaaggagtaggcaagggaggttaacagcagcgatgagaagatttgctcagatagttgatgagttagagctagtagatttacctatgcaagggggattgttcacttggaacaggggacaaaataatcaatcttggctagattggacagatttttagtgactcaaaattggcttgatcagttcagcggagtcctttagagcaggctgcctagacctacctcaagtatctcaactgctcactattggcctcgcaaaataaaagggtgttgttagcaaacagaagatggagcagatccccttctactccactattgcttcccaccttaaaccccttaatgaaacccccgcttttggctttgaacaacaactggctgagagtctccatgactaataagaagagataaggggataaagggtcgccctgtcttaagcccctagtgctatgaaaaaagtctgaaagggttccattaattaaaattgagaagttagttgtggagatgcaccatctgatccaattaatccacctctgcccaaatcccatcttggatataactgatagaagacagtcccaattgacatgatcaaatgccttctcaatgtccaactttagaaggagaccagagagattatccttcaacttggagttgacagcctcatttgcaatgagcgcgacatccagaatctgcctatcttgaatgaaggcatgctggtactatgaaatcaccttccctacagctagtttcaacctatttgccaagactttgacaaacaatttgtaaaggctcccaatcaaacttctcggtttgaaacctttcaactcttccgcaccccccttttttgggatcaaaacaagaaaattgtagtttagacttctttggaaagtgccaaggtggaaaaagtcaccaaaaaaggccataatcttgactttggtaaattcccaagaaattgccaaaatgccatggtgaagccatctggaccaagcgctttatcgccggagaggctgcacaaggctttgaacacttcttctgagaaaggcacctctaaacttctggacctttttgtccccataacacgaaattgtaaatccttaatttgcggtctctagtcctcgttttccattaacaatcctataagtccctacacaccctagacttgatatcttcctcattagtaagagtgaccccattaattttcacattggataaaaagtttcttcttgccttgacattggccatcttatgaaaaaacttagtattcttatctcccccctttaaccaaaattcctagatttttgtctccaaaaagtttcttccattaaaacgcaattcttgtactcctccaaatccctcattcaagcccctgcttcctcaaaagataggggattaacgctctcctttgaatcccagaattgaattcgagagaaggcctctgattttctagcagagacattaccaaaaacatctttattccattttcttagatcccttttaagagctttcaacttttcaacaaggcagtggttgttagaccgtgcaactgagtacctagtccactactctcttactagctctttgaactcatctgacagaagccacatattctcaaagcggaagggagtcttgtcttttttaaccccctcccccccaccttccagagaaatgggacagtgatcagagacgattttaaggagaacacattgaaagacacccgaaaaatgatcctcccactcgttggagactagaaagcggtctagccttgacgctacttgagaattaagaccaccgtaccacgtgcactaaccaccggaaaagggcagatcctttagacttagctcctcaattacctcaaagaaccttctcatctatgctcttagaatgagcccattcctcattttccctggaaatctaatggaattgaagtcccccccccccccccccccatgcaccagggatcatcccacaggcctttaattgcacccagttctttccaaaactccttttttttccctcgatgggactggtccatagacaccagtgatcacccaaacaaaaccatcttccacattcctaaaacgtcccgagatggtgaaaccactacgctttagctccaagagttctagaatcttgttgtcctaaaaaatcagaatgcctcttgaggcacccctagcatctgcaccccaatccatagaccttccaacacccaagcttttcaccacctttaacgacatctcttgcaccgttgtttctaaaaaacaaactaaatctgccttctaggatctagctaccaacttagccatccttcttttctccctgtcattgagccctctaacattccaagagaggattttgatctccatcaatccactggaatcatttcccatttgttcctgctgctccttctatttgcaagcacaagctctccatagctaactgtacaatcccatctctaagttccctttcagagcgtgatgcagacattgcttttttctttctccttctataaggggtcccttcacctaccatcttcttcaacttcttcaaaagcaaaacaattttttcttcgcacccctcaaccgacattcctaagaatctactgaaatctttgaaattggagagttccttgtcggagggcagatcctctccggaggaagcattctctaggaaaaccaccttcgacccatcttgtagaaccatagagagaggcccctttacagattcagcccttacctccaacgcaccctcttcccactcgggggatcctccccaaagcttctgaatcatcgctgtccctctgcaatccctgcccaaaataggagattctgacacccagaaaggagtagaagaagaagaaggcccttcccctcaagaagaacgggacgaagaaagtgtaccttggaatttgagaacttctaagaaagcgatgtctgctaatgatttcgagttcgcctccgaagccatcagaaatgacacacaagggtcgaggccttggggtgtacccattgttgtggacagaaagctagggcaccgaacgtgaagaacttctttgggagaagagtggaaattctcccctccttttaaaagacaagcctgacccacttccaattgggccttgcctaaagaaagccttttaaggctacctccattaacagagcccaacatggcccaggatccagcagcaagggcctccttctctaagcccctaaagcaccctctccacaaagctcccttttcccttctgtatttgtagtcgttcctatcacattaggaataatgtcctctcccccatttgcagagagcagtgggtcaaccattgacacctggccgtccactttcccagagcaaacttcagccactctttgaggggggagtaacctaacctcaccctcatcctttcccccgcttcctctacaacatcacgaaggttacacttcactgatccatggagtagtctcccaccacaattagatcgtgaaacaggtagaaccgtccactacttgcagagagatagggaaattctaccctcttaccctgacaaggaccttggcccactgcaagttcctacgttccgtcgtgtcctcgtcaacacccacaaagtgatcgcaagcttcccctaagttcttgaaaaaactcatccctcgaagatgcagtggaagacccagaattcttacccacacctctcaactcttcttgtcctctatgagacacacccaacaaagaggctccaccaatccaacaagaggcattttcctttaaaccacttgacccttgagtgcaacaccctctcagcttcaacggcatcttcaaactcaaagaggataaggagacctcctaacagagccaagtgaagatttcctttcaacattcaattggactgagcccaatacttaagagaaacgaggtctgggggttgatcagaaagtgtcccccccgcccccccccatctccccgtcaagctcctgctcaagacttccttgttgtcaatcacccccttgtcaatttctaaccacacaacattctgaagttttgcagaaccagaaaactctgcctctactgctggtttctccttcccgacattgacccccttgagaccccttcccctcaaagaagaggctgaggactctctcccctttgggtcaaggagaaacccggacttcttaacttcccagccagaagttgccaacccccaaccacactcctaccttcaggaacaccaaggagaatctcttaccttccacatgctaagctgtgcaaaacaaaaaccgttctgctttgttattgcccaactccaaccggtaccttcttccccccttcgcccaagcttttttgaaacgctcccctaatttgagacaacaacaggtctcagccccttccaaaaggaaggtcaagcctttaccactaaaacaaacccaagaagaaaagttggggcgccttttgtagattgttccgaacactttccctttggtctcgtccactgaaatctcgaaggtcttcgaatccactccaaactagcacttaccactgggagaaaccactgccatcaccctctccctatggttttgaacgtatctttatccccggatgcctctaaataacatcaaaatacacatcacacaagatggtcatgtatcaccattcagaggcttgaataatagatctgaaatgcacagaatggctgctggaagataaaagattctctaccatccttgctcattattacaatgagggagtggctttcattcccttatatttgtgctttcttctcttttctctaccatccttgttcattattacagtgagggagtggtcttcattattttatgttttgttttgtcttctacctctccttctctgttgtccattcatctttcctgtttgcatgatgttgttgcattgtctgtatgcttttgttgtatctgttagcaagttatgaaataatttagaaactgtgcatgttggtttgatgttctccacctgaccacaacacaacccccccctcagaaagaaaaaaaattatccaaaattattttttcctccccttgattttccatggtgtcatacttaggaagcacatgtagagggactagacatctgcctcagatggtatctctttttgctgatatagcttaggtactttcttacccaaatttgtatatgataaactgtataacatattagaagtgctggtaacaaggtagaattcttgagaaattgactagttggatggcgtttttatgcagcgcacccttaggaacgactgaatgcctataaaacaataaaaaactatagataataaaaataaaaataaaaatagcaaggactggacaagataatatggttttagcaacagctgcttgtggaatttagatcttttatgtcttggtttcatgtgagtgagtataatgcagcagattgattgaataaaacagcagtttgttttctgttggaggtgggatgtttgtatgaacttgctgaatggttatcttccttgcacccagagttcttctgcaaagctgattgtgcatggatctgcatgtatcctgtgatggtttcttgcctctgatgcttatctcctctcattgtattttttcttgtatccatatctgttgcttaatttttcccattgtttatctaaataccaccattggaaacaggtgcttgctgtttcacgtgtc

SEQ ID NO: 10959 - DNA, 3938 bp, Vitis vinifera
  Intron number 2 from transcript GSVIVT01001772001 (locus G SVIVG01001772001) derived from phytozome v7.0 (chr-ID chr1 8_random; pos 2995973 to 2999910)
gttctcaagttgcacctagtgtacttagtccatcgtctttacatgacatgttgattttaatataatcatgtgaaggttcggtatgatatattgtattttctttctctctgtgattaagttgtgaattttgaagctagacacaattttagttttgaaagagttttgtaatggtaatgtcatgttgtgttttcttggttaattttgttatattagaatgtttgggctttgtttttttcaatatttttaaccgttttccatttcagaaggttttcatttttaatatatatatagctcatttcttggttaaatgttctcattttcattgtatatatatatatatatatatagctcatttcaacacatcaataatatcattattcaattgattaattattatattaatatttcttattaatctatttggttagtatgatggttaattaattagtgctacaatgattgtgaagacattggatggggcaaaagataggatcgtgattttggcattgttttgcctgagagaggaaaataaggattacttttttggcactgttctagcgatcaagggtgcaaaagttgtgaagatactatttttatggtaaaatcaacacataagaaaattatttttcttatatattagatggcttagtttattagcatgcactcgaacccttttccaccatttgcacggtagacaagaaaataaaattgaaccgatcttataaggatggattcaattattccatcacatgggagacaacaaaagaaaatcaaacataatcttgtcatagattaagatgaattaaagagaggaagcaggtgcaattaaaacacaaaatttccagatttgctcacttcttgacacgatttgggttttgtagggtttaagggaatgtaattcaagagtaaagtttgtaagttgtgtgtggcaaggaagacccatagtcaaaatttcttgacaacaaggagtagaggggagaccattgttgccgaacataagatatctgtagtacggcagtgaacagccttcccaaaccttcttggcgcagtcattcaaatagtggctagttgggggtgataccggcggaaattcatgcttccaatcgtaagaaggtccaactgcgatctctacaggtcccgctgataccatcaatgccttgatagctaagaaaaagatcaccaagatggtggaattaatgctgaaattttccatattgatcgagggaatttctctagtggtggtaaagaaaagaatagaattaggtagactgagattaggttcatacatatgtttatgtggtgggagaggtggcgagtagtgttggtgcacggttcaaatagcatctgaccatctagagttcaagggctagatggaatggtcacttgtatctctttgtctagtctacctgagatgcagacttttttctttcttgtacaaaaggatgtccgaactggttgtctaagcaagctcttctgatgcttaagtcagcaattgacttgagcaagtaaaggatgagaaagaaaagcagcacatctttcttgaattgtgtgttgctatttatttttgctcatgtgtaacattttttttcagacttcttaataacacctcaattgcgtttgattatacggtattatgacattgactactaatgcataacaattgtcttgtcttgataagccaccaataatggaatatctcctcataacgactacattaattatggagagtgtttggtgcacaatttatgctgaaggtgagtaaatgtttggaggttagtcaaaagccattcttgttgtttctgtttcaagattgtctatctccattttggttttggggatagacggatcatccacatggccttaagtctttatagcaaacggccgcaagtgcatttcccccatacagtcgcaagcgcgtttcccccatacaatcgcaagcacaaatggatgatggacaaccttgtaaagagggtcccacaagtagatttggttaaaaattaaaaaaatttggtttcgttgtcattggggtttaaggctcatttttaatcatttccattttagtactaattgatgattaattaaggaattttatgggtttaaatgtttcatttaattcgtacatgaattaaattaagtattaagttcaattatttgagatatgttaattgaagagttatcacttgtagaaacaaccccatgtattaatcaaatggaatcaataaaaaaaaaaaaccaactttattctactgttgttgcctacaaggcattatgtgtgccactcttttaactcatatgcatgtaatgattatgattctttggtaattattttttaaaataattttttaattttttatgacaaaaaaaatagaaaaatatgttttataattacaaaatataaaataattttctatttttaaaataaaaaattattttaatatttttagaaaacatgatatttaaaaaaaaatatattttaataatttttggttattttctttatgttattttaaacataattatacaaagatgaataataattaaaaataaaacattacaaacaaaagttatttttaaaacatatttaaaaatatatataagttatgaatatttctaagtttttaaatggatttttattttacaaaacatcaaaaaatatttaagaaacattgttgttaatttttttttaaattgtttttaaaaatacttctcaaacaaaatctttctctttcgcacattcatagattcctcatgaaatgaattgttaacttcacttgtacatcatgcttatagctgattgtagttcactaaatattacattacaaacgttgagaaaaaaggacggattaatttgaagcacttgagggaatgattgtaggagcgatggcataatgtaagagcaagtgaaacttggaaactagaagcatgtgggcattgtgggatgactaaggaaattatcgcaaaggatgaatgtgaggaaacaacattcttaggctagaacaagcttataaatgaatacaaccatggcctttgtatccacccttgaattaacttataccacttcaggttgatcctcataaatggatcaatctttttcttattttcgatctacaagttagtgccaaagtgagttttcatggtaaaatatggttcaaatgctaaagtcgataagagaaaatgaataccatttctcaaaggatgaaaatgaaaacaaatggataaatacaagatgagagaaatagtacaaccactgttagaaataatttttctcaatttcaatagagcagcaacttctcttaatattaatcattcggatgcattggaaaagaatcattttcctaattggttcaaggagttatcatatttatttcaattaagtgcacactcatactcattacatcaaacactcatactcattacatcaaaatttcttacccgtgaaaattaagaccttgtttatcaattattttttaaaacaatttgttattctacaaaataaaaataaaaaacaagaaaacatatttgacaattaaaaaacacgaatcaattttttgtcattgaaaacataaaataaagtgttttcaaagagcctatttgttttcatttgttttttaaggattattttaaaacataattatataaatatcaagaataactaaaaataaagtatcgcatataaaaattatttttaaaacatatttgaaagtatagaaaatgagttaaaaatatttcatattctaaatagatttttattttacaaaatattagaaaataatttttaaaaattgttctcaaaaacacttttgaaagagagctcttaggaaaagacttcttcactgtgtgtgaatataacttctttgtcatcttgttttcacattatttaataaagtggttattaacttgtttgcgaaaaacttgacctgctggtacgtttgtgaaga

SEQ ID NO: 10960 - DNA, 10330 bp, Vitis vinifera
  Intron number 31 from transcript GSVIVT01021009001 (locus GSVIVG01021009001) derived from phytozome v7.0 (chr-ID chr 5; pos 15420871 to 15431200)
aattgtgcttgcaaagggagcttgaggtacaaacaattcattcatatcatggatgcataaatgtatcttttatgtttttagtaattaatgtagattgaagttatgtttaatgtttcccttcttagctggaccagtgaccaaatagtgccaacataaggcctgggtggttgtagctagaaggccctggtaccaaagcacattgattgggttgagaacactaattaggcatgtgcacaactagaatggggttcagaattaacaatgttttttaactaggagaggttgtaggctaagaactgatgggattggtgattaacttgattttatgtaggctacaacttggcagtacaactcaacctgaaccccacccgattttatactgacttgggcaacttaatttgcaatttggattgggctgggatagaaaaatgtcaactcaaattaaattccctaacttgattatatgttcatataaatttaaaattatatatatgtatgtgtattatttgaatttttttaattcttattttcgattttttgatttattctattaattatatcatagggttgttattagtagggctgcaacataggaggttgggcaggtcaaaaggctaactgtgccatattattttattattttattcttattttggattttttttattaattctattggttatagcatagggttgttattagtggggttgcaacttgggcgggttgggtaggttcaaaaggctaactgtgctacacccacctatcaatgggtcttacccatgtcaaatccaaccctggattgggctgcaacttctcaacccatgccaagcctccaacaaaaaaaagaaaaaaaaaagaaaatagacataatagtgtccttttggatacacttccttttttaaaaataaaaaataaaaaataaaaaaaattcattatgaaagtgaagcatcttgtaaaaaaaaacataaatttatcttatgtctttaaaaatcactttcagaaattttaaaaaatgaggtagtaaaaggttctttattcctcgattttttagacaatttttagtgaaaagattactttttcaatgcaagtccctaagagttcttatatcttatataaaagttgctactatttttttattttaaaacataaaacaggtagtgtccaagtggacacttagtttaatataatttaaaaatgagaaaggttagagctctttccttatttctttgtttttatttttatttttatatatttaaaataaaataatattattcataattaaaataataataacaatgtgcaggtttaggtttcgatgagttgtttgtccctacagtgcaggccaaccctactatttttcaattgatatttttctaacccaagtccaatactaacttgtttaaaccttgctcatgtcaaacctaggcacgggctggattaccaagttgcaaccctagttattaggttaattgagcaaatgaatgctataaatttatatttatcatattgatttgcaaaggttttagacttttagttaagtagatgttatttatttatcaaatgtggattgattggtaaaagatttagtgagatgtgaagtttctataaatagttatttgtttgtaggtttattttgattatattttgggcatccattcttatttcaagctttgaaatttcgttgtcaaatcaatattaaatgtgcatcaaatgtaagttaattgatagtcaatttgttgaatagacgtaaaatttaattacttgtttttaggctcaccccgactagaccccaatcaattttatgagtccaacttgatcaacttgtgcaacccaaagatataacatgagcctcactcaattaaaacctgagttcataaaagaggcttggatttggcaactttggttttagacaaatgagcttcatgtttagattgagcttggattgattgattgccaacctgatctgacccacccgaattgcaccctaaattttatgccgtcttattagtagagttgtcattcatttccttaaatcagttcctactgtttctatcaactgataaacaaattgatcaagaatgcctatcaaaaaaaaaaaaaaaaaaaaaaaaggaaacgaattgattgagaacaagactatttattggccgtttatgttgtagattagttatcttgaaagtttagagcttttctaatcttctcattgaaggggattgattggtgtgatatattgattagtcttgggaattatagttgtttaaggataagcctaagaccttgagcggggatgttagagtcagtcaatgcctctgacaatgctttatctttgacttctttttttttcctgataggttattcttgactataaagttaatgcccatccgatatgaaatcagtttacacatataaccaatctaagcttcttagtttcctaaaataaaaaaaatactcattgactaattattaatcactcaaggaaaagaaaaataaacctaaataaactacttttcaattgtttaaacaaacatagttataaatttgtagttattctgagaggatatggacttgtacagttctgctgcccttgaaagcatctttctgctcaaggctgaaggttgtgtttcacttcaatggatgtttccaatccactttgcttttgtaaaactaaggccaactaaactttgttaagacttgagtcaattttccttagtattatcaatgttgaagttgaaaattaaaatgaactaatttattaaaagtttcataatttccttcctacttttatttgctctctctctctctctctaggggaaactatcgagcttctgaagaattttgttctctctagggttcttttccttcatgattgccttagaatgcaaacccttttcttgctttttgatgtttttgttttggttttttattgagactagttagtgatcttggagccagttcttggtgacccctctaatttatctcctctaggagttttgacaatgaccgaagctcattacaatctctaagagcctctgcctggagccagatccaatttgaccaactttaggtccttgtggacttgcatttttcacatgtgtccccactcaatggcgagactcatttttatatggtgaaatattagttttggaaaagtcggagtcgccacttattttactttaaaagggaaaataaaacaagaaagaaaaccctaaagaagtgactccatagttttttggaaaagtgtgtctttgaaaaacccgagtctaggtctggggatcaggttacctattgggaaggtacttctaaaaggtagcacccctttaagccctacaaatgtttctactgactaagttgagggaaatgagacaattaattggttgattatagatacctaggtaggctaggtgatttcaaaaaatagtatgccaaacaagaaaaccaatcacaaatcataaagaagatttagggtgtacatggaccgcttcttaagcgttatcacaagacatcaatggttagtttgaaaaataaaacacacaatatgtattttaccctagtctcttaatcaaacatgacaagctaaacaaacaataaaaaagatatgttgaacaggttaacaatcgcatacaaagcaatacataacgatcatgtataaagcaatacataatttatggaattaagatacaaaggtaagaagcgtacttgaatagcataggtaacttgtaacatgtttccacaagacataaggggttatataataaataataaaataaagaaatcttagcatgcttgttatctaattagcatagcaaaaattatcaaagcaaacgaaataatcaattatcacatacatcttgtatataattcataaaaaaatatatagatatgattacaacaagtagcaaaggtggcagcaaagatgagttctgaaaagattttcttatgtaggggttccaccaattccccaattgatatgcacaaatctagtttagaattatcccatttgtttggaaccacaagcttggattcatgtcttactcaaaaccatagtttttattgaaaactgagaaagatgcaaaccgatcaaaacatggttgcatgttatttaaaaaaaaaaatgagatttcgattctaaggactccaaataaacttttgaaatgcatttaaatgaggaacattttgagaaaaggttcttcttaaaaggaaagaaatcatttacaaacgacaatactcaaggatcaaacataggcaatccaaaagaaaacaaaatcacaaaataaaattttagacaaccaagccgactaaagtggtgagaatggaggttaatcttcattattttctgagaacctctaaaagtcaaatttaacaaacaatcaacaaaggaataaactaaatgactgtagataagataaaactaacaagatattaatcaagaattaacaaggatcaatcaagcacatattgagatgagcaatcaagaactaacataagatcaattaagctaattaatcaaaattttagaaaaacacatggtcgaaactaatgatcaagcaagaatgaaaattgatatacttaaaagatgaaactaaagacatggaaccaattaaactaatcaacttaaattctaaaagctcatgaactaaaaggggtgaatcaaaatagaataaataagttggatcaaaagttagtcaaagcaaatattaaaacatgaactttatcacatggaatccattatattaataaactaaaattatgaaaacatataaattaaacaaaattccgacttttaaaactaaaacaaagaatcaaaactatcaaagtcaatctaagcagatctctaattttttaaactaaaacaaagaatcaaaactaaacaagattctaaaattttaatctaaaacaatgaatcgaaaccaaggtaaacaaaattccaactttttaatccaaaataatgaaccaaaattacactaaacaaaatcctaattttttaatccaaagtaatgaatcaacactaaaatatataagatttaacttacctttcctaacgacatgtggactggctgtatgtggacactaggtggactgtttcttcaccccttcagaatgctggatatcactagaaagagcaacactccattccatctactctctcctccacaagctgaaaatttcttttataaaaaaacttcttcctcctcccaacaccaagcactacgtgattgccacttatctcacacatatgccatgaatttttttctccattaagcatggcaaagtggctgctgcaattcttctcaaatatggttgttatatctcttcatcaaatgtacatatctctactaacattcaacatgaaagtggcgtcaaagcatggtggcatctctacggatccgagcactagtgacataagaaaaaaaaaaaaaaatccaaagtgatgactgcatcttcaaagttcaagcacacaatcatccatgttttctaagtgttaagtggctgtcatccctcccttgaatacccaaaaccgtgaatcatcctctctcaaaaagtcctcttttttcccatgtagtagcccgctctctaatctatctcctctcctatgcagccgtcctctaaaattcttcctctccaatttctcaagtcattctaatctcaatctatgatgtggcgtctcaatctccctaaaagtgtattattaaagtcccaaaatatggcatgcacatggttcaaaaaccaacccaaatccccagaatcgtgcttgaatattctttcaaaaacgctccactcaatatccaaaccgcggactgtatcgcctccaaatcctgacctccatctcttctcaaaagacccgaactgaatctcctttttctcacgctgaaaatctcatcggcccagacctgtgcgtcctcccacaatgcctcctgaaaatttctatgcgtgttggttatcccacccgctgtatcctttccatggagtcaagcttctttcccaaaacttttctgtgttttcctttttggccgtaaaccaaaactagagaactccaaagggagaatcaacatctatagaagcaatcaagtaccaatgcaaacaaacatataacctctgtcattctacacccaagcatccagacaaaacccaaaatcccgctcagatctcttactctgctttgccatgcttccttcctctccctacgaagacaatcttagaattccctttcttctatatctcttagcttccagaaaaacccctctgcttgtgctttttatagcaattggcaaccgttccacctcaagagtcttcctctctccgaattctgtctcatctaccagaaaaatcccttttaaatttcaaaaaaccaatccatgcatatcacataaggagtcccgtcttttccaaaaactccttcatccctattttaactctctggaagagttcctttccttttcaagtcttaccaatttcaaagttctttttcctccggttggtagattttcctataaaaacatcaaattattaaattaaataaatgaataaaataaataaatgaataaataaattagagaatgataaaataataataataaataaatgaataaacaacaagataataaacaattaaataataaataataaataactaaataactaaaagtgattgataacaatgaaaataaattaaaataaataaataagtaaaaatataataaatgattaaataaaagtgattgataataataataaaaataaaaataaataaataaatgagataaatgagtcatgcaaccatacaagtcacgctaagaatgtctaatgagccaagtgtgcctaagtgagcctaagtgaacctagacggacttaaggtgtctaaatgggcttaaggtggtgcctaatgggttgggtatacctatatgggtctaggatgagactaggtgggcctaattaagtctaacctaaagtgtacctaagtgaagcctaatctaaacttgaagggcagtcaagatcataatttggagccggataaacccctcaactcaagtctccaaagtggctcagaaaagataagctacatgagtagtaatgggccatcaaagaaatactgtgaagcactagaagtaaacttaaagacatgtgctaaagggatgaaatggagggtctacagccccttaacctaagcttatttttctgaagtcagtaaggcccagtgtcacaaatctacaagccccactgtcacaagtctacaagccccactgataccagaaagaacaacttcatcttggacagaagctggaattggattgatgggtacccttcttttgctgatgcgacctcaccagttctaagtgttccatcagctctaagtgtactcctattgaagccctttcaatggccccaaggcatatgaaagacatggagatcttggaatgggaaagcattgagacccatgagggttgaatggaaactttataattcagatctgaacagcattaataagaagagaccaatctggtaaaagctgttcaaaacaaaaaagagaagcaatatagagagaaaactgaagaagaggagctagttctggctgttggtccaggaggtggaaggggcacatgcaaacagcaagatcaaaaatgcttcttggaggcatagcattggttgtagataatgagagttagagaaagatgttagggttcattttggtgggagagaatgagagtagatatatttgttcaacttttttataatacaaaaattaaaattaaggtaataatgatctaatttactcaaaccttttgcatgaatttattcacccaaacccctttggcaagcgcaagccagattgaggtttagattgactaaaatcaacctgagcctaatctgacctgtcaatgaatctgcccaacatttcaaactagcttgaaggttgtattgggttggaacaagttgccgaggtgacaactttctttcaccctaggtgacaacaatctaaaatcattagatgaacaatctagttttcaaaggtccaaccacctaaattccaaaactgaccacatacaatctaactctcttctcaatgactagatcaaataaaattaaacaagaaactggagctgctcccaagccttggactggaaacaaaaacctcttcccttcacatgattagtaatcctcacctgtatcatcactgactggaagggggagagaggtgagcttacagcttagcatgaactcgcattatgatacaataaatgaatatagtactaaatgatgagtggtgataaattaggacatgtttaacaatatttttggaaacagttttcaaaaattagtttttgagaacaacttttaaaaaatgttttcagttattaaacttcaattctgtttaggaacttaaacatgaaaagtaattttctcagcctattttccatgaaggcactcttcatttatgaacaatgcaaaaagttcctagcctattcttcgtgtgtctcaaatttattcggaaaaatcaccatgttttcataatgggttcctaaaaaactattctcagtccaaaatttgtcaaacatggtttttaagttggaaaactgtttttttatggctggaaagctgttttctattctttagaatagaaaaccattttcaagaaaagtttctaaatagacccttattttttgcaatcatagcagaatgaatgagtcgagtgtaacaaaaattcaagaaaatgttttttaataaaatatactttagcaattttatgaattgtattttttttatatgtgtgtgtgttttaaaaggttattgaaccttaccttgagactagcctcaaggcagggctgaggaaattagccttgatgctatagcttcaatatagggtaattgaggcttacagccttgaggctattaaggcttaagcctcaaatattcagaagtgttaatggttttagggcatttatgggatttttatgtacttttttacaagaggttttagcctcaatattcaatggtctcaacgaattgtgagggggagggggtggagggtttggtatagatttataagttttgtcttgtgttcaagataaacattttacaaaggaaggacttatctgtctaccaattataactctattggaggatcctactagtgatggtgatggtagtgttgaatatttgatgaagccatgagaaagtgttggattttagaagagagaaaaatgaactaaattataaaccagtgatgatgatgtgcaattaatttgattattatgaattacatggtgttcttattattttaatgttcatgcaagtttattagtatttttctgatttctgagttttttttttatttctctttattattattatgattcttcttgatgttgtttttattattgttgttgcttaagttgaggcttacgccttattttgtcccaagggatatatatatatatatatatatgtgtgtgtgtgtgggtgagtgtgtgtgtatgtatgtgtgatttgttaaatgaccacatacatgtcttattgatcatttttacacacagttctactatctgaggatcgctcaaggttttatgcttactgagcatttttcagatgctagaaaagggtacttaaagcttatgattttggattaagatcattgtcaaattctttaacagtgctattgatgcttttcagtctatgtaacaaataattctagttttctgcactaaattaatttggtgtatctttggaattattgcatccgataacttgatatgcattgtggatcatgttctcattattcttatagattgagacaattcattgaatttattatgctttctcttagttctgaagttcttttacaagccattctcattaaaatgttgtttacttgtattatactctattcatgattgaattggatttaataaaataagttttgtcatccgcaatggtaacatcttcatttaatttattaggataaggcggcgttaagttgcaaactttatcacctggagttatagcttctgtgtttatttcattttatttttttattttttatttttatttgtatttttattttttaagttttcctacagcccatggacctttttttgtctgtttgctctgaaaatgattcactaattcaacttctttccatggaaggttctttcatcttcagtttcctttaaattttcttaaatcagaaacaattgattcatttcattgcattagaatgctgacaggatgaattatcctttggtaaatacaaactccgagaaaaaagtaggaatacttgtgatatccttttgttcttttaataaatgtttttcctgcacccttattttcaggatat

SEQ ID NO: 10961 - DNA, 1954 bp, Vitis vinifera
  Intron number 2 from transcript GSVIVT01009267001 (locus G SVIVG01009267001) derived from phytozome v7.0 (chr-ID chr1 8; pos 6828566 to 6830519)
ggtgcggcaggcatagttttatcggagtctactcttggtagcaacaagggcgggaaattcgtaatagacttgggcggtgggagcaacggacgtgcgactcctggtagcgcaacgtcgccggcttgcagccctagaagcagcggagatttcgggtacgggttgtggccatactgcagctacagagggtttgtgatgtctgcgacggttgaaggtgagggaaaatgcagtaagccatcagtggagatcagtgtgcagcacgtgaactgcacagaagatgcagctgcattcgtggcgctggccgcagccgttgatcttagcatggatgcttgcaggcttttctctcacaagctcagaaaggagttgtgccagcaccaggatttgctaggctgattcagagttgtttgttctgatggcttttttttttcttccaaccgttttttaagtggatttttttttatttccatcctcgtgagagttattactactaacaaatcactagagactgtacagccggtggggggagagattgacagggcacgctttgtttttatttgtgtggcttgtgttcatttttatttttatttttgggttctaatattgtagtcgctgactcaatattttaaattttagatgtaagaagaggattgttattatggtttgtcaatttattagttggcatctggaggcctcgttcattatccttgttctccattatgttttcaatatgcagtggaatctacaacactcacaaggaaaaagcgggggttgttgagcgagcacgtcggacctgatcgcagcagatacctgtgttttacttaattacgataaatgtggatgatagctgtaatgcgctatgggggaccttgaatttagcgtgggttgcatagaatcaagcatcattaaagtgctgagcatgtgtaattaaataagggattagctgacttccaaactaaaaagagtgctttttgaacatggattttaggtgtgtttggcaacaagatcggatcctcatctgtgcacgagcaaacttaggaaattaaaaaaaaccaacaaaaaaagttatggtaatagcctggtgggtatgtgttgtaggttgtgcgtgcgctgagcggcggtcccctcccctgctcctagctttgttgtcgtgcataaggagggttattgagaggcccaagtggttactgactttctgacaaggaaaataatagtaaaaacaaagtgtggggttgtcaaaatcagaaggtgagagacgagtcagtaaggcatgtgggtgtgtggtggggggatgggattggacaatggctgtacgagcgtgtgacagggagaggtaaaattttacagttgaaacagttgagaggtcacacgcagttgagtgttgagcagaggttgtggccttgtgggcagtggggttggcgctgcgtcggaactcgcggtcaggagccacttaccttgctgtgggtcttacaaggcatgtctcagcttttattggaaagtggaaactgcagtggtatgggcctccacagcttctctttttccaggtgccacctcccaataatattatttatcaacattaccttctcattcagcgtcttagatttgatacagttttactcaacctatataatttgtacttactgttcccataagatttcatatttaaaggaagtgcaaaaatttctcccacgacctcaacttaaatctaatctctctcgtcaattcatctctttatctaaccacgttataatcttgtcaaaatcggttagcttagccatcagtggcattgactattattaatagtataaattagaaggttaagagtttattttcattgaatttgtatattaatttgattatttttattttttatcttagtcatactagcaattttttatgttttaattctacatctttatataaagtattttataaataatttgtatataaggggtgtcag

SEQ ID NO: 10962 - DNA, 1191 bp, Vitis vinifera
  Intron number 1 from transcript GSVIVT01036723001 (locus G SVIVG01036723001) derived from phytozome v7.0 (chr-ID chr1 9; pos 23306061 to 23307251)
cacccttcaagaaattgcttctaatcaccacaagggtctctctctctctctctctctctctatttgggtgccttcaaggtcatcactttcatgcattggttttgtgtttatctgaattttatcaactattccgctgttgggtttgtctcaatttgtatcctttgtgtaagcatggcttcaatttcttttattttctgatttaaatgttcctatttttgcattaatctgaattttatcaactatcctgctgttgggtttgtctcaatttgcattctacatgtgaacaaagcttcaatttattttctttgtagttttagatgtttctgcaataggggaaaccgggaggtggtgaaaatgggaacagggggattttaggagaagaatatgattgttctacgagagtgtgattgaattccagtaaaggagtctgcaaatattcagaatatgaaatcaatgtatttcaattgagtaatctatggtgtgagtatacatatatgccttggatagaatcacttgaaaatgaggattctgataataggtattcaaattgtaggatggataaccctttttctgtgtgtgtggtttcatcctgaaatatatttcttatatgctacttctgcatgtgatttgaaacccgatttatgcatcccatttttgttataatcgatgaactagaatggtatagattgaatccactgtgccaattctaaatagtttggattaccatatgaatgctgttgattaataaaaacaatggttgaagagtaattgttcatttcttcctcaaattatatttcttggaaattcaattgactcgttgccttctatatacgattttgttttcaatccatgattatgaatggactgatcgtgaataatggctgccatcttcacaaatgagagtaaaaatttggataacgggcacttgaagaaatcataaaaccgatcatgtgccatccactgagatgatagctcaaaaattttctgatgacccaaacacgccatagcaaaatgtgttaatttaattagcataactttttttggagcatgtcagtttagtctatttgtttcttctaacttaaacatgtagtgttagtggtcaaatatttttaaaatgaacctgcttgcttcttaatccttgttttcaatttggtaggtcttgcaaaggttgtcctgaaaaaggggaagacg

SEQ ID NO: 10963 - DNA, 3042 bp, Vitis vinifera
  Intron number 6 from transcript GSVIVT01005212001 (locus G SVIVG01005212001) derived from phytozome v7.0 (chr-ID chrU n; pos 19252018 to 19255059)
gaaaggtaaatgctctgaattttagccagtaaatgaatgagcagctatactcttgtgtatatatatatatatatatatatagatgtgtgtgtgtgtgtattaatatatattttaatgttttatgtagtataaactcagaaggaatgtaaggatgatggacctaaatccatggtttgaagttttgtagacttccactattaattatataaggtagaacctggaattgaacttaaaacaattatgttgatagacttgatgttctggttttcatcttctgcaagcccttgctagattgatgctgtctccggaagaccaatatgattcaaaaccaaagttttggccttacagaatcttatcatggaaagccactggcatatgctttatgtgcctagtgaagagaattttttttcagagtcttgatatcataccatcaaataacttaaatgaattttttatcaatgagtattggttattgttgaactccttttagagcaacataacataacttaggtaaccatttagtctatagccttgatctatatctgatgttttggtttgaaacctttatcagttccacttctggtggtcaaagttaaacttaagctgaaaccttaagaagcatactgtgttccaacttttataatgtttatgaaacattaggtgaaactgatgatgtgattatggtttgatttttttgaaatcttggagggaacatcttatcagtatctatggtgctaattgcatcgcatatattttttttggccgtttgagaatctgagacttgacaattgatttacctgctatttcttctctttctctctgttttttttttcctcttccactgagaacaagtatatcagttaactcaattgttctttcattgcttctccagattcacttgctttgaccagtttactgtaatatcacacttcaagctcctttagaagaagtcaagtgatattacttgactcagaaacagatttctctcccttttttttttaacatggattttcagtccatgcatatgcacacatgtatgcatacacacacatatacacacacactcatacatatatacatatgtatgtatgtatgcatgtatgtatgtacacacgtgcacatgcacacatccatgcatgcacacatccatgcatgcacacatccatgtgtgtatgtatatatatcttcattctcagttgtctcctgtaacctgagtttgtctccattgaggttctgttgaaataccctttaagcttgtgaaagtgtggagcctttaggtccaggtgcttatatacattcttagcagggcttgtgttcctttattagtggtgacattcattggagttcctattcttgtcttatttttctcccttttttttttatttacttccaaaaactctaaaccctggttgctgatatttctagagcaatgtaagctcttccagcttgaagtcagcatatttctttctttgtttttcccacaaacccaatcctctctctttctttgtgctgatgcgtggagtctttggtgtttgagcctcaaagtttatgtttttatgaagtacttccaaaatcttataacaactaatcaaaactaaaagtagggagtataacaagcttcatggattaaaaggcacaaggcacacaaaaggttcaaaagagtctcctacagtttaggcattaaggcgcaatacaaggtgcacatacgtcatgacttaagtcaagtgaaacgtgatgtaggatgcatatcaattttataaaatatgatccaaaatataatccaatcaataaaaaatttatgattcctaacttttaaagaaaatattcaacaaaaaaatatcagaactttataaatttcagtatgcaatttgaaattcaaagaatagaagtgtttaaaaagaaaaagtaaagtagccaaggcgcgcctcttcaatacggtgcgtgtcttggcaagcaaggcgctataactaggacttttaaaactatgacaagcttcaaagcccaaaagaaaagggagctatacagcttaagcatgtaacgaaaatgtacatatgctccttaatgtatcctcttttggaaccagaaataacagtcattacataggaaaaactgattctggtctgatttatcaacttcaaatatcatcattgttaagctaacaacttttttaaaagcttaagctttcatgtgcagtctcatactgtggaaagacaggtcaatagtagttattaattatagataaacagatgagggtataggcagtaggatagataaatagatgggggaataaacagtatgagagactcaaacttgagacctattgttaatcagagctttgatgccatgttaagttgtcaactttcctaaaagcttaagacacttttaggatatgagcacacagtatatgacaggctaacaatcattatttatggttgtgcttcagcctccttaggctatttattatgaaactatatcagaatttattccttaataaaggctatttattccttaataaaggattgtatcctgttgattttggtatttaatagtttaatttgaaactttttgtagtttgccatatgcatttgttgtaagtgcttgtggtaagtggcccagacttattacttcggttattgacaatactgtcgatacataatgattttagaaaataatgcttaactgcatgtgatagtgttagatgatccatgatcatggtacttctcaaaaatttaaagggaaaaaaaaaaaaaacaatcatgttatggagggattgttgttggtcttaaagctgggtttgacatggagtatgagacttacgttctatcttgtccttggttggatatccatggcaagaatttcttttttgtcttttctactgtacttgttgccattccttatattaacagaattttgaataaagttccagtttagagaaaaaatacttagttgctaacttgcattaatgtttcatcaaggtgtattttaaaccccctttgatccaaatggtttccatggcaggttccaaagcttctactgcatagg

SEQ ID NO: 10964 - DNA, 3890 bp, Vitis vinifera
  Intron number 10 from transcript GSVIVT01037593001 (locus GSVIVG01037593001) derived from phytozome v7.0 (chr-ID chr 6; pos 10243715 to 10247604 reverse strand)
ttcctggtatgtgatcttcttacttgaccaaaacttgtacttgcaaagttcgtacctactgagtttttaatccaaatctcattggtaatggtttgaatcatgaaaaatatcagcagtgttatctgcaacaaccctgatccctaatttttaacttatacacggggtctagagtatctaggaatggcaatgggatgcataattcagtatcaacaattaggacaggggtgagaatgggtttcctaaggaagctcgaagggaaaggatcttggtaactctgctccattcccctcatgatttttggagtctaattaatatctagggcatttgttgaggatgaatctccaagatatacatcagcaaagagctttagtgttagttgcaattaaagtaagattggtgttaaactctattgattttcttctagctgaaactcctagaaggccttagtgtgattctaaggttgctatctcttcttctccttatctcctttctctatatttttattttattttattttatttttctgacataaactttatcccttgttcctctccttaaaccataaaaaataaaagccctagcccacctatttgattgtaggcaaccatcctagggttgtccaacatcagcattgtttcaagaaagtggaactaatcttacagtctttgagcaatccaggtagagatgaaccaataaaggttttcttttgactaactttaacctgtcaactctacagggaaaatgattccattttgacagagagaacttctaaagtttaaatcccacattgattagttaagaaaaaggagagccttctctctcctactctttcatcatgttggaatatgctagaaaatgcatgtatgaccatgtgtagttcatgtgttttaaaatagtagaaagaaaaaaaaactaataaaaatgtcttaagcctggccaggtctaatgttaattggtttgtgagaaagttaaacatttatagacataagagaaatagtaaataaaaaatctatatggattcatagagataaaaagttttcacgaggccttgttgccaaactcatgctcctcaaattcagaaacttatactaaaacaaggacaaagactttctaatggagcttggattggtgttcttcaacccaagccaaacttcaaccatgaaataagctcaagcccaataaaatgctggtttgaatcagtttgaacttgactgatttttacatttaattctctaactatcctcttcatctaggcttgggagtaaggtggcgagtgaatttggaaatgaaagaaatctgccaaaggcccttggttcttgtctgatcaatcacactgatagcttcaatagttcactgacatttttcttattttacttttcactggttggtaatccagtatacgtatagtaggcctccttcaccatggcagccaaaatatagagataatagcagtggtgggaagctgtttgtaaagggtccttagttagaggagattagctagatggaatgatgatgtttccaagtttgagagaagaatggatgagaatgagaggcaatagaagtttggaagcatggacactgatttcacgtatgaaaatctaggagactaagctttttggttgtcttggatatgctctgataatggagttcttttatcatgcttatgaaaagtaactcagtaaatgccattgagatgagaagaatctaatactgacacatgtctcacatatattcatgagttccccctttttgtcattctgattgaaacagttcagtgcatgctaatcccagctcaatgaatccaacaattttaactactagatcaaaattctcaaatcagttctaatgtatttgagatggtaggttggacccatgattgatgtgcattgagccatactggaaatgccaaacccttgcccctaactgaggtaggcatagttgtattaaaatgctatgtcaaagatgacactttcaagggaagattattgggaggcagcctcttggaggagcatgatgatggcagttaagtagtcttccatttaaacccacacagaatcacctgtgctcagaggtggtgtcatagaactccctgggattcagcctcctggagggacatgaacccctaccttgatggtggaagaactagtcttccccttaaacccacacagaatcacctccatttagaggtgacatagacaaccccattggcatctgccaagcagacaccaacatctcatgagcatctgaagtgtttgggcatccatcagaaggagggcacctagcactgtacaacactattttggcaagaagaaggtataaaagtggtgtcctggtgcattcatgtggagattttttttgcacttgacaccgttctagtggataacagcttttctgtgttactgggttgtggtatgcatggcatgtagatggaactgtagggccatgtggggctacccacaagataagacgtcaactgaggtaacctaggttttttcctatgggatctctaaatttgggagatctctaaactagggcttgcacttgggaaaagtatttgaattagtggtgggcaatgggtctaagataagctttagaaagacgtgtaattatgacaaccttagtttgaagaattgctatctggacattgtatggcataatgaaggagaaagatgcaagggtgagtcagtatttgggaaggcaagtctgcaacttgattatcttctcaataaacatttagaaactgaataattttctgagatggcaaaagattcgattccctagctgatgaagtttgccaaggaggctgcttgtactaagagacacatctaccaaatatttataagaatccaattctactatggggtttgaggaaccaatccaaggcagtactgcaatccttcctggagctgaagatttaaactttaatgttagaaatctcactgaaagaacaatagtgaacaaagacaaatctacttaaaatcatcagaaattaagctgccataacctcctaaacactggttgctctgacccagctccatctgtatttaagttttaacaaatattcatccatgaagtttttaactaataaacttcttttgattttctatttccaagtctactagcctataaggaaagacagaaaaacaaatcaaccttatgtagaggcaaaagactaatatgccaaaaaaaaaaaaaatgtagacgtacaaccattgaagagtaattccaccaagatcagattctctcaaatggtagatttcagtaaggaaatgctgtggcaggtttttaggttttccatgaggcgacttaatcatattacatttatttgtcaatggccatgatctttttctagttgcaagttgctattaatgtggacgattttgagcgaaaagctttggtttgtgcatatgacatataattatatagccacttggaagaatgcaaactatctcttcaaagaccaagggaaaaagagcttcatcagcataaaatttacttttttctgtttattgttttaatatgatatatttcatagtttatatgctagaagcagaacttttactaagctagttactatgttgtctaatcaagacaaacatgggcaagaaacctgggctttgtaatattttcaatccaaacttctttctttgagctcaaccaattaatgatatctgcttgtctggttctagttgaagttacatggtcagattcatttagccatgttcaactcaagtttacttgtttcttattatgattgccagttatggtgttgatctattgcagtattaccaccttaatgttttactcctctgagtttacataatttagtgaccagtttgcttatgtgaatttcaggaaatccagcactgaggcagggcaagcctggttca

SEQ ID NO: 10965 - DNA, 9607 bp, Vitis vinifera
  Intron number 14 from transcript GSVIVT01021645001 (locus GSVIVG01021645001) derived from phytozome v7.0 (chr-ID chr 10; pos 8652444 to 8662050)
tcttttgtaaaattttacattttattatatcgagagttggattttaggcatatattgaaaaatattaaaaaatatttaaaaaaaattattgattttcataggtatatcgatagttgaggtgtggacccgcatttttcacgtgcgttcccactcgatcaacgagactcgcttttttatttgggaaaaattaatttttagaaagaaaatttgaagtcaccacttattttatttttattttaaagggaaaataaaacaagaaataaaaccctaaaaaatgactccataatttttggaaaaacgtgtctttgaaaaacccaagtctaggtccggggatcaggttacttattgggaaggtacctctaggaggtagcacccctctaagccctaaagaggtctttactgactaaattgggggaaatgtgacaattaattgattaattggggatacctagatagactaaggtgattgcaaaaaataacatgccaaataggatcaaattacaataaaggagagttagggtgcatacctggactgcttctcaaacgctatcataaaacataaaagttagtatagagatacatcacacaacatgtgtatttgtcaaagataatcaaacaagcatcaaatatatatcaaggcaatcaaacagaatagcaagcatggacatagtacgcaatgacaatcatgtacacggggtttagaaagtgggtattaggaaacgtacctggatagcatatataactcatagcgtgcttctgcaggacaggggggttagataataaatagtaaaataagaaaccctaagatgcttaactaattggcatagcaaaaatgatcaaagaatacaaaatcatcaattattacacacatcttatgtacaattccaaaaaaaaatagatatgattgtaacaaccaacaaatgtggtagcaaaaataagttttgaaaatatttttatttttattttttttatgtaggggtttcaccaattccccaattgatatacacaaatctaacttggaattatcccatttatgtgggaccataagcttggattcgtgtctggttttaaaccaaaatcttcattaaaaaaaccgagaaagatgcaaaccaatcaaaaaatggttgcatattattttaagaaaatggggtttttttattctaaggactctaaatgatttttttttaaaaaaaagaatttcttaaaggggtcttcggagaaaaaggttttgattttaaaataaaaggaattaatttttaaaatgataaaacatagaaaacaaaataccaatcaaaacaaaagaaagcgaaaatcacaaaataaagatttagaaaatcatgtcaattaaagtggtgagggtaagaccaaccttcatgagtttccagtggccttcaaaaaataagaatttaactaacaatcactaaggcatcaaatttatgacttcctaatcaaacaaactaacaaaatattacccaagactaacatttagatttcaagaaacgcatgaattaaaataaaaataaccaatcaaatattaaagccaacaaacttagcatatggagataataatatggaatcaattaaggtaaattagcattttaacaaaatatgatgaatcaaagaccaaagttcaacaatcttgaaggtatgaaaacaatgacatgcaattaactggattgattatctaaaattcctaaagctcatactaaatgtcaatagatcaaagccaaaattaccatacttaaaacatgaaaataattacacgtgattgacttaattaattaaacaaaattataatcaactgcaaaattggatataaacggattaaattcaaagttaatgaaatcaaaaacacacaaacacattcaatactaaaaataattaatactagattaaattaagaatatcatcatcatctaataagattggctaaactatcaaattgaaatcacaaatatatttaaactaaagcaaataaataaattaacaaaataaaattaaactaaggtcgaaatttaaaatatggaatttgtctaagagggttaatcaaacaattgaattaaaatcatgaacgcatttggattataaaataaattaaaatcaaactaaattgaaattaaattctacttaataaaattattggaatattaaaaactcaaactttatttgatacaatcatttaaactaaagaattaagatccacaaatgcctttaagttaaaaacgaattaaaattaaagtaattggaattaaaaacacaaactttatttagcgtgattatttaaactaaaaaacgaattaaaatcaaactaattaggatcactaacacattcaaattaaatcataaactaaaacttagttaatccgaaattaaaaaaaataaaccttatctcacaacttatttaaactagggaattgaaatccttaacacattcaaattaaattataaactaaaactaaattaatcagaaaaaaataaactttatctcttaaattttttaaactaaggaattaaaatcacaaacatatttaaactaatagctaaattaaaatttaaactaatttgggattttaaaaatatgaactttatctatcaggaatacttaaactaatgaattaacatctcaaacacatctaaacatataggatagattaaaattgaattaaattgaaattgaaattaaaaataagaacttttctaatatgaacaattaaactaacaaattaaaatcacaaacatatgtgatagattaaaattgaactaaattgaaattaaaaataagaacttttctaatatgaacaattaaactaatgaattaaaacgacaaacactaaacataaaaggtatattaacagttaactaaatcaaaattaaaaataaggacttttataatagaaacaattaaattaaagaaaactacaaacacatctaaacataaaagataaattaaaactaaatcgaattggaatataaaaaaaaaagggaactttatctaatgggataaattaaactaaagaattaaaaccatgaacatatccaaactaaaaaaagaaaaaaaattaaaactcaatcgaaattaaaacaagaaatttattatataggattaattaaatcaaagaactaaaatcattaaaacactcaagactaaaaagatgaatcaaaacgaaatccaaataaatttgaaagtgtacacttacctataaaccgttatttgtggagattttgtgggctgctcctctcttttttatggttatgtgtcggctcctcaaagttcttcgcgcgtcctctcaaaagaattgctctcgtgtcctctttgcctaaagtcccttgctctcctccaaagttccgcgtgaaaattctttccgcctattcccctccgaaaaaaagttcctccatgcttggattctcccatttatttataaggcagcccactccttatggaatatcttatttccattttttcctacgtgcacgtggatatgagaagcccattatgtgtggctcacttggagatttccccaagaatgtagtcgtatcttgtttggtaagtgatcagatcccctttaatcttctttccatatgctcccggatgtgcctcagccatgatctacccactttctatatgcaaccctgattccttccaagtttccctagttggtcgtgatctcctctccttgatggctccaagtctcatgcaaagtaaaaataaagttgaaataagaaatcatgtaattggaaatagaataaaataaaatagaaaatcaaatcacatagccacaaaaatccaaaatgccaattcatggaattaaagaataaatgagtaagtgagtaaataaacaaataaattgataagggtataaaaataaatatcagatgtatgcaattagaaaaaatcaagaaattaaagtaatgcaacggattataataatttaaatgtcaaactcaaaccctcaaaaataaaaaataaaaattcatttcatgcaataaatagtcaagccaatactcatcctatctcggaaaaagaagtaaccaaaatcaagaacacacccaagtgggctatgccaaaagaagtgtccaagtgacctattctgaaagattgtctaagtaacctagggtgaatgtgtgcaaactagaaggtgccaagtgcatctatatgggcctaaggtgatgcctaatgggcctaagtctaaattagggctgccaagagtcacaacggggttagataaatccctcaaccaaagtctccgaggtggctcaaaaaaggtaagtagtgtgagtagctatgggccaccaaggaactactgtaaagtatcgaacaagtatctaataggacatgtgctaggaggacaaaattgggggtctacatgaggtcattagtagctttaacgtacaagtgagaccttaagatggttatatattctgtatgggttgagttactattgattaagataagtgacaataggtattttaaagacatacaccatgatatctcataggtttgagataatgtgtccccttaggttatcctaaggatttgtgatcatgaaatctatggtcataataattcctttggtggaatttgacataagctcttatgagctagaatgtctcaattgattacataataagaggatttaagactcaaggatagtagagtgatcttaagaggatgatgactatacctcactagattacaaacactagttcatgaagagcttacatacaatgcttactaagttggatttaatcaattttttctttatctaatatcatagggtacaagaatattctagttaactctctaaaatgctgagttaacttcaaaattggattctaagggagctagtttcccttatggtcctagtggtccttatttgagctcacactccttggtaacatattattttcagtgatttatgagtttttattcatatgtgtttggtaaatatgcaaggttgcacaagagtttatgaatgatttttttttttttggattgggctacttaaaattaattggagattaataggactaactaactaattaagaccaagtggattagattaagtgatccaagcttaagatgggcttaattcacctataagaaagtttatataaacccctcaggcatttagggttggatactcttagccattgtcttctaaagagagagcctcaaccgtcatccttgctgagagttaactccatcatttagcttgaataattcatgggtttgtatgcatttatttcatcttttataatcagcgtagtgttaggagaaggtacttgaggagtaatttctagaagaatattttgtgtttttcttttcaagatttgtcaaagatgggattgatatgccttccagacctagataaagtttactacaataaagttacggtaataaagagccaatgacacacaacatgcatcaaccatgaataactttgtagacatattttagttattgtcttacgagttgaaattacttcaatagaaaaatacaagttcaaagggagaaaaagttttactaattgagctaggaaacaagattagtttagtttttctaattaacaagcttgacaaaaagaaaagtccatagcagaattaaaattaatataaaggtgttttaataaatgagataaaactgtaatacaagggtgacaaagtcttctatgtcacaaataaaacattttgcttttattgttattttgacacgaactagtggaagaagtgtaggtagaactaacaagaaattgacttgaatcaagaaaacatgaggacgatttgcatcttattgatgacaaatattgtagtgctaatgtcttgctacagaccatctttaagtctctcatgaagtaagatactcgtattcttgtccttgacaagacaaaaataaggatgaaactcaacaatcacattattatctttggtcaattatgatatactcaataggtttttggtagtgtgaggaatgtgtaaaatgttgttgagatgaagaggtttagattgtgcatttaagtcaataacctatatgagacataaataagttttgaccattacctattattaatttgcctttgcctttgtagccgttcttgagagacaagacattgagatatgaagtaacatgaattgtaggaccactgcccatgtaccaagaaggatcattcacagtttttggactaacgaagtatgcttgagaatttttatttgggttgttagcctaacgagttgtacaattgttgttctgactaatgtttgtaccagtgatgttaagataaaatttgtgataacatttgattgctatgtgacctagtttgcttggtggtaacatttttaatcttgaaattcatgcttttgtgtgttttggttgtaatttctttggaaattacctttgttttaactgatgttgtaggtgtagtcttcctttgttgcataatttgcagaaattgtcatatcgatggaaataacagtatttaactactctaaacacagttcttggctctagaggaggaatttcacttcttataaggaggtgttgttactccttaagtcgatcttcactactacagaatcatattctaatccaagaccttcaagaacgtagaaagtcaaattatcatctaaaataatttttctaaaaactgagaaagtatcaaatatgttttacgtcttaagaaaatagtcattgatgttaaggaaaccttttcttgcaagattgcaacatataatagagttgcatggttcttactttggattttgagatgaaaagcatttctagggtagaccaaatattagtagagttgatgcaacaaacaacatgtctaacattgattcaaagattgatgacagtaaccaactcatgagaaattgataaagacacaatccaatttgcatttattcaaggtttggaatggcctgaattgaatcttcaatcttaacttcgatggatcatagtagacaaattttggttctaatgagaaaaccatcaagtttgtgggctcttactactggaagaatttgagatctctaaaagccatagttgttcctatcaagcttgattgaaataggatttagtttagaagagaaaggaattgtagttgataccactgcaatatcgtactagtttcaatggttgattgaggattcacaaaatgagaagttttaatggatgagattgaagtagggacaggattgcattgatcgattgccatttatgttagtcaagaaagcactgataccaagttatgatatggaaatagaatataaaatttaaaggaaataactatgaaagactctcatattgtaaatgacaactttgaactttatttcatatataatactaatttagatagataacaatctttaataaaaaaaaaactaaacactataataaacttagtttctaactgcaaactaattatacttaacacgtatgcatagttggatttgacttctttcaaaatcctgacatttgcggattaaaaaattaaggaattgatattcaaatacatctttctttttccaaatatgttttatgtttcaaaagaatttaatataaattgataacaattgattgttgaaaaaatggagtaaaaagggtgtttgctttactcaatcaaagatatgacatgatcaatatttataattgaattccagcaattttgagaaatcttacaattttaatcttttattttttatatgtgagaattaaaatctcaaattggaaaaaaaaaaaaaaaaaaaaaaaaaaaaaacaacaacaacaacagtaatgaaccagtacaatgttataaaagaaaaaagaaaaaaagaatgaagattagcttttgagataatatttatagttgatttgtcaaggaaacaacttttcctaaaaataaaatcacaaaggcaatgccaactacggttatatttttataaacaaaaagtttccatctcatcaaattaacatatatagtaatcaaaaaatttgaactcaaattaatttttaaatcaaatatttgagataacttagatttcttgttaatacttcaacttaggaatttgaaaatatgagaaataattctttcataaagtatattaaagaatttaggattggtgatactaaaaatatggaataaattaatataatttgattaagaaaaaaaatcacttattcaaacaggctcatacttgaagtgaaactccaaactattttgacagaatccatctcaattatgtgacaactctgcttccaacctaattagagtattggagattaatattatcgagtaaagccaactttatatatgggcttcatcctcaaattaaaagtgctcaagttgaaagaatgttgggaaaattatgagtttttgtctagaaagcacatgcgatgcatgtgaaggtgtgtatgtagataggtgatgttgatatataagattaatggaaggggataaagaacgtctagaaaggtaattagtgaatgaattataatttatttggtttgaattatttataaataattttacattgattaaaataatatataaaatgatgtaacatacctataatttaattaatccataaataataattatatatatatatatatgtaatatattattgtatatgattatagtgatagataatatatgtaatatattattgtaatgtaagatgatgttttagattgctttaaattctttatattttttataattaagtaattaagttaggtatgaaatccatcttaaaggtcatatatttgtttttaaaaatttgaatttgttgttcatcattatttgaaatatattatttaaatcgatatttattattatgattttaagacattttacttgtagaaaaatagatagaatataaaatttcaatgaacatatttgtgtcataatctatatgttttataatcaaccattgttgtgatgtatcatttgaaacaattaacttagttgtcttcttgtaaaactttggaggaatcattattataatgatcattaactacttgtttgtttttgcaatagtttgggtcatattcctttcctttttttctccttcataaaagtaacacatatttgaaaagatattaaataaaatagaaaaacaacgttttaaaaaatatgtgcaaaacatttttatctaagttaagggtatattaccttatattgtttattgaatatatatattgttcatttttctcttaatgtttaaaaaactgcataatttgcattgaagaaataagttttattattttaaaatttaacttagaaaatggtaatattgatgaaacttaacattcatttataatgatactaacatatacttacctcactaatataaaattcttctctttcatattttttttttcttgaaatgaattggtgggaagatagattttgtttataaaatttcaatttaattatttggaaataagctatagaatatataggatattcgtgttaataaagtcgacatcccatcgtctttttgatgagttttacctataaagattaatttgtgtaatattatcgataaagagatacgtaccatagtcaattcaaacttgagctgttgataaactggtctaaagaagcgtgcaaaaggattggagcaa

SEQ ID NO: 10966 - DNA, 5965 bp, Vitis vinifera
  Intron number 5 from transcript GSVIVT01000878001 (locus G SVIVG01000878001) derived from phytozome v7.0 (chr-ID chrU n; pos 3127289 to 3133253 reverse strand)
ctacctacgggccaattgtctgcttctgctgttgggtagcgagaagagtcaatagatgacttatattttttttttgttatttgttcccaaccatgtggaaagttgacccaaataattaaaacatataatttggattatattatgtatggaaatagaggaatagatgtccttttaatggacatgaagatgaaaatacatgtataaaatacaagcaagttttaatggacttttaggtaactgtgattaaaggttgcagcaatcttctttttactgctaatggttatacttatcattgtttgccaatagcttcttttttagtcagaaaaaaaatgatgatcctaaaactactttgtgtctagggcatattgagtgaggagagacaaatttatgtatcctcttataaattacattttcatttgtaaaattacatttttcttttaaataaactcagcaaactgcaaaacccagaagattttgtcatttgcctctttgctagtcaagcatggccaagcctaattgcaaacggaccatattctcatgacattgttttttactagttgggcaatatggtagagcaaatcacaagaaggacaagatcatatggttttcttttcttcttttcatggaaaattttgtcacggtccctctcattacttgcaagcaaccatggcaggaaagagtcatccttctaataccataaataatccttgatattttaaaaattttcacatggagaaagcagaggtcatgatactgttatagggataacattaatgtatgtatatacattagatttatacatggtgcatgctacatgtatctctacttttatagagtgccttttactttttaatataagatgtatgataatttcatcatgatccaatagtagggatgacaatgggataggttttcccgaatacctacccgcctcaccccaaataggaagagattggtataaagataaatgggttcaggacaggtttgtgaagtttttgaaaacctggatgggtttagggtgagtttgggtacaactttatcccacttcgccccaccctgattatgtataattctaaataaaaaattattttagttgatttttttttttttaatttttgaaatttttttaacatacataaaatattaattttcaaaaaaaaaaattatagatatttataagatttcttttttatagattatatttaaaaatttaaaaataaaaataaataggatgagatggggtaggtatgggaatttcctatacccaccctacctatccctatttatttatttatttttgagtaaggatgagaataatataaataaacgggacgaggttgggatgggagtgatccatctagagctcgctcctttagcatctctattgtggaccccacatttctgtgcatacgctcccactagatggtgaactcacttttttatttgaaaaatatttatttttttagaaaaagacttggagttgccacttatttttgttttatttttaaagggaaaacaaaataagaaaggaaatcctaagtgtgattccttatttggaaaatatgacatgtgaaaaaccaaacttgggttcgaggtcaggttacttattaggaagatatagtaaatactataatacccctctaagcctgtatacataccgcctctactaaacgaattaagggaattgtggcaattaattaattaattatgaatgccaagaaaaataattaatgtacaaatcatggtgaaaatcaatatacacagaaataacaatgaaatctaattacaagaatacaaaaaataaatgacaagaggattatgcaaattgatttattgaattgattaaaaagaaatatacttttttttcaagaaatttcaaaggagtttattaaaaacaatttcaaattatttgtttacaaaaaaaaggtttcaatttattttctcaatttcatttgtattcatttttaaaaaaaaaaaaaaaaagaaagttatttacacttattgtaacaaagaatttattacaaaatttcaatttaggcacaaaaattgcttttactttcttttacgaaaattgaatgaatttttactattttgtttacaaaagtatttcaatttgttgtcattcaagaaaagtggcatatacaatttattaaaaaaatataactttattagcaaaagaatttttaattaaaaattaatttttgggacaactttatttacaaaacaaatttttgacagttattattaaacacggaaatttttggacaattattattaaaaacaaattttcaaattctattaaaaacattttttttttggatttttctaaaagcattttttttttaatttttattgataaaaaaaactttcttttattaagaagaatattttaaaattattattttattaaaaaaacatttattgaattattccttttatttaaacaaaatttttgatttgttcgatattcaattctgtacataacaagtaaacatacataaataaatatttacagaaactaatagaaataaaaccaaatataagtgaaaaatcaaatatgtatccaaataagttgacaacaagttcaatgtcttcctataacttttcgaatctcactttcttctatgaaattccatgctccacgtgtcataaattcatattcagccaacagaattgcaaaatgggctcatgcaaaaacaaaaatagctcaaattcaaatttcaaattagtccaataaatttcactaattaaaaatgggtccaaattaacaaatagaatccaacaaaaatatctcacatgtcatagaccctaatataaaattttcaaattaatagccaaaatataagctcaattaatcaaactcaaaacatgataaattaaaataaatcacattatacctaaatttaatatcccataatccaaacccaatttaatatgcaaacctaaatccacaaccaaaatcaacccaatttaatatgcaaacgtacatccaaaatataccacaatattatatcatatctaaatgaaataattcaaatgagtacaaccatataaattatctactaatctagcccaaattaacaaatttcaaattaattcaccaacaataaatgaacccaaatttcatattaattatccaataacaaattaactcaaattccatattaattaacaaaactcaaatttcatattaattcaataattcaaatctcaccaacaacaactactattaaaatcaaataaaaaaatgaataatgataataataataacaatgtaaaatggttgtgatgcgaagtgaaggaatgagagaaaagaggaaggggtcgtcggctggtagtggcttaccggcggtgactggctggtggttttgctagcgacaatgaaggttgatggctttttgaaaaacaaaaataaaataaaaaaagaaaatgaaggtaatgggaaaatgggaggaagaaaatgggaaaaaagaagggatgaaagagacatcgaaaatcggtgtcagggcagtgtttgggaagggttgtagagagaagaaaaaaaatggaagataaaatgggggtcgaccatgtgtgggagtacggagagggaagaaaaaaagaaaaaaaaaaagaagagagcaaatgatggggagccggccaccagaaaaagatggaaagaaaaaataactagaaggaaaaaagagaaatgagtagagagagaagagggaagaggagagatagtggatgtgtggccggtgagtacggtgttgggggagagaaaaagatgaagaagaatggaaaagaagaagaagaaatcaaataaaaaaggaaaaaaaaaaagagggacaatgagatggggtcggtggtgttgggaatgggggagatacggggggtaggtgagagtaggtggaggagagaggaaagagaaaaataaataaataaatacaataaataataataataaaataaaataaaacaatatacaagattaaaaaaaaactaagaattaaatggtgagtgggtaaaaaaaatcacatgtaattgagatttaaaatctaagaataaaattggactcaaaattaatgtaaaaataaaattgagacaaattttagggtatacacctatccaatggtttctagaaactaatatcttatactttctcatttactaccctctttaatttatttattttggtggggatgggttgaaatagatataaataaacaagacaggattaggatggggatgatccatcctaaagtcgccacgctaccatccccatccaatattttctaaaaactaatgtcttgtacttttttatttaatgtcacggttagaattcaaatgtagatttcttatatatatatatacatccgctcaaagtttaaaatcttggtctctcgatcaaattccaaaagcatttattagaattcgttctagaaatgtcacaaaataaatataagtatttttaatcttctttgtttcttattaattttttactgttgatatttaattatatatatctatatattattaaccatcatcaaatgtcacaatattttttaaattattaatcttctttgttttaggaaccaaaatacgatgtttggttcctaaaacatgctaattaaataaaagagaaaaatataagagaaaatgatttgcatatatttgaataacatgaaaaatgataaaaataaaaatagtaacaagattccctttaaataaaaattatttagtttgtaaaaatatcaaagctagcatggactccaataggcaagttattggagacaggatctgcattatatatttaataaaatatataattatgtcatctttaatatagtattgggttttacttaaaattgcagaaaatggaaatacttttctaaatttacatcacagcaagtgtaactatgccatgtcatgtattttctcttccacgaaacttatccatatatacaactagtccacactccacaactatcctttcttaacacaataattgacctatcaacatcagaaatttttaaaataaggcaacactatagtcttgggggtcatgcctctaatgactataaatattggataatccttgaaacccttcacattgtgtgctctaaaatcatctagcctaatggagttgtacatgagaggtttggtcgttcttttgctctatgttcttttcactatagccacaaagtttggttgttgtgttgggcatagtccaaaggctctttgtagagaagaagaaagagaagcccttttgagcttcaaaagaggcattcatgatccttcaaacagactctcttcttaggccagtgaagagtgttgtaattgggaaggacttcattgtcataacacaacaggacatgttctcaagctcaacccccgatgggatctttgtcaagatcacggttctctgggtggtgagataagtagttctttgttggacttgaagcatctttgatacttggacctaagctgtaatgactttgggatccataatattccaaaattctttggttccctctccaatttaagatatcttaacctctctacagcaggtttggtggtgttattcctcatcaacatggaaatttatccaagctacattatattgacattgggaattcttattacgacccaagaaattctttgaatgctgaggatcttgaatggatttctagtcttaccttcctagagttccttgacatgtcaaatgtgaacctaagaaaggcatcaaattgtctacaggtaacaaataagttccattctttatctaagttgcgcttgcctttttgtgagtttcatagtattgaccctctcccgcatgtcaatttttcatctctagtcatccttgacctttcatataattattttatttcttcatcattggattggttttctaatcttaactctcttgttactcttaatttagcagccagtaatattcttggtccaattccattaggtctttgta

SEQ ID NO: 10967 - DNA, 5662 bp, Vitis vinifera
  Intron number 7 from transcript GSVIVT01016742001 (locus G SVIVG01016742001) derived from phytozome v7.0 (chr-ID chr9 ; pos 857620 to 863281 reverse strand)
ctaaggcattggaacaattgctcgcagaaagtgaggtgcaaaacattctgttagaattaatttttgaatccttttcttattttggatcaagatgattataataagtatttggttaggacttttaaggggtttcatcatattccaacatcatttttaagattcaaaatgtacatacagaatcatggtatcaattcaaagtttactatatatatatatataaaagaaaacaaaaaagaaccataaagttctacaaaaaaaaggaagctaatgaaaaaagttaatatatgttaaaaaaggtgatacaaaagtttagaaaaaaatataaaaaaaggtcaagattttcagtaaatggagaaaggtcaattagaatctttataaattcaagaaatagaattaaagagaaaaaagatgtaaaatgtatggtacaggattgagaaacttgggttgcaatcattttttgatagacaaaggcaaattgaattaataaacgcctaaaaacagggggcgcaccctatgtatagaggcagtatacaaccaaaagcccaaccagactgcaaaaaagagagaaaagacctagaatagtgtagactagtctccattaaagacacctcaattttttttttatttttaaaaagcattgtctaaccccaaaaactgctaagaccactctaatagtgaatggataaagagtttcctcagacttggtcaaacatctcttcctcttggaaagtcctttgatttcgttctccccaaatataccaaaaaagacaaatcagagccaatctccacactactcttatcttcttccttagctccttaactttccattctagaagaagatttctcattgaatccggaacacccataccagtccgaaagaacttaacagtgcagtccaaagcttccttgtcttatcgcaatgaatcaaaatgtggtcaatcgattcttcattctctttacaaaggctgcacttaatggccatggaccatcccctcttcattaacgtgtctactattaagatttttccccaaaccacttcccaagcaaaaaaacgacttctaagaggagcacatggaccctagatctctttggtagagaataaaacattgttttcagcccttaacaacttataatatgatttgaaactaaactttcccctctcatcattcttccaaactagagaatcctccccttcttgaacctttagagcataaatgtgttctaaaaaacgagtcacctcctccaattcccaattttggaaagatcttctaaaatgcagctcctaacaactgcctccatccccatccctccctgataggtctgccattgtagcatatttgtgggttgcaatcttgaatagagaaggaaaaacatccttcaacttagaatccccgacccaattttcccaccaaaaacttgtgtgtctaccatttccaatacggatactagttctaagaatgaattcttcccacccttttctaacatctttccaaaggctcaacctaaaagaatccctcaactctctaatggtccaacccctccacctccccaaattttctactaatgacttttctccaaaagctctccctctcaagggaaattctcaacagccatttgcttaacaaatcttgattgagcccctccaagtgccttaaacctagccctccatgtttcttatccttacaaatagtcgaccaacttaccaagtggatcttccttctttcctccatatctccccacaaaaattccctttgaattctttctaatctgattctcagtttccttggaatcacaaaaagcaacataaagtagattgggaggtttgaaagagtgcacataataaggacaagtcttccacttttggacaagtattgtttcttctaagcggacaatttcctcttgaatctctcttctattatgtctcgaactccacacgacttatgaggggctccaaggggtaagcctagaagagaaataggaagtttccctactttagatccaaatagagcaacgactcttttcacgtccttcgtgccccccactggaataatttccaaggggttgcaataatggttcaaagtcgcggtctcagtcatcgacttggagggtcctaaggcatatcggcctcggctcggtatcggatgatacacaaaataagataaataaaaatttgaaaaattataaaattataaaatattataataattattaaaaacaaatgaatataattaaataaacttaaaaattaataaaataaaatattatgaaaattataattattcaataaatttttaatattgaaattgaaaacaaaaactctttaattaccaaactcaaattaaaaaataaaataaaatgtgatgatttttaccacattagcatttaaaaattgaaacaataaaataacatataatatcatgttatttatattattgatattgacatttaaaacaataaatttattgttgatattggcatttaaaacaataaaataatgcattagccttgcattcaaatccccaattctcaaacatcaccaacccgcccatgaatagagaggagaaccctagaaaaagcagagaccttcctctgcaacccacacccatgcggacatcaatgctgatgccggtgacactatggagatgaagtagagacatgagagatcaacacctaagatcgtcgccaatggaggagggatccatgaaggtgttgtagtccaccttgtggtaaggttagcgaagaaaagccctcaacctcctcctctcattcacctcaaagacaatcatgacgtggactaaaaaaattttcaaagacttcatcggggttatcttcttcatcacgggtcttcaatcatcaagtcttcaatcataagtcgtgattctcatgaaatttttttccttttgaagagtcattgatttttcaaagatttctcagttatgattgttgttttggtgtttctttctcagttttgggtgttgttttgctgtgatttggaagaaagtttgcttgttttgagtttaactcaaattttttttggtaactcggatgattcgcctgagtcaactcggtatcttgactgaatcaactgagtttaaccgattcctggtcaaatctttgcctaagatggtatcgggtattggactcagcgcaagaggagtcgaggcagatatgatttggctgagtcgtaccagacttggccaatactttgaaccatggttgcaatggctttggttgtatgctgattcatatgtgctgtttgctttttgtcttcttcgaagcaaatggagtctttatcatttttgagttttcaaattgcttatttggttattctaatggaaagcattaagccttttgtctttcaactggtaggaagatccagccatgttaaggaacttccaactgtgaatagaaattgaggatttagacctctgtggaacaaatcaagatgactgcaaatggtctagatattgaacaattcatctcctttattctttctggtggaaagtttcagcatatttcatgtcattttttatttagtacagtttcaatttgggttttttctgtaaaaaaaacaaaaaacaaaaagggttttctttaatatgaaatcaggattttttacattgcattacatagggtcctttttttatcaataggaaaagatcaaatttattaaagtcacctacaaaagggcatacaaaaacatacacaacatataagaaggcaccaaaaggcatttcattgcacagggtcctgtttcattttttttttgataggcaaaagcagaattatattagaaaagggcaccttgaggaaaacccaaaagcatacagagagtatacaaaaggcaccttaaggcacaaacaaaagaagagaagatacaaaaccatccctcatttagcgcctagccaataaaaaaaactaagtaaaggaagaggaccttcatttacaattgactttgttcacaaccaaagattacaaacaaaagaatttttcaacctatgaaccgaaaaatcctcattatcgaaggcaatcctatttctttccatccaaaccgcccaaaaaaggcacaacggggctgccttccacacctttctccgcttcttgcccaacataaagcccctccattcaataagggtatctctaaccgaaaatgggaggacccaaaacactccaaaaagggcgaacaataactcccataaaactcttgccctggagcaatgtataataatatgatcaatagactcctcttcctcacagcacaggaaacatctattagcgagagcccaccccctctttttaagctgatccatagtaagcaccttaccccaagaagcctcccaagcgaaaaagctcactttggaaggcagactagggctccagatcaaaccatgagggaaaagaccagctcttcttgaagatagatcattatagagggatttaactgaaaaaatcccattcgaagtcactttccacaacattctatcttccacaagaggaataagccttacaccctggattgtcaaaagaagcctctccacctcctccacctcccaatcattgaagggcctagagaatctaggactccaaaccccttcctctcccgaagaatcccaaaactcctctacccaagctccttagaggaggcaaaagcatacaaggaggggaaggagttgcagaaggcgtagttcccacaccatttatctttccaaaattttacccttctaccattccccactgaaaaaacgactttattttgcataagggcaccttccttccttatttccttccaaaatcctactccataactctccctaacttctctagaaacccaacccccttcttcctccccgaacttcctactaatgacatgcctccaaaagttctccctttcattcgcaaaacgccaattccacttgcaaagaaaggccctattaagggtagaaagacgtctaactcccaagccccccttccttttgtccaaacaaacggtatcccaattaactaggtgaggcttcttctccaaagcaccccctccccacaagaaatccctttgaatttttccaaccttagactaaccgctcttggcattcgaagtaaagacatcaagtatatgggcatacttgataatgtactacgaattagagtgattctccctcctttggaaataaattgcctcttccacaaggccagccgttttcgaaatctttcttccaccccatcccaaacggccatagacttgtggtttgcccccaaaggaatccccaaataagaagaagacagtctgcccactttacagccagcctcgagagccaaagtctccaaattctccactctaccaaccagcaaaatttcgcttttgtccaagttgattctcaaacctgtttcataaaaatatgctattaccatttctccctctaatctctcacaaaagcatttttgtcaaacaagaaaggctctgtgtgggatgtttctttaatagttaaatatttaaaggattattttcatgaatttttacagagttgtattatttctgtttctaagttcaacatatattttatggtacttgttcacttgttgatttcatttgtgaccccatgttctgattttatatcatgttcttgttccagccaagagagttggtgggtttccttgtattaatcaa

SEQ ID NO: 10968 - DNA, 11084 bp, Vitis vinifera
  Intron number 9 from transcript GSVIVT01026719001 (locus G SVIVG01026719001) derived from phytozome v7.0 (chr-ID chr1 5; pos 5405808 to 5416891 reverse strand)
tcataaaactctccaggatcacacaccaccacattgttggatcattattttcatatccttaatagtgtgaaaagaaggtctggtttcaagctgttcaagaatagtttactagttacatcttttccattggattgtagttggaccataatcattctctaacaaatagttaagccagcatttctggagcaaaactgtcttgagtaattatgatactgttggtaagctgggaaattgatagactggctgagagaggtcatcccttattgagtttgtaggagactagccctcccctaaactataccctgggctgtattttcagggtgcggtttatgatattgttggcattatttgcctgaaggatccttgttctctttcatatgccttttctattaatattatgcttgtttgttatcaaactaaaaaagaaaagagtatcttatgtttattatgagtagttattgatttctgacttatgctataaagtagtaagtaaaacatatgtgatactccacagattaaataagttggcatgatacttgacagcataagtgagttggtactcttttgacattaagtatatatatcgatccagaaaatcaacagcctctcataatacaatgtactgttcttgctgtgataaagttttttactatttggcttcattttctcttgaacatctagggcagtagtgcagcatatgctaggtattttggttggggtctgtgcaagtgagaactatatagatattcggcaggagcgtattgctcatgtctgtaggttgttcattttatttccgtattacaataatataaactacacttatagctgttagaataagtaggaaataaaagaaagaggatgaggagttgtttagaaagacaaaaagaaattgtatgtgtgtataaaagagtaaaataaaaccttttactttagcatcatgcccaaaatgagtttagtcttttatcaggatcgctgggacacaataaatgaggatctcttcaaagattttctgaattctttgataatggtataactaaaaagagtgaagagtcgaagcactggagtttttgtgtcttatcctctttatcagtttggtgattagtctcagtaagatcattattaaagtttgttaatagtcttaagtaaggtccagatggttttcctttggctttctggcagcactattgggactttcttaagaatgaagtcttgggtctgttaagggaattccacacccaaggatattttgaaagtattcttgatgggtgagttaaaagaaaaagaaggattttttggtctacctttattcttttttcctaaccatttgtagcactcatggccatagctctaactcaattatttcttaataattgcagacaaatgtcttttctgctcctgtgtctagtgaggtgtgtgggcccaaatttgtttgtttcaatgtgggcaacctttaggttaactttcttcttggcctgtcttcgctcttgcccatcactttgtggtgtggtattgcacaaaggcctaacccttgggggtgcggtaatacatctaagatattattccattgaacatacccccctagatctaggaatagcaacacagactaaatgcttggtccaagccaatgaacttactccaaagagtcttgacaaatgatgattaaaggagtctaaatgccatgttattagttcgagtagtttagtgggaagtttttataaatttctagataaaagttttggcaatcaggctaaagaaagttatagtaagagtggtgttcaattcttagaacacttttgtgcaagataggcaaatcctagatggagccctaagtgcaaatgaggctataaattcaagattaaggagcccaagggggggagtggtttgtaagttggaccttaagaaagcctatgaccacaactaaaaacctttccatttcagccatatttggtaatgatacttccacgtcttgggatcttatctttcgctacaatctaacgaatgtggagattgaggatcttgaaagactaatgtctttactttcccatgttcatttgactccttctattctagatgtgaaagtttgggttccatcctcttcaggaggtttcttattaaaatcttttcttttagtctcatccaatttctcatattctactcctttctacctagctcatttttttgtggaaatcaagagtcccctctaagttcatggctttcgtctggttagtgacacataagaagataaataccaatgacatgctatagttgagaagacctttcaaaacccttagccttgattggtgcattctttgtaggagtagtgagacagttgataatctcttcttacattatccgattactctgggattgtggcataggattttctcataggcagggatagcgtgggttcaataagacagtgttcgtgatatgatgataatttctttcaagtgttttggaaactctattaaaggcaagactctttggaggatcgcgtgtctctctttgtagtggattgtgtggagagagtggaaggctagggtctttgagaacacttggaagacgccagagatgatgtgggatgcgtgtcatttctttatttctttttgggcttactgtacaaacattttaaaccttatcctttgagtgtaattcggcttagttggttgtcaatttgcaccctttagggtagggtctacagggccaggagttgtaacacctatataggcttttgtttgttttgtatagctcctatatagaggaggtttacttagctctttttgatcaggtctgtatttcatgaggaggatttctcatctttcttatgttttgtttattcttaagtaatacatatgtttgtttttgattaaaaaaaagaaaagaaaaagaaagcctatgaccatgtcaattggacttttcttttggaagtgttgcagaaaatgggttttggatgggggtgggttgattagattgaattctatgtatcaaactaggttttttttgtcttggttaataattcgccagttggtttctttaagagatgaaggggtctaaggcaagggaatcctctatcctcatatttgtttgtggtagtgatggaggctctcagtattctgttaagaaaggtgggggaggggcacttcatttcaagcttcaaggtaggaggcggaaggagtagagatttctcacctcctatttgtggatgataccctgctcttttgtgagccttgtttagaccaattgatttacttgagttgggtcttgttttggtttgaactttcttctaggctgaaaattaatttgaataaaagcgggttgattgttgtgggagaggtcgctaatgttcaggaggttgcctctttattgggttgcaaagtggggaagcttccaactacttatttgtcgccttcctattttgacatgatgaaatcagagcacttcaagtatatttatttatttatttatttttgataggaaacgacaaaggaatatattgatagaaaaaaaagtacaagagaaggatgatgaatcctcccaccaaagaaaactaaactacaagaatacgaaaacaagaaaatacaatgtaataacgaacaaacgctctagactaaaccaacccaaaggaattgcacgccgttagccaatcaagttgtaacacattaaggggagtccccttaaaaaccttggaacaaaaaacccaaagagaagcaaggaaatgaatagaatcccaaagattctctgaattccttgctttgtcctaaaaaatcatcgcatttctttcccgccacataacctaaattatagcaatacacgcagcttgccacaaaattatccctctcttagataaaccaaaaccattgtaattgatggacaacatgtcggaaatggtcctcgggggaacccaatccgtcttggctaactgaaataatttgtgccacaactccatcgttaaagaacaatgtaggaaaaaatgatctgctgattctccatgcctcatgcacaacttacaaatatcaggactaaaagctttgtaaggtcttttcaattgtagcaagtcattaataatttccttcttgtgtgccaccaactacacaaaggacttgactttgaaagggacttgagaattccaaacgaacttagttgggaaaattggaggagaactagaacattgggataaggcaagaaagaaagatttgactgtaaaaaagccctgaagaagataaagaccaggatctcgcatttgaaaccaaagatgacaaatgcagacaatcaagtgaccacatgagaccttctaaatcttctatctcagaataggataggttgcggtgaaaattaaagttttaagagaagggacgagtagaaccgagaattgaagaaataagaatatttttatccgtgactactctaaatagtcttgaatattgggatcccaaaggttggtccccccaccacaagtcttcccagaactgaattctttccctatctcctatcataaaccgagtaaacttggaaaactcctgaaagacttgtgcaatagccttccatggataatgatatgaccatctgactatagtgttggcatgccaaccattagagtgtgattcgtaaatgcttaaaataacctaatgccatagagttgaaccctccctagggtacctccacaaccatttccctaagagagcgacattccttagatcaatcttcccaaatcccaaacccccttttgccttcggcttacacactgcatcccaactaacaaaatgatctcttttacctttctcaacccttgatcataaaaaatccttttacaatcgctctatttttgcagccactgaagcgggtatcttaaataaagaaaggaagtagcaaggcaagattggataagagttatcctacctccaaaagataaataagccttttgccaaccatctaatcttcttgagatccgagacaatcgctggatcccaaaagccacaagccttgggattccctcccaaatgaagacccaggtagggtataggccaaccagaagccttgtaatcaagcaatttggccaacctagaaagatgattctgttcaagattgatgccataaatattactcttgtcaaggttagccttaagctcagaaatatgcccaaacactagcaataaactcttgagagtctgcaattcttcctcactagtgttagaaaagaaaatggtatcatctgcaaattgcaaatgggacacccttatactgttcctacccaccctgaatccctccaacgaatttctttcctctactctcaataacatcctgctcagtatatctgcgactaaagtaaacaaaaaatgggataaagggtcgccttgtcttaagcctctagatgccttgacccaccctttagtgtttccattcactaagactacaaaagatactgtagacaaacaacctctcatccatttcctccatctaggactaatccccttcttctctaacatatgatccaaaaaatcccaactcacatggttgtaagccttttcaaagtcgattttgaagacgactccttcctcccctgaacgtcttttctcatccactatctcattggctatgagaactgcatccaatatttgtctcccttgaacaaaagcgccttgagtagagtggatagtttcgtgtagtacccctcttagatgcccggataacactttgactattaccttgtaaagactagtgatcaggctaataggtctaaagtctgagattttttttgtcatgttttttttgggcaatagaactatgaaggacgcattagtgctttgattgataatccttgcttctatgaaactctgcaaacactctcactaaatcgtccttgatcacatcccaacaatcttgaaacactacaatggtaaagtcatcaggatctgatgccttatccctatccaactgaaaaatggtcctagaaatctcttcttcagtaaaaagggagtttaacctagacacactctcttcaaatataggggaccaatctaagccttcaactctgcaagactctccaataggacccgagtagagcttttcaaagtaaagtaaaatctcctctgtgatgctctttaaattattcaacactaatcctctttcattctccaacaccttgataaattacctattttgcttgccattagccattctatgaaaaaactttgagttacaatccccttccttaactcattttttaccctagctttttgtctccaatcaatttcttccctcaaaattaattcttctagctccccttttcttaaagctctttgaacttgttgaatataatgtatgtatagtatactatctttccttgttaatataggtcacatgtatggtagttaggactcctagccttgtatatatatatctctcaattgtaagtagagatcacaatgaatgagaataaggtttttctcctctctctctctctctctcaacagaactaaaagttcagaagtgagaccccctacttgctcaatggcatcaaagttcgctatttcattcaggatgctttttgcctttcttttagcactccaaaagaaaccttattccactttttcaaattggccttaacaaattgtaatttccttatgaacttgtgaccttcccacccagttccttgaaaacctctccaccaacttctaaagcactccttaaaactgggatgttgcaaccacatattctcaaacctaaaaggtgttgggtcccacttgaacgggttggtatccaaaactattggccaatgatccgatgtccttcaaggaagaacttcttgaaggctttgaggaaaggaatgcgcccactcatttgagtaaagaaatcagtccaatcttttacacacaagagactcttgcatgtttgaccaagtgaatggtgcgttctgtaaaggtgggtcaagcaattcacattctcttataaaaccatcaaagtccttcatgcttgaagttagactagaacctcccaatttttctgaacttctccttatgacattaaaataaccgcccacacaccataacggaaaagatagaccaaaaatgtctaacagctccacccaaaaatccttcctaagtaagggactgtttgggccataaattgcggacaactatagagggtccgcatccatccaaagcaaacttgattgagaccgaaaaagatcttattaccacttcctcactgcgcaattttttagagtcctaaataatcaaaatcccacctgaagccctgcacaccggaagagtagcccattccttatttctgactgtccaaacactacccacaaaccttttgtcacactaattttcttttgtttcctagatcatcactacatccggattctttaacctcagaaaatctttaaccacccttcgctttttccttgatcccaaacctctggtattccaactaattattttcatggaaaaacctcacagaccctcaatctccaaactagttccaacaagtctcacaaacttgtaaaacatctgctcttcctcctggaatataccttaatatccagagagcttaaaacctcacgcactttagccattttcacgggagacaggctttcaatttggaactcgcccaatggggagaccacagtatcaccctggctaactgtaaccaggttggaaacctcaataggcaaatttggtttagacttaatggagttgaaactctcgggcaactggtttgaataagcagaccgggactccaccacaacaaagttaggattgccaatagaattttgacataaagtaccatcatcgtcttttttggaaaaaatttcagaaattactcgattttccataggaaattgagactgaatgactgaactagggagatcgggaacagaaggactcagaaatggaagtgccaaaccagaagaaatgggaaaagaagaccagggtgactgagaaggtgaggacaagtttacctccaagtttttcgctaccgacattccacaagtccccataaagctgagccctttacctctgatttctggattagaaggtaaaaacgtgactgaagaaccacgaagattggacctcactcgacccaaaaatccttctttgtcttcttcaaaaaagggtttgcgcacaacctctccacctctagatgacgaagccccttcccccaaaccacactttcgaatccttggcgatcggcaaaagatgataggactcgcactgaatcctcgttcccactgagctcccgccccaaaagcctccttctttggaagctcttcgctatctgatgatggcttcccgagcaaaataggctcgttgcgactttgaaatctttgtcgtcgatcaaaacttggaggaaatagggtagtccacagcttctttgaaccaaacttcacttccttcttcgcggagcctctcgtctgaacaacaggatcaattgatactcctttcccctttcccactacagaaacttcttcacttcgtaatgaaccctactttttagagggcttcttttctcctgttccttggcccaacctcaacgggactcttaagttacaacctacttttgcatcagttagtgggctagatttgggaagagactgggcctttctctcaaaggctcgaccattctcatttgagaaggccttgtccccaccggccatagctacgcttgccatctctgtcccaactagcccaaagttcagtttttttaaattcaaactgaaccagctgttccccacaacctgaccactcttaccacatgtccccactggaagaactttaaccaaactcctttctcctcccttcttctttctgccagcttccccaacacgaaaactacctctagccgttgatctatctctctcctcccgccttccaccacctgtccccgagtgagattcaaaaacctctcgagttgactcacccattactttgcctctcctaacctcttcaactccgaccactgcgacataaatagtaaacacccaatcctcgtctatcacctcgatcaaagctgggagaactgactgatccttcattgcaattcttaccctcgccttgctaagattaaacaatttcaacgttcgccaatcaatttcaatcaccgtcccccattgctccactattttcttcagatgtaacttagaccagatatgaaatggcaaacctcgtaattcaatccaacctcctctgaacttcccctcaacttccgaattttccttttattgaccaccttctcaattggattgtattccctccctcaatcttaagaatccttaaatcctggagaaagagagcttcctctatcgtttctacaaaaagaactccttttctgcctgagaagggcacaatcatagccactcctttcttccttaagcttctcgtcacagctcagccaacctcaacccatttaacactatctgcattgcattcacacaccacggcttgcgctcacctcctaataggaacaagtccacctctccttggtccttcatctctgactacattcgcaaaagaccagtacagaggacccacgtgattgtggataaacctttccactctgtattgtcttcttttttcatctgcattcgagggggggaccattggcattgaagacaacgtgctttttagattctcccatcctctgcccttcttgctctcaggaataaccagtaaagttggttttctgatggtagcgaactccgaaatccttatgaacctttcgtggttgttaaagcatacttccatcaaatggacgctgaattttcccctgtactttctgttgaaccccaagtgactcttcatttcgatggctttcgtcaaatgttcgatcaaccacccgacttcttccttttcaaaacctaagacataaacaaagcctttgctgtgctctgtaatcgagcaccaatttcctctgtgctcgccttccaacctaaccaagaaggtcttcctatccacaaagaccttcaacgtccttaccatattctctacacaacttcaagagataatttatggtatttttcccttcctcctctaagtgatcctttcctcttccccggtaacttggaactttaacttcctcaagtatatttatcaccttcctatcttggcatgatgatttgatctttgattgctttagggtagttcttagttttatggttcttgtccatttcaatcaactctatcccctttgctccaaataactttatttgaaaatttagaggctttcctaaaataaaggcctttgcttggtttgttactaataagggtcaatactaatgatatgctttaagcaaggggcttataatgtcctcaacttggagtggtgtgtcatgtgtaagaagagtggagaatcagctaatcaatcgttttcttgttggcccaatagctttcaccttgtgggttgtggcataagttccttcattacccaatagatatgaccttgtgtcatagatttttaactttgttaagattgactaagtttttctcaaaagtgtgatagggattttaataatttcctttaggggtttttgggactttgtatgggtagggttgtatggagtattgctatcctaaccctaatttggattatatgatgggaaagaaaatgtaaggatctttgagggtgtatagaggatgctagatgtagtttgagacttgttttactctttctcctccatttgagcttttgctagtgaagccttcacaatcattcttttgaacctcttgttattagattggaaccttgtatgcaggtctaggggattggttgagaagatctttctagcatggttactgcctttgaagggttaagttaaattttgatggatgtgtacaataataaatgcatactctacccattaggagagtgcttgtgacttagaattggattttctataatgtcaagtccccaagggcaagaactttaaatttgtaatacctgaagggtgtttaggtagtcaaacccaagggaagcgactaaaaactggttcaaaaaaatgctggaaaataaatttttggtattttcaatattggatttgagggggtggagttgaaaattgggaaattaaacaaacaaaaaattac

SEQ ID NO: 10969 - DNA, 4010 bp, Vitis vinifera
  Intron number 4 from transcript GSVIVT01023687001 (locus G SVIVG01023687001) derived from phytozome v7.0 (chr-ID chr1 1; pos 9294853 to 9298862)
ttatatatatatatatatatcttgacatctatattgtttactttcttagtacaaatttatggattttaataagtaaatttgtgattgttatttgaatctttttttatatttatttttcagggaaaaagacttagatttgcaatattgtataacttcaaaagtggtcatcctagaaagtgaacaactcatctttaatggcaaatactgaagaatctaatgagatggtttgtattttttatactatttgggatgttaatgtgttgctgattcttgtatatgagattactccttcaatagaaaaatatatttctattgcttttcatatgctaaaaagaagatcccaaataagttaaacctagataataagtttacagatgatattgtatctcgggtttgccataaataatgaactaatcaggttaagtttttatatgttaatcaaaatattcacttagactacacttggttaagttttatttacaaagaacttaatcgaggttaagtttcattaacaaataacataattgtagttaagtttttagttaaaatgtttcaaacctatttataatataattaattgaatcagtattttgattttagtataaatggttaaattttttgtaatttattttagttcatgtagaatgtttataacttttaatatattttcttaatgtgaagcacaatatgtgtgactttgcaggctaccacatcttcaacaatattcatacagaaaatatgtaatgaagatcacttcccatctaaggtggcttgcttatcccacattattgtcattgacaacataaagaagaacttgaatgaaacccaactagagatgtttaaaaaatcttgttttggccacttcttaggtatggctaatttgaaattttctgctcaaattgttcataatatgttgttacgccaatgtgacattagaagagaagatgagatgtggatacttgttcactcaaaaggattgagatttagtgcgtcggagtttgcattgataactgggttgaaatttggtaatatttcacaatttgacttaacatcttcaagaataagagatcaatatttcaatggagagaataagattcataataatcgattggaggaggttttcatctcattatgtaagaaaggaaagagaacaagcacaaagagggcaaaaaaaaaggcaaagttaagtgggaaatcaaatcttgatgaagatattgtgaagttagcattgttgtactttgttgagcatgtcctactaggaaaagaagggaagaatttgatagatttacaatgggttcaacttgttgatagtctagaggagttcaacaagtatccttggggaagaatttgctatgaaagaacattgtttgggttgcaaagggctttggataaaagacagtcaaaatatgtagagaaaaaaaaaaggaggaatgcaacctatgaagcatatgcacttgtgggatttccatatgcctttcaaatttgggcatatgaagtcattccattgcttggaatgaaatatgcaagtcgcattggtagaagtttccccagaattttaaattggacaagtattgcaactccaaaatacactgagattcaatccttatttgtagagtcaaatgtgagtaatatcttaatatttgtttatactttcttttttatttacataagcatattattattattaactactttctttctactttgaattattagttatctttgcattccatactcattcccacattggaagagcgtgaacaagagtatgtgaaatgttttgaattcgaggttgaatcaaatgatgtcttccaagatgatgtgaatgattgggagaaagatgaagatcatgaagaagccgaggcctataccactgctacaacaacaacaatgaaatgtggaaaaaaaggtgatagttctaattaaattaccttcattcaaggtaactaaactgaaagttattaacattatttcactatacatgtttaagaatgtttgactaatgttatgatgttttttgtgatgtaaaggaattgtttatgatgttcatcaactttcaagaaaagacagaagcaaattttaatgaagttagagcagaattgaaagaagtaggaagcaagattgatggtttgaggaagctattattggatgttagtaacatgtgctagattcctctttttttttttttttttggtaataccaacaatgcattttaaaatatattcatatatttctatgcaatttcatagtagaaacctaagaagtgagccatataatgttacaatggggaatgatgtgacaatggactttaaatcaaagtcaagaaaatttgaaacattgggaaaagacaataaaatggaggcttcaatggatgatgcactaaatgaaacaccagttaatgtttttccatggctttatattctttatattttttgaattactgacaatgcattttcaaatatacttctatgtaatttcaggttggaaactcgagtaatgagccatatactgcaacaatgggaaatgaaacaatgttcgacttcaaaaaaattgagacatccaagaaagacaatgataaggaggctttgatagatgacccacctaatgcaacagtagttaatgttttctcacatcaagtatcaccgaatatttttaagcgaagaagggaagtaaaaaaatcttacctattgcaacacccatttatagatcccactaagagaaggaagttggtaatgactaagactgacatagcatcatcaatctttgatccattgcaaccaccatcaatggaggcaaagatggcctatacacaattattaatgatgggtgtagaccctctattttgtcttcctcgcacatgtcgtttacagcaattccctggtggcccattaatactcgtgtagcctatctactctaagccaccttggggactatggttgagggatttatcgaactctattgcaacttctggtagcccatttagacttagatatacttaagcaccaccctaggcccacttaggccctttaagcccattaggcaccatcctaggcccgtttagacactttaggatcatttaggtacacttggcccattaggcatcgccctaggtccatttagacaccttaggttcacttagtgcaccttaggcccattaggcatcaccctaggcccatttagacaccgtaggttcacttagtgcaccttaggcccattagacgcacttggcccattaggcacggccttaggcccacttaaacacttttcaaggtttagtttcacttagatttgttttcttgtttttatttatttatttattttattgattgcttttaagattaagtgagttttgatatatttatattatttcatcattattattatttgtattttcgtttatttattttattttataattgcatgaaatgagttatttgtttatttattatttttggtggtttgagtttgacacttcgactattattatatgttgcattagtttaattttattattattattattaaatatatctaatatttattaattaatttatttatttttaggtatatatcattttatctatgtattgatattttcttatttgggatttaaggacttcttgaaattttaatgaaaggaatattgactttgatttatgggaatggttctgactttatggattattgctttcttttttggaatttttttttattgttatttttccatgtaggtggagtcaatgggaaggtgtgcagaggatgctcatggaaaagaccacactgtttttttgaaaggtagattcggggcgggaaaacggactataaatcagggatgaatgcggatgatttttagaggaagatacagaaaggttttttaaaaggtattgcgctgattttgggaggagacagagcgctctatagagaaaggaaggtggctagttttttttaggagagaataagagagaggatgaggaggacggaaaaggaagaggggaccattgagaaagaaa

SEQ ID NO: 10970 - DNA, 14005 bp, Vitis vinifera
  Intron number 2 from transcript GSVIVT01029076001 (locus G SVIVG01029076001) derived from phytozome v7.0 (chr-ID chr5 ; pos 11954822 to 11968826)
gttctggaagacgtgactgaatagtaaaccccttctcttttctctattgtctgatttttttttccttttttgtccgctttggagaattttgtgtgttgaagttctttaatcgtatcgatttgttgctgtcttctaatttgctaatccatatagtggttcttagttttgttcgtgtcaagaatattgtgataaatttgttatcaatgaggaaatagattaagatgctggttatgggagggcaatgctaaagatgtgggagtttgaccagtttgattccccaatttctgttttttttttcatatttaagaagaacaaaaaatgtgattctttttcctaaagcaattgacttagctgctatattttcattgattttttcgtttttgtaaaagatggcagcaattttctgaaaatatgggaaaacagaaaaataaaaataaaatctgtttccttggattttgactcggattattagaataccgaacatagaaaaaagcagaaccaaaatgtgcttattacaagactggatgggagatgaaaaagcaacaaagagaaagtaaagaagaagataatttgaacaagtgaaaaagcaaatgatgaattgtcttccaaacagagtaaaaaataaataaatctgtgttcaaattccctcaagctttgtgttgcaaaaataaaaatcaccatgataatctccttaatgagttttttctcctagtgttttttgtatggtagttaagtgaaagtgaaacataaacttgtaaacaaaatactaaacattttgaaaaactattatcaaaagaaataaaagaaaaaaaaaaattaaccataaacatgtcatcaatttttttatgtccttaattaaatttggatggtgtagatcatcattttcttattaaatataatacaatgtgtttcctagtattaaaattcaatgaaatataatttttatctctacattaatatttatttcaaagttatatttgttatcaacacattttttatttttggtatattattaattattctagcatatgtcaaagtttatccaaaattttcacttattttattttattttattttatcaatttatgtgttattttttaatatttttttaaaaaaatcaaaatttctatcgatatttacataaaagcaaaccatggatattttggtcaataccaatattttcatccttgattactaggaagatgtttggttaggtgcatggtaggtatttgacttctcagaacaccgtgtaatggttattgaaattgggggattttgattttgcatgtcaactgttcattagatgccaagatgggatttagttatgtggaatttgatgataaggtgtatgcattgaagtacccatctagagaaagagttctctttttttgaaaatattgaattcaatttctttctttctttctttcaattgctggtatgcgattactgattaccaaatgcaaaaaccttttattttattttatttttaaattttcaaactaaatattgatgctgccatttgaaagaattaaaaatagaaagaaaaaaaaatgttttccgcttttaagtttagtaaaactaaaactagaacttagacaataataataattaaatttatttcttttccctgactctggttcagaaccagcctaaatatattccagctaattggttttcataacagtcacagctaactagttatctttagaggtagtaagtgggtatgtccagaatggatcaaaattacaggcttcccaaacagaccttaggattaaaaagtttgataactttcaagaaattatcaaaactgcttgtaccaactatgagttagttgttataaacgtaagattcttgaagatgcatgcgttaggatatgtttttcaggtaaaataatacctccctcttgtatgtattgcctcttaagtgtatcttatggtgcactatgatgcataaaaggctacacacctgataaatgtgatacaggaatggttgactagttaaggaaaatcaaatttgaattttttttcttgaaaatattcttatgttattgtaaaaggtactttgaagtaagaaattggatgaaaaaggaagagaattatcatacagaacattatactagtattgttgaatgtagatattgaatgttaaagcttatgtataatcactatactaatgaatattgatgtgttatttgaaattttgaatgaacacatgttaagactgtaagaagtctgaaaatagcatataaacacatatacatcagtagtccctgcaagcaataagcatatagttttatttttgtgatcattgtttctgctatattggttggggaatggtaagaacttggaattttttgacataataatatttttttaggatgtaataagttaaaattattaattacgagtttggaaagtttattttttggattttataatgaatcgacaccttaaacatgttatattttgatttcgtcaaagttatagtgttaaatatttgcttatggttgatattgatgaatgtctttattaacctctttgaatgttgttatccattcgctgagattggttttgcctcgcttgatgcctcattcttgtgatatctgtttcataaatatatccatatgtatttatatatttgtttgcctatcaaatattatatacatataatttttcatatttatttttcaacatgaaaacaaactttgatacaccatacaataagatatgcaatatggaaaaatgacaacaatgcatgatatgacttcccaagttgagaactatgattatagaactctatgtgggggactaatgcaatggaatggatccagatgttcatatatatttccctggtagagttgcaccgagatggggaaatggacatcatgttgctaggtggagaccttttgcaaacatagcaaaaagtgttgttgggtgcttaatttttatgtgtgattagttttaaaacaacatgggtccaactcgaataacctgccttttagaggaccattagtcattgtttgtatggatggtgcttatatatggcaattttgtttatacatggatgcaggtgaaatttttttgtctttggatcctctttatcaataaggtttgatagacctttataaaaattttctccaaagtgatacctcaaatctttataaagcaagaattataaagaaagtaggacagggagcataactgttgtggatgggaattattcaaggagcatccagagagacgtaaacagaggttttttttttttttttaaaatagggctaacaaggttccatggtataaattacctcaaggtgcccttttctaatatatttctgcatttgcctatcaaaaaaaaaaaaaggttccatggtataaacaaagtcctgcaatgacattatcctgttccttcctttagctccacaacatttcaaatcagtgctttttttttctttttttttttccccatgaactccaagctaagcaaccttctcattgttctcctatttctataggataagcataccatgccaacttgaaagcccttccttaaaaagttatgggaagaacccatgcaactttaaaattcaagcatagcatggaaaaaattttctaggcatgatattttttttccctacccatccactagtacacaaaatttaatttggaagatgtcaaggtattcttgaaatgcattatcaagaattaacatcaattccacttgggagagcactaaaaaatgacttggctgaaacttctccttctttaggggctatccaaactagagaataaatgcataatgctccattactcagagtctccagattctccacattcttatcttggcccataaaggagttaattgcaaacaattcctcatcatgaaattctttgtgaacctcacattccaatacccctttgctttaatcaatacccacaggatgctattctagcctcctgactactataagtcaaaatttccacagagttttgtggttaggggatattcgcaataaagcatgccattcaaaaacctgtatgctatacacaaagcctactcatgtccactgtgtgattcctgtagatgggcacaactactttattttagttggcattccacttttatcttcccctcttgctaggaagatgaaaactgataaaagatcctgctctttttctatagctgagaaaaacatatcataactgaaggcaccaaaaggtgagaacctactttatggtagaaaagaaagtgaagtagaaagtaagagattaggaaaaatttaaccttttgggtgtttcatctaaaagagaatatcatcatcatttaacatgtctttggggtgtggcttattttatattgttaattctaaatattatgccttcatagatgcattacatttttaattttgccttcataaaaattggattgttatatttttatgttaaacagaccaaagcaaccttccatggacataagccaaccaacaaaaggctgtcaagttcagttttccaaaattttgaacaactgcaagtgtacgaatttcttggtcatatcattgtctcccattataccccatgctcaattactcatgattaattgcctctcttcaagtgttctattgcatggctattcaagtggttgctacatatatttaaatagagataaaccaaatcctatttttgaattctaattatttttgttatttgaaagaactaagattttcaagataaggaataaacaaaccatggataaatccaagcaaccttttcttaaatccaagtggtctttttgcaagcacttgaccaaattgattatcgaagccctttcttcaatggtttatttttcctgactactttcctgtagcttcgccatcttatctagctgtttgtcgattttcatgatggcctcttgtatttttatgtggtagaaattcccttgtgttgaagaagcgtcttgcttcttggaaatgtttttagaaacaattctaacaattctctctttttgataagttagcaagaatatattataaaataattgaaagaaaagctatacaccatggtacacaggatgtattcaaatcaaaaggatttgccaaatagagattggacacaaaaaatcacttcccatagttagatctcatctaatctacaaaatcaattcaaggcattaagttttttttctatatacaagctaacctaggatgctagacttttttaaaaagagcactttagcgattgagttagtttcccctcactttcaaacgttcttcaattcctttccttccattttgttcaaaaaaatacacaagggagcgactcgccaaaccttgctttttcttcccactaaagagccatgtcaacttaaaagactctaaccatgaaatgataggcccatacaacatcgaaaagagaaaacaacagctgccttaattccctaattgtggcacgtcataagaggatgtgatatttgatttatcttcatttttgcaatgaagacgtctcttctccaatgaacaccctctcttatgatgccgattcaaagtcaacacctttccccaactagcttcacaagcaaaaaaaacttgcttttgatgggatttaagaattccaaataatgccaattaggaaagattatagatcccaactccaaaatggaatataaggatttgattgagaagacccccttccttgagtcccttgagaccactttaaccttctcttctctcctctcttcacggacctttcttgcaaccttgaaagaaaagcctcaacattatctatctcccaatcattttagagaaataaagattcaatggctcttctcactcaaatcattccaaacatccgtcatccaagcctctttttgaggatgctaagacatacaaggatggcagaaacaaacgtaagagttcctccccataccacctatcattccaagacttcatcctcttatcatttcccacctcaagagaaattctactattgactaagtcccatccgcttttgatgtttttccaaaccctaactccacacccttcccttgctttgcaagaacatcaaccctcctctccctcgccatacctgccttaaatgaccttgttcctaatgcttctccatttgtagcatatctctaatgccactttcctaagagagctctattaagtgaagaaaggtgtctaatgcttagtctccctttttgttgcttcctacagataattagtcatttaactaaacacatctttttctccaaagccttgcatccccaaaggaagtctttttcaatttttctctagtcttagcttgaccttgctgggaatgctaaacaaagaataacatatataggcaagctggagacaattcttgagtaaattgctccaagcttttattctttatacctttaatccaagaatttttcctttggtataaaaattggtgtagcacaaccataagatggttgtgtagaatcaaatttttagaataaggtgtgctacaaattcactattttaagatttaaataggggagcaataaattaaggttatggtagtaagggggaaaaataaagttggaagaagaaatggaacatagagaaagttaaaaagagaaagaaggaaaaaccataagagtcccattaaggttttgtaggagtatcatcaaaggatagataaccttatttatgggctttagaaacctaaagaaagttgacaaactatagaaaggaaacttaacctatggagactctcctggtaaatggcatcttcttttttcctctctgttgagtcaactcccttaacaatatgattagtggtttgtgctttttctgctggtgatagttttatccttaaaaggtcatttaacagctaagttctcaaaatcatccagtgtaattgctgatactaaaaacttcaaaaccaaaacaacctccttttttttttctttagaaattgagaaggattttttagttggttaggtcatttccgtaaagatttactatatgcagtcaggttttttatattaaccagttgtattttatccagagatcattctttcaaaaagaaataagcaatgtaatacttgatgagatgagaatcgaatttttcagtttttacaattgagcaatgaatggagtgtatgtttacagaaatctaagaaattgatatttggaaagatcaattcacaattagatctagtcaacttaggataagatctcctgtttatcaattgaaatttatactcaaattcattcttatttcattctaaaactggacatatcagatttgcttcactgcttcttcttagaggtttaggctactttgtatacttcctgtatgctttgtagctgtttgccttttgttattatatctcgtgtttatttatcaaaaaaaaaaaaaaaaaacaattaaaaatcagaagaattcaaacttaaggtgctgaaatcttagatctaaaagagagtgcagtgaagaacattaaagagaaatgcaaccgtttgctttctgttattgcaggtgattgctcttccaaatatcaacaaacagctagctatgataactagatcttcaacagcgcatatcatgtttggcagctaagaaaatgaaataggaaatctctccatcaaagaaaaatacaaaactaaaaatctaaactaactctctctaatttctaactctatctatcatctagtatctcctaaaaggttaagcaaacaagctattttataggcaaagataccttgcttctactcaatgctaacttgccacgtggttaaaactaatcttaagaaaatctaaatactgaaacaatagttctaacatcataagtacaaatctcatatcattttgatactaacataaattcgatacacagtttaacaaacgcttacttctctactttagcccctagtattgaattcagcaattcgataactgttgatactccttgatacatagtctggaatgtctgagcattgttgaaatgcattcacttatcaattgtgagcataaaatgttccagaaagttcaaggtctatcaaaacatatttcaatatagcgtgatacctctcgatacttcaattgtagtgtcaagttgtcaatttacatatcgaaattatctgcaatccctttcagtaagttgagctcttgtcaaaataccattcaacaaccgatacctgtcaacaccaacatctccatgtcaccctgtattaaaatgtgaatccgatttaggtaatgttgttgcccatatcaccagagacttttgctctttatcaaattaatttgacaccactagtgtataaaaatctcatcgtccttcagtatttcaagacaaggtgctcttgttgaaaatcattccaatatgccattccctcaattgtgatgtattgaatgagcactgtagtgtcaattgtgatattgaaatgctttattccttcattagttgcttgcaattctcctcctaatcttgctcgctttctttggattaatgtcaaagctgtaaaacatctcatttctgcacaaattctaacttccaacattgaatccaaaggagacactaacacaaatacaggttaaattagttaatttgcatgcatttgtcttgagaaaaaaatcattttagctttaataaaccatacaaattgcacacaaatcagtaagtttgatatttttaatgaagtggtaaactggatcttggccatcattaggctctcaagaagatgaggatctctgtgtgtcatcatcattttgttactataagcctccttcaaaatggagaactctatcatgaactttgacaaaaattcaaattaagttcttcataaggtcgttaccttcttagacaccctaaaaaaaagctagtcaaccctccatggaaggcctctcaactatcctatagagtcgaatggttggattaggcaaattaattacaatttcaatatgatagcaagaattattttcaattaaagctaattatattggacaaccaatatgaattgcctatatgatgaagagcaaatagttaattctatatgaggcctgccatgatggtgaaatgattcgactcatggtagcttagctttaaaggcgtatcaacaaaatttataccttgaatactattactaaagtagccaagctattatagcatagtggttctaggatcgttcactgggaagggttttcgcaaacacaagtgatattcaaattaggaaaataggtgattttcttatggatgttagctttaaaagaagatgtaaatgtttttagaaagatttaaactaatctaagctaacattaaagactaaaatgaaagggtgtaaaaacaagtttctcaaagataggatagctatgctctggctcttatgcaaattggaaatctcaggataggctcctcgcgttggggttgcaactatggtgatgcttgcttcccgaaccggtatggatttagcaaatcaagttttaatcctttaaaatggcaaaatagatggtagtgaatttcatcaatggttattcaccttagacttcctttgaatggctcgtaagagataactaatggtctaaagccaaaagcttaccaaatattggcaactcaaagtcattccaggtgataaactcacctttcaatggccattgaaattggttctaacggattaatgcaaaacttggaattgaaaacctcaccttccaatagctcgtaggagataactaatggatagaaatccaaaagcttatcaagtattggccgttggaagttgtccaaaggaaataaaaaccaaactttgcattaatgaacctttaatgaaaaacgactaccttaccttctgggtgcgagaaatttccatgggattgcatccaagccatcacataacattcatactttgagaaactaaaagttttagccaatcatcctctgaggaaaagccctcagaggctgtttggctactaagaaaatagaaacgggagagctctgtaaatattctaagtgtcaaacgtaatatgtattttatatctatatatcaatatatcaatatttcaatatttgttacaacggatgcaaggggatataaatagagaagtttttccaaccttcctagctaagaaatcttatgattggtggattacaaggagaagaatggaaatttatacaaaaatatccaaaagaaaagatctcgtgtggagtcggcaaaaacagaggaaaattcgcacgttggagttccaatttcgcactttgatttgaggtgtgcaaaattcccacactttggactgaggaattcgcaccttgatttccatcgtgcgaaattatccctcagcttgatgcagttgtcttccgaaggccatatcttcctcatttcagctccaaatcgtacacggtttgaagcgttggattcttgacttcctgagctttgaaatggtatatagcatgtagaaaatagacttcgggaagtgctccaaaagtgccaaagaagactgcagctgctgtcctctttgcttctcttcactttgcttgcttttcctcttttccattgttctttccttgcatactttgaacgactttggcaaagggctatggagctccaaagcttggttcttcatgaatttgagcttccaaaagctttgccataacttgtccaagtagctcttccatcatttggcatgcttgaattgattcataagctgataaaaacatgtttacttgccacaaaatggttaaaaccaattactaaggaccttaatgaattaattgggttaaatgaatatgattactacacaaaggtgcttaaaaccattataattaggtctacaaaatagcactttttggtagtaatcatgaaagccagatgatcactacgaattagggctcattctagtagttatgagttaggacaatgaaatggaggtaaagacaactttttaaattgcaagaacttatgcattgaaatagcccttgagacgtagctcaagtggttaggggttgaggcagggttgtgggaggttctagattcaagttctagtggggccacgagaaatggctctaatcaatcaaaataaaatcaaaagccatgtgaagagcattttatcttggagatctttttgcctttcaccttgttcctgtggcttcagttgggccttccaaagtgtgtttctttgcttgggaggcaatgtgaggaaagatatttaccatcaaccaacttaggccttggggatggttacttataaactgttgggtgtgcacgaggaatcaacaaaccaccttctcatccattgtgattaggatacaagtttatagcctttgtctttctatcctatgttgcatggattagggttacgcttgttgaatgcaagtgtgtgtctaggtgtctaatcctttagaactcaaattttaggatatggggggactcggctaaaaaggattcaaaaaggggatatgggtattgtgatttggcttaataaaagaaaaattaattagaaataaattggaagtgaaaacatcattttttttaaaagctttcatatttttcctctaatcccttttctctcctcttctttttctctaatgtaattattattaagaaagttaaaaaaaaaaaagaatatcaatgaaaaaaattaaatagccacacctaaagtaaaattcctttgtttgtaatctcttttcttgggctaaatcttctatagttgtaggccccttaactttgtttaactttgtggactggttgggttcttattgagggccggtgagtgcttgttcttttttaggtgatgtttgtatactccttgtatgctctgggttgcctttcaagcaccctttatctaatatatctttgtgcgtttacctatcaaaaaaaaaaatagccacacctaaaataaaataggagtatcaacaaggattccataccaacacccatgtcatgttgtatcaacatagtatgttgggtgaaattgaaggatctaggtatcataaatgctgtcttttggagttcattgggtgctaccttcagtggtcaaatttttttcttcgatggcatgttagctttgtgggaaagaaacagaaaaaggcatgaaggtcccctatgctgctttggtatttgtggagagaatggaatttgagaacttttggaggaatagggcagttggactcttaagcaccattcactgaaaactttcttctttagtctgggggagtggaaggggaacctaatgccatttctaattttctttgatagttgggctgtgggataagccttttttgggcctcttattctattttgtttggtttaatgatgtgctgtatattcttcctgtgtcttctggtgtatcttttttttttttttttgataactgtgcatctttcttttctttgtttttgtttttttttttttgtaattctgttagatgcttcttcttaatatatttccttttatttccccaccagaaatatgataaagcaacagatagaaaagccaacctgtatgaacaaaatttgcttttcatggggtatggtcaagtaggggaaaagctgatgcattgaaaccattcaatccatcaaggttcataaatggggtatttgtagccaatttggctatcatttgtaatcttgttaaaacaaattgggatatagaagttctttgtttgatggttagggaatgtttgggaatcatatggatttaattggagaaaagatctctgaagaggtgctaaacttgaacctatgctatgcttgtttttgaagttttaatgatgtttggcccaatcccactgttgccctcacccattttttgtgtgctacctttgaccacttgattttctggccaaatttggaagtggtctaacctttttgctcaggacatgcttaatgacctcaattaattttggtctttcccaatggcttcaaaacttgcatgcccatcaataattggtaaagaaggatggaatgattgtcataactgaagtctggacaatatagctaccatagatctacgggagtcacctgaagcaagagctttatctaaatgtcttgtattttaagaatattccttttgcttggttgtatcaactggttttgaagtgcaaactgcaattacactgaactcttgattctctaatgaagtcaatttatacaattcccatcctgtatcttgtttttcagtgtgtgccattgcctaggcttctaatagtggctgttcatattttatcatctatatttctagaatatatttttgataatataaatttatgctttttgctgaacaatacgaaagaaatgatgactttatatttcataagggattggttgaaatcactgtggtatgattcccactgtctttttttcccttttctttccgagttgggggtggggccatggcttgaagtcatcaaagtggtcaggcttaattaattaatttaggtgttgtttggatatgcttcatgttttctaatttatttatttatttttaattcatatggactttcccttgaaaggatagtgatttctaaaagctatttaaacaaatcgaggtagtaaaaattttttactaccttgaattttaatattttttaaagtaacttttaagaacatgaggtaagtccatactttgtgtaaaagtttttaagtttttatacagaggttactaccactttctatttttaaaaacaaaaaataggaagttttaccaaacgagactttaataatttgttttcttgtaggatttgttagatattgcaagaattacaaccatttaagctgcttttgataaattccaaaccaaatccaaaagaaaagcaggtgtgaccggcaaaattttcccagctctattctgtcttctctctttaacatgaggaattgaactgattgttgttttgtgactctgtttattatgcctttagttttttgtttatatttaggacgtcatagaattgctttagaaatatgttatacgtttcttttcctcatgaatatgttgatgtaactgaacttgtatgtggcagcgaaatcacctctgaaggtcggagaatcacgaaat

SEQ ID NO: 10971 - DNA, 5691 bp, Vitis vinifera
  Intron number 1 from transcript GSVIVT01018052001 (locus G SVIVG01018052001) derived from phytozome v7.0 (chr-ID chr5 ; pos 5824571 to 5830261)
ttgactaagctctctgtgtgtcacttctccataaggtgagtatgtatgtttagttttagcaattatttgtgttattcatttttaaagcagtttttgatagcaaattggggctcatttaaaattcataagtctggatttggaaggcttgttgacgtcgtgtaattgtgtttatggggtttaaatccgatcaagccaccaacaaattgaattataattagccaagtttaaacctagccaagcttgagctgtttggattactcagcactgtatagagttgtttgttcggttcataatatgggtgggagaatggagttgctgcattgtcaaccaatcttattgattagcttgatggacacttccttctcgtactatgcacttgcttaactcaaatatggaactttggtttaggtcatgtggctttgcaaggtctacggtttcctaattactttgatcaaatctcaggatgagtcctagtccttatttagtgaaactgtgaattgacattagtactgttctttttggtatcttgagcaattgggaaaagctggaaatttaagttccacaaattgtagggaaaaaggttcacttagttcgttctaacttctaagctataactttccatggtttttggtgtattttttggcaaaacacacatggtacgttgcattataattaatacatcctttctaggatgaaatattaaaagacctaaatcatattaagtgaactatggttggtgatgatgagtttctgagagagaaagagattagcgaaaattttatattctgggacatgtttaagtggctttgtatggtcccttgtatcctgattccttcacttgatcagttctcaagttggatcgtggttcttgttggctgaggctatgaatccacattagcaatctctgttttgtatcatggatgttggtaatgtaagttctacaaattgttgaaaaaaatttgtataagttcattaggttactatctaatttgtaattttctatgtttttttggtgcatttgggtttggaaagaatatgtagaagtcctgttataattaaacgaactggttggggcaaattacaaaaatataaaatttattaaaagccgtaaaacatgttaaaagtgaaggtcaaagaattttagtaggagaggaacaaaattagggaaagtgaggaagttattttagcagtggctaaattaggagattcctagaaactaattttgtttttgataggtgaataagagcttgtattagaaacgcctagaagtggtgaaaacagtacaaaggagattcctagaaactaataactatactagggttagaaattacaagttttttgaagacttgggataatgaaggtggattaaattattgaaaaataaaagcaggaaaaactatgggctttgatgcaattcccatttagggttgaaaatgaatggatgataacagtgtggcatggttaatttgtttaatgagacccttttttttttttgataggtaagtgtaacaagatcctatgtacatggaagatgctaatgaatgagaacactatgattcccctatataaataaaaggggaagaagattgagtgtagaggggaagaagagacccaagtctcacacctattgtttgtagatgatacccttcttttttgcgagtataatgtaaattagttgaaatattagaagtggattgtcacttgctttgaattgatgtcaggtttgaaaataaattagagcgacttctctttttgggtgcaaagtagggaaacttcctacttcttatctacgctcaccccttaaggcccctcacaagtagtgtggtgtgtgggattcaatcgaggagagatttaagaggaatttggatgcttagaaaaaatagtacatgttcaaaggaggaagacttgtccttatcaagaacactatcaaacctattggtgttaggtttcaaactaagtttacaaaaaactgaaattattccaatgggtgagatagaggatgtaaatagagtgacttctcttttttggtgcaaagtagggaaacttcctactttttatccaggcttatcccttgggacccttcacaagtagtgtgttgtgtgggattcaatcaaggagagatttaaggggaatttggttgcttagaaaaaacaataccttttcaaaggaggaagacttgtccgtatcaagaacactctatcaaaccttcctaatattttatgtccctctttgcaatgtttagaaaagtaaggttcagattagagagatttcaaagggactttttgtggggagatacgggaagaaggagaaagattcacttgaccgtatgtgtgtaaggataagaagcatggaggtctgggattaagaaggttggagggtcttaatcaagcctttctaggcaaatggttatggagattttcttttgaatgagagagattgcagaggaatagcatttttggaaaattcgaagagatgaagggggttggactactagaggggtgagggattcctttgggatgagcctttggaaagacattagaaaagggtgggaagagtttagtgtcagaatctctatccaaataggaaatagttgatgtacaagattctggtaaggcaattgggcgggggaatgtaagttgaaagccgtttaccttacacttttcaagatagcatcccacaaaaatgctacagttgtagatttgtggggcaaagaagggggcggagatggacattggaatgtttaatttagaagattcttccaagattaggatatagaggagatgatttatttcttagagcttattcactagttaaaagtgcaaagagaggacattttaatttggaaagatgataggaggggacattttagtcttaagtcatattacaattccctaagggttgagaataatttagtatttctaggcaaagagatccaggggatcttgtactcatcttagaacttggttttttacttgggaaactgtttggaggaaggtcttaaccgtagatactttaatgaagaggaggtgacaaatgatcaacagatgcaactgttgtaaagatagtgaagaattagttgattgcattttgattcattatgttaagagaagagagctatgaatgtttttgttagcaatctttggcttggtttgggtgtgtccgaccttagtgaggaatctcctcctagaatggaaagttaagaggctagataagaagaaaagagctttcatatcaaagattaaatgattttttcatttgattgctttcaaagtggttctaggattctttggagttggagcactcctttatttttattttcttagttgctctatattgtggttagctataccctgtttttgtaggctaactttgtctttgtttgttgctttgtttgggctgttctgtgtatactacctgtatacgtagggtgcaccccctctttttggtgcttcttaatccatgattctgttgtccatcaaaaaagaaactatggtgttgttatgcttacgagttatatgatgaaatttggtgaagagtagatggacaaggatttagagatgaaataatggtatcagaaaattaatttggttttatgctaggaagatttaccatggtagttatttattttaggcagttaatgaaaacataggtgggggggtgctaataggagctgaaaatcacaaaacctaagcctcctatcaaaataaaacatgggtagaagcagtagaaagcaatatgattgctaaaggatgtaaccgatgtattgaactaggttgagctggaacagaaaaaaggggctcatttagcctaggaagcagatgggataatggctatgttgagctgtggagctggactttgcacaaaccccctaagtatttgctctgacaaaacatggtggggtgtgggagcaagatatgtttatggtcacagctacaaggttaggtgggtgtagtggccacatagaagaggagaccggcctggaaacaacagtttctgagagctcccaatgtaacaacctgagatcctgtttcaagggtggtgtgagctatcctatcataaaaaaaaagggtggtgtgagctagagaaatcatcaattacatacatttctgccacattattttgcacttttgttgctttgaagatcatcgtctagttttgctaaagcgggttcaatacccttactcctcgaatttttaagaaagtagggcagtcattgaagctgtatgaacatgaaattagggaaaataaagacaaaaggaggaaaatggagaaagaattcatatgtttttttgcaatttttaagttgtcagataaccataaggtttgctggaaatagaacaagttccatatggttgctggtgttgtatctaggtttttatagattctggcagataggtttcttctataacataagagatacgcgcataggtgtttattacatttttagtaagtgaattatttttatgaaaattgcctcggaaccccatcattggtattatttgtcattatcattacacattagtattatttatattaaactcttatcatataaatggctgttaaacaatcctttatttttcaaaatttctttttaatatatatgcacagacacataattcaaaatatgtgtttttccccccttttttggaggttggggttgttgaggagtgaggttggccattgtgggaatcttctcatcctcactcaatctttttgccacctgagcaggcttcaggagcaccttaattttacctttgatagttgaatgcatatgccatatccttttttttttttgttaagtatcaatgcctatgtcatgttgtggtatcctaaatttggcgagtcaacaaatttgccacttatattgcactcacactcaacacccatacagtactccatataggttaataactgcttataaactgcaaaatgcttatttttaaactatgtcacatgcttactttctggtgcttccattataatatttgactcatttgcttatcaaacctcctcccctccccccccccccccccccaaaaaataaataaataaataaataaaaaaataaagaaagacaaaaacaaaaaaaaaaactatgtttgtggctgttcagtgcaggtgtatgtctaggtatctaatccttcatgtctcaaatttagcttatggggacttggatgaaaaatgctcttgaatggtatttgaatatgacataataaagaaaaaaaatcaattcaaagtcaattagaggccaaaactaacaaatccttgattaaaaaaagactctactatcttctttttatccctttttttttttttttaaataggttgagatccaaagcaaaatgggtacccttttcatgttgtattgacacagatatgtaaggtgaagttgaaaagtcctagtatcacaacttttgaatatttaaatttgtcaaggcacttgcattaaatttttctgtaaattcatgctcacaaataatatatttaaaggacacttgatgaatgcagaatagaatatgctttttggaagacccaaaaaaaaaaaagaaaaggaaaaactgttacttgtaaatgatattctctaaagcttgctgaattatgttctcaaatcattggagggccttctggcaattattgcatttattttcttctgtagataccttcccccagaaattggttgccttaataatt

SEQ ID NO: 10972 - DNA, 1652 bp, Vitis vinifera
  Intron number 1 from transcript GSVIVT01011907001 (locus G SVIVG01011907001) derived from phytozome v7.0 (chr-ID chr1 ; pos 3090969 to 3092620 reverse strand)
ctcacttcgaaatccaagtgaaacctgaagatacagtctgtttttctcatcgcccttctttatttttctctctgctagggtttttgcgattttcattccccaattttttatttttgattaggggttattcatatttttgtagttcaattaggtttcagattgtttaactgtcctttgatttacaattactctttgtgattttttttttcttttatggttgcgatgacggtacttgaattgaattgcaatgttttgttttgtgaattcaacgtaattggatgctatgattggggttttgaagtttcacttttcgcattttgtattgtgatgaagtgatttgcctgtagtttgaatgaattgtcgaaattgcgattagttaatgtctctcattgcggactagtttggatagagcaagtccttggtattaaaaattttgctttcaaggtgaattatgtgaattggagattcatttgtgttggtgtttgatttagtagcaggagtacatgagttgaactcctcagtttgatgggtattcccaaattcccgctgatgaagtttgaaataccacattactctgtattatatccacttgtggtgttccgacagctgcactggattgcctcagataacatgagtaataagtttaatatcatataattgctgcgcacagcagatttgttggattacatgatacacgtgacaatgctttacaggtttctgggtagtgtgctttttaaataactgtttgtcgacagctatgtccaattacattgacaatgcacgtagctacaacttttaaacatcaatatcggggtgttttccttacacttacaacatattatcatgattggataaatattaactgctacacattaattttcatggaatgatttgtatagtttccattatatctatgcatcttatatgataattgttttatactaaggttaagtaatgtgattttgtgatttctctaggaaatgttcagctttctagaacaataacttgtctgtcttctaatttggacccgtaaatggagtattaatgtgataatctaactaacagtggataacacccggtttgcatacttcttccactttcatcttgaatgcctgattattccatcgtgccctatagttatactcctaacgcatctgccagattttgttgctcatgtgtttggtgttgctaaatcggttaagtttctctttccatattattaaattcaaaatttatagcatatgatactcatttcttgcttgaggcatgacagtgacaaatgatctctctcccattctctgtgattaaaactgtgtatttaagttaatttagtggttatcctcttttaacaaaatgcatttgcattttttgtcaaacttgtcgaatactgttgctgaagtatatgtgttgataccaatcatactgttacatatgtattgaaatctcatggagcaagcagccacattaatccttttctgttccctttctggttagcataaacatgcatgttattctcaaggtcatttcatgcatccaacaattttttgccattcacattcacaaatatgtaactgtagtttatttcatggtgtacctgggttttgcacatcttttatttattgaaattagtgattgttttattcaggttgctg

SEQ ID NO: 10973 - DNA, 17114 bp, Vitis vinifera
  Intron number 4 from transcript GSVIVT01038695001 (locus G SVIVG01038695001) derived from phytozome v7.0 (chr-ID chr1 6; pos 20914602 to 20931715)
aaggtatcgataggtgataccaaactcgtgggtgaaccctgagcacactccatgagtattgatggagtaatcggtaacagatgccaagtgaaagggtgcaaccttttacccagtctattcaggatgttgtgatctttgattttttcgtctcaggtataaatttagttcttcttatggtatgtgaactcatgattagtgcaatttcaaacattttacttttcctgcaattgtgttacctttggttttaggcatgtataccttgttggaaaatgtttcaaattctgttgatatatgtttttgttcctaattagcatatgtttatatattttggtaaagaataatattgtagagaatattttttatattgatatgtcattatcatattagattcccttatataataaaaaaaatttatcacaagtgtcactataaatattctaagttataagggggaaaaatcatgagatggaaatgggtttatgaagattataaatggtagatagaaatgtgaaaaagaatgggaaacacccgatagagtagcgactcataattcaaggtgtagatacaaaaagtgaaataggggatgttttagggcttaatagttatgtctagtttgtcttttgtaatattctctatagtataatggaatgatttttttattttatggatgtagacgtggctagtcaaaccttgcatgttaaaatctcatgtacatttgtgtatgaattgtttatcttggtattcttctattaacatattgtatgcattaaagcctcaattgtcataacaaagtggtattagagcttatgttcttaagcctagaatgacaacaagatttaaggttaagaggtttgatgcaaaaaacgattttagtttatactgcattaagatacatgccttgttggttcaataaggatggtccaaagtgcttaaaggtagaaatgttttattaacaataatatatgatgaagagactaaggaacttgtggagaaaatgcataatgttattctattatgtttgggtactaaggtacttagaaagttccagaagatgatacaattgtcaagttatagttaaagttagaaagtctatatatgactaagtctcttataattcacttatatttaaagaagcggttgttcattccccagatgaagtacatccatcaaagaccacatttatgaattttaattatagatttgaggaatagtgatgttagaattgataatgaaaactaagccataattttaaattgttccctaccaaatttttgtgcacactttctggatatcatgatgtatggtgaaaatactctctccatagaggatattaaggcaacctggaacttagagaagttaaagaaaagggtctttgagagtgaagaaaaaagcttaggtgaaggtttggtggctaaaggagaatggagaagaaaaatattagcaaaaaagttcgatttaggtttaaatcgaagttcaagagaaataaaaaggtactataagagaaattgtctagaacattaaaaaaaaacaaaaaaacaaaaagccggctatgattttggttatgcaataattgtagatgaaaatttctatgactttttgcaagtagaaaacaaacaaatttttttcaaaattattttctttctttgagaatagaaaacgattttcggaaatcaaaatgaaaatcccaccatttttttcaaagataaaatcatacaaaattttaaaaatatttttgccctaattttaatttggactataattgtaatataaaaatagataaacataattgtcataaaataacatatattaagtataaccataaaatacataaaaattattttcttataatttttatcaaataattaaaatcaatataaatataaaaggaaatacactattggctagcgttgacgtgcctatgtgaaccaaaattagtaatttaaaaaaattaaatattaataaatggtacagaatgagacgtgtacgagaaattctcctatactaataaaaataaatttaaataataaaggattaaaaggattggcccttgacccttcccgaacccaccacttatcatctttccgtgagaaatatgccacaaagatgaatgagataaggtttgaattgaagtggggtgacccttgacccatcccgaacccaccacctgttatcattcctaactgagaaatgtggaacaaagatgaatgagataagatttgaatcgaagtggggtgtatgtgcagagatttttttgaaatataaacacataaagagagttttctgaaacataaccacatggagagaggggcaattaaagatgccactgagcatgacttactaccattgagtttgtaaaaagggggtttgccagaagttatgtatgagtagagaatttggggaccataccataaacttactaccattgaaaggtaaacgtgtggaccgtggaccttgatgccatccactttatcattttgtatcttaaatttttttactatatgttttatacatagtcttaataaaaatatcagtataatactgaattggcaatgctttaacttgataaaaattcaaaagagaaaataagactccttttgataaatgtttttaaaaatcatttttgataatagaatttaaaaaaatttctttaatattttggagaataaaaatctatttagaaacctaaaatgtatttaatatgtttttaatattttaaaacatattttaaaataatttttatatatactactttattttttaatcattctatatatttgtataattattttttaaaacattcttaaaaaaatgaatgaaaacaactaaaagtattatcgacactctattttctatttttaagaatataaattagaaaacaactttttgattatcaaatgtgtatatacacacacaaagtttataactttataaataccaataaagataataaataattataaaataaataaataaaaagacaacttcatacaatttaatataagtgtatctctattacaaaaaggcaacttcatactgggtaatataagtgtatctgttttacaaacttgaatttacactcggtgctcatagtcttcatttgacgatctatatacagaaaactatatcttcaactaagtctttaagtcaaacttcaactatcacatttaaatatggatataggacttggttctaaacagattaatgctattaatggttatacgttgatattttgataatcatgaaagttaatatgcaataactcaatctcatagttacaaccttataacaattctcgtataagtgtgtcctctaatgatacatgtggcctataccttgtacaattttctaccttaggctcattcaagtaaaaactcttcctagcatcacatctatatcattgccatcataagactctccccacaaaattagtactacttgcaagttatggcctcaggattgttccatagcattttggaaagaaaatttcttgttacaattaagggaagcactacaagaaagcgaagttattagagtgatgtggataaacttattaaagatattagcttaaataatccaaaaaaagaagtgaaaatagtttttcaatattcttttgtgatttgatggacatattttatataggaaaaggttcattatcacaaaatcatcacaagacactcccaccatggaaaattcatcatgaaatattatctcattaagaaaatatcatgaattttaaagccgaacttctattactataaatctgactaaaaattgggaaaaagaaaaacacatattttgctctggctgcctttggtttatttacagtatgagcattgctagatgtaaggcatgccttcccctttgctatcagccctctcccttccttcttggattgcctccttcaagaggaggttcttgattgagtgcagtttgttgactccatctcccatctccattcggtcccctggagattcaatggaacatgtgacgccaattctcaatactgagaccatgtactcctccattttgcggtctctttttcatctcctaaaaccaaatgcggatccatgacttcccttactcgctcaggtaaagatgacttcacaaaatcatgaagagtaaggccatcttagaagatgtcatccgttggccttcttcctgtaaacatctccagcaatagaattccataactgtacacatctccctctgcagaaacattaccagtaacaccatattctgcaaaatagttagagcaagatttaataattcttctttgcaggttgtttttttaaagttaaaaaggttcaatgaaactttttgtttcagtgaatactggtgattcaggaaggcaacatgagaggatttggaggtttgaactattaatgaatctataggcagttaaggcattgttgaatgggttccttgctccttcaacaccatgagaagatttggaggtttgaactactctaatttaaaatagtttttgctttcatatgtattctgactaaaaatttccaacagctcttttagcattgatttctaagcaattttctacaagtatttaaatagtgggactagttcatcaaaagacctaaatacttttgaaattggaaaaatgacctctcttaatcattctttaaaaaaatgttctttgttttgtcaaaaatgtcatttccctcccattttttacctaactctctctataagattatgctctctcaaaggataaagatcagttttgtttttttttgtaatttcatttaaacttctattctacttgacttctgggtgtgtaattgggtttgctcttggacaatggtatacactagatataattcaaccaagggaacaatgtgcaagacccgcttatgtctatggcattaattttctaagaaatttgctacaattatttagataaagagacttgttcatcaattatgtttcatctagaatatgtttgaaatattatgataaagaatgagattggaaaactcatttactttcccatttattaatgtgtttggaatactaatctgaaattagaataggaataaaaaaaaatcattttaatgggaactaatttacaatttttataagaattttgattactttgtttcatatgctattgtaattcacctaaattttcattcttattcttgtgtatcaaatacaccttaaaataaaaaaaattaaaaaaaagaaaaaaaaaaccttttcttattgggatgaaaagaaaagaataaacaagaaaatagtaagcaaattcatacaagtcttcacggatgaagaaattaagagccatacctatcgttttaagtagtaaacctcataaaataaaggaagaccatggcatggttcaataatgcaagagattgttacaaatgcatgttcatctccatgatctacaaaatatcaaagaacagatttttatttttattttttctctcttgagcaacacaaaaacagaaacatttatcctataagaatgctcttaggctttgtgaggatcatggaaaatagggagaaaagactaggaaagaagggattggacaaagaagctaaaactcaataaagaactctcatttgaaggctttgaaaggtctcctttggattaaaagcatttgataaagccaggttttgatcctcttcttttttggtgttatgatatctgcagaagtttgtgggtgagcctgtaagtaaagatttttttccaatatttcatacctaaacatgcacttaaagaaaattggataactgaatctgtgtggctcgggttttgttcttgattacacacagaaaccaagctaaagtagagttatataactagtttttaaatgtgacatcctaaaactcctataagaaaatggtgaattctgcctcggcatgcatcttgaaggtattttaggttgccttgaggatcagcattaattgacaagattttctagataaattaactgctgtatttatcaaagggtagattagatatgaggattcatttactgtttctcattgcaggacaaaaaatcatcaccgcttggcagttgctgcgagcgtggttcaaggagcatacaatttagaatatgaccgccaggaatcccaacatccccgagttcagtcttcccattggtggcacttcttgttaaagttatcaacatcagcatgtgactgagaggatgtattgaacaagtcaagtttgtttttgtgtcaaaaatatgcctctgtttagtttttcaatatattaggaattgtccgagtcttagggaggttgttgcagcacgtttagagtaactggttatctttctattcctattttttagtatttctatttctgttgatggttttgcctataaaaggcttgtatcaggtgaagtttaaatcatcaccatattaataaaattattttctttcctcctctgtgtgtctcttttataaagtgggttcaacatttggtatcagagccaggttgaagaggcatttcagagagtgtttgagagtcaaacacgtgaggaaaagagagagtgaaatgggtgatcttcaagtcattggcggaataaaaaagctcaacaaccaaaattacaatacttggtcaacatgcatgatgtcgtacatgcaaggccaagacttgtgggaggttgtgaacggaagcgaaattactcaaccaaaggttgaggatgcgaatggtatactgcgaaaatggaagataaaagcgggcaaagcgatgtttgctttgaagacaacgatcgaagaagatgtgctagagcatattcgagatgccaaaaccccttacgaggcttggaatacgttcaccaagctgttctcaaagaagaatgacacaaggctccaacttctagagagcgagttgttttcggtagcacagcgtgacttgacaatcgctcaatactttcacaaggtgaagacgttatgccgggaaatttctgagttggatctagaagccccaatcggtgaaaccaggatgaagagaataatcatccatggtttgagaccagaatttagaggttttgttgctgctatacaaggatggcaaaatcaaccatcacttgttgagtttgagaatttgctagctggtcaagaagccttggctaaacaaatgggaggagtttcactcaagggtgaagaggaagcgctttatgcccacaaaggcgggtggaattcccagcagcacaccgtcagaagaactaaaaagaatgaggacaaggcaaagtgtagtcaaggtgaaaggagcgctcgtgttgagggagattcgaagaatcctggcaccagaaaaaaatttgaagggaagtgctacaattgctgaaagaagggtcacatggcaaaagattgttggtcgaaaaaagggcttgtggaaagtaatgctactacttccaaaagcgaagatgagtgggacgctcaggcattttttgctgcaataggagaatcagcttttatagcaacaacgtctgaacaaattgattatgagaaggattggatcattgactcaggctgctcaaatcatatgacgggtgataaagaaaagttgcaggatttatcagagtacaagggaagacatatggtagtcacagcgaacaattcaaaactaccaatagctcacattggtaatacgatagtctctttccaatataatactaatgatgtgtcgcttcaaaatgtctatcacgtcccaggtatgaagaaaaatcttctctcggtagcacaattaacgtcttcaggccattctgttctatttggccctcaagatgtgaaagtttatcatgaccttgaggttatggaagagccggtgataaagggacggagactagagtcagtctatgtgatgtctgcagaaactgcatatgtagacaagaccagaaagaacgagacagctgatttatggcatatgcgattaagtcacgttagttattccaaactaactgtgatgatgaaaaaatcaatgctgaagggacttccacaacttgaagtgagaaaagatacaatctgcgcaagatgtcagtacggcaaagcgcatcagttgccgtatgaagagtcaaaatggaaagcaaaggggccattagagctaattcactctgatgtgtttggacctgttaagcaagcctctcttagtgggatgaaatacatggtgacctttattgatgatttttccaggtacgtgtgggtgtactttatgaaagaaaaatctgaaactttctcaaagtttaaagaattcaaggaaatgaaggaagcagaggttgataaaagaatccgttgtttgcgtactgacaatggaggagagtatacctcagatgagtttttttacttcctccgagaatgtcgagtacgccatcagttcacatgtgccaacactccgcagcaaaacggtgtagcagaaagaaagaacaggcacctagcagaaatctgtagaagtatgcttcatgcaaagaatgttccaggacggttttgggcagaagcaatgaagactgcagctttcgtaatcaataggcttcctcaacaaaggttaaatttttcatcaccctttgaaaaattgtggaacataaagcctacagttagttatttccgagttttcggatgtgtttgctatgtctttgtacctaatcatctacgcagcaagatggacaagaaggctgttaggtgtgtcttagtaggatacgatagtcaacgaaaatgatggagatgttgcgatcctacaactggaaagtgttacacatcccggaatgtggtgtttgatgaatcatcttcatggtggtcctcagaaaaggaaatattaccagattcagatgtttttaaggatgagttgcaatctgctcgaatccaacttagcttaggtgaagctgaaaatgcagccgatggtgatatcggagatgacgaaactcaaagtccttggcaaactggtgtgcatggacaaccaagcgaagaaggtgagcctagtgaaacagaagcaccaattccacttagaagatcaataagaaccaagaagccaaatcccaaatatgccaatgttgccatagtagaagatgcaaatgcaaaagaaccaaagacatttgcagaagcatttcagaattcagactggagtaaagctatgcaagaggaaattgcagcattaaaacgaaatcagacttgggagctcgtgccaaagccaagagatgtagagcctttttcctgcaaatgggtttataagataaaacgtcgcacagatggatcaatagaaaggcacaaggctcatttggtagctcgaggattctctcaacaatatggactagactatgatgaacgtttagtccagttgcaaaacttacaactgtacgagtcttacttgcacttgcagctaacaaagattgggacttgtggcagatggatgtgaagaatgcattcttgcatggagatttggatcgagagatctatatgaatcaaccgatgggctttcagagtcaaggtcatcctgaatatgtatgtaagctgcggaaggcactctacggattgaaacaagcacccagagcatggtatggtaagattgttgaatttctaactcaaagtgggtattcagtaacacctgcagattctagcttgtttgtcaaagttaatggaggaaagttagctatcgtacttgtatacgtagatgatctaatcatcactggagatgatgttgaagaaattttccgaacaaaggagaacttgtcagttcgtttcgagatgaaagaacttggacaacttaagcactttcttgggctagaggtggatcgtacaaacgaagggatatttctctgtcaacaaaaatatgccaaagatttgttgaaaaagttcgggatgctcgaatgtaagccgatctcaacaccaatggaaccaaatgccaagatgtgtgaacacgaaggcaaagacttgaaagatgcaacaatgtatcgacaattggtgggtagtttgctttacttaactttaactagacccgatatctcttatgcagttggtgtgatgagtcgatacatgcaaaatccaaagaagcctcatttggaagcagttcgacgaattttgagacatgtgaagggtacaattgattatggtctgttgtataagaaaggtgaagattgcaagctagttggctactgtgatgctgattatgcaggagatcacgacacccgcagatcaactaccggatatgtgtttatgcttggatcaggagcaatttcttggtgtagcaagagacaaccgacagtatctctgtcaacaacggaggcagagtaccgagcagcagcaatggcagctcaagaaagtacgtggcttatacggctgatgaatgatctacatcaactagtggactatgcagttccattgtactgtgacaaccagtcgacagttcgtttggcagagaatccagtctttcatgcaagaacaaaacatgtggaagtgcattatcattttattagggaaaagatcctggaagaagaggttgagctgaagcagattaagtcaaaagaccaagttgcagacttattcacaaaaggtttgagtggcagcaagtttgaaagcttttgtcatcagctcggtatggtaaagattttggaagctgatgttgagggagagtgttaaagttatcaacatcagcatgtgactgagaggatgtattgaacaagtcaagtttgtttttgtgtcaaaaatatgcctctgtttagtttttcaatatattaggaattgtccgagtcttagggaggttgttgcaacacgtttagagtaactggttatctttctattcctattttttagtatttctatttctgttgatggttttgcctataaaaggcttgtatcaggtgaagtttaaatcatcaccatattaataaaattattttctttcctcctctgtgtgtctcttttataaagtgggttcaacacttctttcattttgagttaaaacgtaagctcaaagatgatgaagattcatccatctacagtgtcgtttatgaaatgaagagcatataccctaaccatttgccagaacgtgccccaaagtacattattgcctttcgtggcacaatccccaaaccgaggagcaccgtgaggcaggacctgaagttgaatatcaaggtcttaactgatgaacttcacatggacaagtcccgctttaaacacgtgctggaagctgtcaaaaaggttgttcaagaagctgggtctgcaaatatttggttagcagggcattccctggggtcagccattgcgatgctggttggaaaatccatggcccagaagggtaagtatctcgaaactttctttttcaatccacctttcttgaggtgagtatcactataaatattttagatcataggggggtggggagtcatgagatgaaaatgggtttatgaagattatatgatagaaatgtgaagaagaatggaagatacccgacagagaagagactcatagttcaaggtgtagacacaaaaagtgaaacataggatgtttcaaggcttaataattatatatttagtttatattctttgtaatattctctatagtataatataatgatatctctcatttgtggatgtagacatggctagtcaaaccatgcatgttaaaatctcacatacatttgtgtataaattgtttatctttgtattcctccattaacgtacatatttgcattaaatccttggttgtcataataaagtggtattagagcttatgttcttagacctagactcacaacacgatttaaggttgagaagtttgatagaaaaaatgattttagtttatgccgcattaagatacgtgattcgtccctagcagtggcagtggcaatggcaccatttgattcggggttcgatccccggcaacggcgccatttgattcgtgcccaattggtgtctcagctgatttgtgtccagctggtgctccttgattgagggagtaatcaacaaaatttataacctattacaccatttactagagtagcaaagacaaagctactatagcatagtggctctaggatcgttcactgggatgggttttcacttcacaattgatattaattcaaagatgaattggtgccttttcatttcaaggttagctttaaaagaaaacataaagatgtttgaaagaaaagaatttggttttaaactaaccaaaagtagtaactgattttacttataaagaaaagtgtttcttggagttcagatcactaggctcgttcctcatacaaaatggagagttccggtcacttgtttattttcctcgcattagagaattaacatatagttccttctccaaccggtgttgtacagatgcttcccattaatgggttcaaacactaaatccctctcactgatgcaccttgcaatggctcatacctctcacctagcacttgccattcaagatgatctttaaccttggacttcccgtcaaaagctcgcaagagataactaatggatgtctccttggagtccaaaagcttaccaagtgttggctattctagaaaatcctaccttcaagtcacctcccaaaggctcgcaaggggtaaactagtgcatctccatggacggagatcacttgccttaccaagtgttggcccaggtgatttaaaggcattttaagttaactaaaaagataaaaaccattaacgggttacactttctcttcattaaaaactaaaacaacaaaactttcaaattatgcatgtggaaacttacccggctttcctcactccaagagacaaaaggcttagcctctcatcctctgaggaaaaatcctcagagtttggttggctagaaaatgaaaatgaaatgaaaaatgaaagagaaggaaaaacagagcaaggctctgtatattctatatatgatcaatattacggattacatatatggtcctcctctctcttttacagtggatgcaagggaatatatatagaggagtttttccaaccttcctagctaagaaatcttgtggttggtggcttacaaggagaagaatggaaatttatacaaaaatatctgaagaaaaatatccaaaagagtcggtgcacaaatatcaggaagcactaaggacatttcgcaggtgaaaatggtgtctgcgagatttcgcagacactcaagagggctgcgaaatattttcgcagacactcaagagggctgcgaaatattttcgcaacaacaagttaaactcgcagggctgcgaaattggcttccaccttgaggttctcagcgttccagcttgcggcatgtatcgggtagcttcaggaggaattccatagcactgtacaaaaaggctgcgaaattctcgcaacaaaaggctgatttcgcaacactttggagtgatctgcttgcaatggctgtaactccttcgtttcaactccgaatcgttcaccgtttgaagcattggattcttgacttcctgagctttgaaatggtatatagaatgtagaaaatggacttcgggaagtgctccaaaagtgcgcatgaagactgcagctgcttgtcctctgttttcttcactctgtttttcctctctccttgcttctctccttgcatactttgaacgactttggcaaagggctatggagctccaaagcttggttcttcatgaatttgagctcttcattgctttgccatgaactatatacaattctccctcattcttggattgttttggtgatcaaattactaacaaaaacaccaaaacttacacaatttgattagaaatgattgcaagggtccttaacatgttaattgggttaaaaggcaataactactactcaaaagtgtttaaaagagttaattacaagctatcaaatagcactttttgagtagtaatcaatacgtgtcttgttagttcaacaaggattgtccaaagtgctaaaaggtagagaggttttattaataacaaaatcttatgaacagaataatgaacttatggagaaaatgaacaatattattctattatcttttggtaatgaggtacttagaatgttatagaagatgatacaattgtcaagttatagtagaagttagaaagtctatatatgactagtttcttattattcacttatatttgaagaaacaattgttcactctccatatgaaagaaggtacatccatcaaagacgacatttatgaattttaattatagatttgaggaatactaatattagaattgatgatgaaaactaagccataatttaaattgttctcttccaaattcttatgagtactttgtggatatcatgatgtatggtgaaaatgctatctccatagagcatgttaaggcagcccagaacttagagaagttaaagaaaagggcctttgagagtggagaaaaaggcttagatgaaggtttggtggctaaaggagaatagagaagaaaaatattggccaaaattttttatttaaatctaaatcgaagttcaagaaataacgagtgtttcaataacaacaagaaagagcactatatgagaaattgtccaaaacataaaagaaaaggaaaagagaaagcttgtaattttggctatgcaacaataattgtagaagaaaatttggatattgcatatgacattttagttatggtttctgactcaagtgaagagtggatccttaactcaagttgctcccatcatatgcctcgcaatagtgatcagtttggtgcctacaaatgtattggtggtgaaaagatttttatgggaaactacatagcctataaggctgttgggatagacacaatttatatttagatgcatggtggctttgtaaggacattaattcaagcaaggcattttccaaagtcaaataaaattttgatttctctagggatgcttgactctaatagatacacatataaatccaaaagtggagttactagaatctcaaagggtgcacttgttgtgatgaaatgacaaaaaaattaatggtctctatacattgtaggatagcacgattacaagtacagtggcaattttaacctctaaattaattttaatgactactacataatggtatatgcgacttaggcatatgaaaaagaggggttgacaattttgagaaaacagggtttgcttaatggacaaaaaatgggaggatttagatctttgtgagcactatttgtttaggaaacaaggaaatttggttttatgccctggtattggggatagtaatatcaaatcaacccaatggttatgcccgatgtaaggatttgttctaacaaaatggctatgccttggtatgaggatttaaccatgacaaaatgattatgtcctaatgtgctccaataactcccaatcaattgttgtgctccatggggacaaatttacaatctataaactcaattaaccaatctcaataatcatcaacatggaggctatgaagcacgatgtatgatgcatggcttcacaatggtcttaagacttaggataaagtgttaactaaggataaggagaaaagaaaataacataaactaggcttaaaaccccaataagtgaccttatgcctcttacgtatacataatgtgtaaaagataagcaaactctaaggtcatagaatacacaaacactctctaatacatttcatgattttattttattttctctttgcatcttttttttttttcttttcctttctttcttttgtttttcttttatatcacatcactaaatcaagaaaataaagcatggaaacttaacataaaatggtactactagtatgacaaaataggcgaagcatatcaatctaaaataaaaatgtctctcccaaccatgataaggaaatactaaaatatgaacaaaccatggagtccacaaccaaggaggttttatcgatatattagtacatataaagaagcccatcaatccttaaggtacaaaaataagtgaattaaggtgatgaaagataagtgatgcgaaaaggcaaaaaggcctaattcactaacaaggggcaactcaaaatgtagggtgtacaatgaggagggtgcataaaatgatggtcacccatcctttggccacaaccttaaatatagtactcttaagctaatccacgttagttttaacaattgttttccatgtatctaaatccattaaccatattgtcctttctcaagccatcttcattatttcataaggtcatcctaagtcaggaaagcaagctctatgcaagagaaaaattcttacagcctagatcgaacctcaattgagaaagggtgaccaatttccaattgattgagctagttcaagtctttccttggtcagttggaccttttaggcacaaaatcgatctttttcttactaaaagctttctaatacttaagcattgtctttgtgaaactatgtacctcaattataaagggttttgtctaaaggttttgaattttaacttagtttcaagagagataagaacatttagtctcacctttatgaaaactaagtatagaggaatgcataaaaaaacatgtttagaacctagattcacccaagatattcatcttacaaaggttatcctaatcttaaagggccttcacgcaaccaaagtttcgcatttcttgaatttccttgagcaagcatgtctttttattttttttttctttcttgttatatacttgaaacttagcttgatttaaaattattaatgcacttaactatgttttatgatcatcaaaactaaattaggaaaacccttggactaacatactatactcttagatttcatgtggaattcatccgttgaaaatgaaagttcattataaaaggtgaatctaacttttcaaaagacaaattcaatacaaaaagtgaatgcgtcttctaaaaagactgagttcaatatgaatagaaaacaatttatcaaaaaaccctactagtagaactacgtaaatatttacaaggtcaaagtgtgtccctacaaagtcaagacagcacaatgatgacagcctgatttagttgaacacgtgattgtgtttatatatagtatcacttgataccaatatgagtatatttgtttatttccatttacgaattattccttgtatctatgtttgaaatatattaggaaaaaataatagaggaaaagtgaaaggaaatgaaatgataagaaaaaaaaaatttgaggttcttcgagaaaaaattgaaaactaaaataaat

SEQ ID NO: 10974 - DNA, 12945 bp, Vitis vinifera
  Intron number 6 from transcript GSVIVT01018681001 (locus G SVIVG01018681001) derived from phytozome v7.0 (chr-ID chr1 6; pos 11189790 to 11202734 reverse strand)
attttgtggtgcagggtcggaacgtgtacattctggtcagtaaatttctggattgaaagactggagttgatgtgcattgtaggattgacaaatgattattcttagtaatttaatatcctttactaagttactattgattgccctctgatgaccatcttttggaaaaggaaaatggatctttaattgaaatttttatttacttgactgttgactgcaagtgcacttaatttacattttttttttctgtgcattgcctttaaataagggagagtaagagatgcatggcctctcgatgcagaaataaaattaagcagcttctctttaaacaagagttacacaagtctgccttcttgaacctaaaaaattgaagttcagaatttgtttaaatatctttgtcaaaagtctatgacactaggtaacatgctccttcagttagttgtggaattagttgactttccacttgtaaaatgttaatacttaggtatagatctgctagcattttcaactatttttttttttttttttgataagtaagcagatattagattaaaaaggcaaaaagccacacagcatacaggacgtatacaaagcagcccaacccaaaaaccagaagaagcccacaaccatacctaccctcaagtggacgcgagccactctagaaaacctaagagtgaagaggactcctctccaatatacaccctagcccaactccacagattacatacaaaagaatttttgagtttctgtatagataaaaatccccccctaaaagctaatctattcctttccttccaaaccgtccaaaaaatacacaacgggatggaagtccaaatctttttcttttttttccccacaaaagaacccctccaactgaaaagcatatctttaatcgtttctggaaacacccactgaatgccaaacaaggctaggacaatctcctaaagaacccggaccactgtacaatgtagaagaatgtgatttacattttcttcttcacacccacacaaaaaacatcggttagggaactgccacccccttttttgaagcctatccaaggttaggacctttccccacgtggcctcccaagcaaaaaacacaactttagttgggaccttgtccacccaaatgcccttattcggaaatgcaatatcatttgaagcaaccagcagattgtaagcctccttaaccctaaagatgccacttcccccacctttccagaaaaccgaatcctcctctgaagaaattttgtagtcccttagcatatacagcaaattacctaccaaatccacctcccaatcattaaagtctctagagaaactgatgttccaacttccttggccaaagctagggtcccatacttcgttagccgttgcattcctatgagctgccaattcgaataaaagggggaaagtttgggacagcgctgcattgccgcaccaatggtcagtccagaacctaactttggtccctttacccaccttgaactctatattatcccaacaccaatcagcttccttcagaatctccttccaaactcccactccaaatgtcccacgagcctcattagtcctccaaccaaggccctcttgaccaaacttctccataatcaccttcttccaaagcttatcttcttcaaaggcaaacctccataaccattttcccagcaaaaccttattcaaaagggcaatcctcctaatgccaagaccccccttctccttttgagcacacaccacctcccaattaattaagtgaactttcctttccaagcttccccctccccaaagaaagtctctttggagcttttcgagccttcttgccaccatcttgggcattcgaaagagggacaattggtagatcggcatgctggccagcgtgctcttaatgagggtaaccctcccgcctttggaaatatattgccttttccacaaggctaatcttctcctcattttctcctccaccccatcccacatcgaggaagccttgtgtggaacccctaacggcagccccaaatacacattgggcaaagaccccaccctacaacctagctccacggccatctcctcaatctcttccacatcgccaactggaattaactcacttttggctagatttatccttaacccagacgcagcctcgaaccaagccagaatccagcttagaaaagtcatgttttctttccttgcttcacaaaaaataattgtgtcatccgcaaaaagcaaatgagagatatttagctccatcctgcccctcccccaaaacctgcagcctgaaaagaaacccccgacagcagcccttcttaatagtgcactaagcacttccatacccaagacaaaaagataaggagaaagggggtctccctgacgcaaccccttggtgcttgaaaagaagcctgctggcactccattaacaagaacagagaatttggcagttgaaatgcaccaccaaatccactccatccacctagccccaaagcccaatttacgcagaatcttcataagaaaatcccaacttatgctgtcataggctttttcaatgtccagtttacaaatcaaccctttctccttacgtttttgccaagtatcaatcacctcgttagctataagcgaagcatccaatatttgtctccccttcacaaacgcattttggtccaaagaaaccacccttcctaggaccttcttcagcctatttgccaacaccttagccaaaagcttgtacaaaccccctaacaggctgatcggccgaaagtcacccaaatcctcggcgcctcctttctttggaataagaaccaaaaacgttgtattcaagctcttaacaaaagatctttggtcataaaattccttgaatagctccaggatctcctccttcacaaaatcccagcattcttgccaaaaagctactgtaaacccatctgggcctggggctttgtccccatccatctccaacaaggcagaatgtatttcctcttcagagaaaggtaactccagatttccagcttcttgactacttaaatgacttagatgcagcccctctatgtcagctttccagcctaactcttctgagagaagctgctgaaaggcattaacaatcccctccttcacctcctgctcctccgacagccataccccattaatcttgattctgtccaatgtattatttcttcggtgtgcatttgccattcgatggaagtagcctgtgttcctatccccttcctttaaccaaagttccctggacaattgcctccaatggagttcttccagcagcacccacttctgataggtttccttagcttctttcttcagctctgtctccctctctgaaaggatcctctcactttccaccccatcccaatgctctacttgatgaagagctaagtttttgttaacttccaaccgaccaaaaacgtccctattccacactttgatcttcttcttcaactccttcaactttgaggccagtctgaagctggcagtccctctcaccgcagtctcctgccaccacccccgaagcaagttcttgaacccaacaactttcagccacatattttcgaacctaaacggggagggacccctcctaagacctccgcactccagcaaaatgggaaagtggtctgaagtgggtcttggcagcctgctctgaatcaccccactaaaatgatcaagccaattctgggtcaccaagaatctgtcgagtctagcccacgactgactccccctacccccattcctagtacacctccccccttgcaaaggaaggtcagtcagctcaagctcgtccaccatctgggcgaatcttctcatcgccccagtagtccttccttgcctacttctttccccttgaaaaagggtgatattgaaatccccccctaagcaccaaggaacatcccaaaggcccctaatcgcccctagctcctcccacaaacaatccctttcctctctagagaaaggtccatacactcctgtgaacatccaaattaaaccatcttctacattccggactctacaggaaattgagaattggcccacctccacatcgagcacgtccaatgtccttttatcccaacaaaccaaaatccctcctgcagagcctgaagcttctaaggccccccaacctaggaacctacccgtacccaagcttctcaccacaccctccgacatagcttgaatttttgtttcttggaggcaaaacacatccaccctctggcttctaatcagggccttaatcaccttccttttggaactatcattagctccacggacattccaactcaaaagtcttaacttcataggacttctaagatttgacaccctcttccttgcctaccaccaatctgccttttccctccttcgtagttgattgaacactctaatctccttaactccctctcaaatttagatttttccaacaaagacttactatggattctttcccttctctttctaattttaaccagaaaatccatgatctccgtctccagtccctctgtggaaaaccccaagaaattgctgaatctaaccaaatcgctttcctcccaactggcctcctcccaatctctaccttctcgaggcttagattgatttggtctcaattccgctccgctttcttcactgcaaccgttatttgcctccaccagctcccaccgagtaacggttttaccgtccgtgaaacccgaagcattgagcatacctaacggcgtttccccctggacggtctcacacacggccccagaatagtcgtaatactccctttcaggagtccgaccatgaaaaaaatagagagggggagagtatccagagactaatgctcctttaagattaagagcattcccatacctcgaagcttcctcaattaaggccaaatcagtcttcgatttctccacagcttggatctctctttcaaattgcttacgtaagccatccttctcccagaaagtggaagactctgatactggccatcccaagaaatttggatctagtctctttgaagaagaggcctctcccacttgggctttgccctctggccctgaacgaggctgaacccttaccagcccaagatcctcatttaaactgttatccttggcctgcccagactccttccttgtgcacagcccataaaggcacggcccagccacactagaaggaaatgggcctggcccaaaggaaccaaaagctaaatccacatctgggcttgggaaagggacctcaactgggcccttcttggatgagccacccagcactggcccgcctccactggtccggcccaacatcccatcctagctccgactagggcccaaaggacgccctgacccatacgtctgacgctgcatcccatctgcagactgaatcatgacctcgaatctcgtgtcgttaccctcctccaccacgcgtttccccgcgcgtgtatctgcttcacccccaacctcgacatctactgcagctttcttcccgctttgttcagtcggaaaaatcctcagaagcggtctgatttcccaccacaaggttagcacatagcacctctcatcaacccaaatttccaccgcgctagggagctcgtcgctgtttaccttcaccagtatccgggcccactgcaactcctccagcttctccgtttgagtgtcgactgccaagaaacccccacattcctcccctactctttttagaatgtcccggtcccataacgagaccggtaaccccactatcctcacccaagcctcgcttctagcttccccttccatcacacaccccgttttgggactccattcttccacgcgtaagaaagtccccccaaccgacattttcccggagttgagaactttcctagcttcttccaacctctcaaactccaacaagatcttgcccctttccagttttgccaaccctagcttacccctcaatccccacatactagccatttgggtcccccaacttttcagatcgtcacctctcactgagtttggattccaaaatccaacgagacaatgggtcaacttgtttaaatttctgcttaaggcctctttcctaaccttcaccttcgccactgctttgcctttactccttggcgtctgttccacctccacgaaggatttcctcaggtccgatttcaacaaccgcacatcaaactgttgcctttcctttctgtccatgacaacccctaagctgcgtaatgtcttcgccatcaaggaccatccacccttcgcccctcttcccttaggaatgaaaatgctgaattttttactttccaagtccaccacgcccagacgtagatagcaaccccctttattcgcatcacgcaacagcgaataggacctgccattctcctcccaccttctttcccatttttcctcactcttctcttccaaacagaggagcaagcactccagaaaaagccccagactcaccggtcccaacttgacccacgaagagatccctcctttcctctccaccatagtagctttcattttgcctttcctctcctccactacgacctcgaacaatttcgattccactccaaagctgctcaccctccggcttttcctaatccccgaccatgtctcaccctctgtcccctcgcccgcatccacagtcttttcttccccaccaacactctcacacactctctctctagctttctctctctctctttcctccattttatcccactaggatgactgctagcattttcaactatttgaagtcaaattcttgtgttctttaagcacaagacttgtcatcatttggttttctcaataaagcaataattgcatctagctgttagtttggtgccagttattagttataggagtagcatttttagtcttaagccactccaatctccccttaaggagttaaattggagtctcaactttcaacctgttcaattaaatggctgcacttttggttatagctaacttcaacacattttataacctagtttagtctttgagcaaaaggacccaaacacatgcacatgtcacacatacgaaagattgtaaatttggggttaaagtaatagagttgaggctgctataatttaatgagggctgatgtcataatatatcctttcgtgggtagttctctttgtcaaaataatagaacatacaccatacttaactccataaggtcactgttatcattcaaacaaagtattgattgcgagattactgcacactctcaagagatcaggataaatccactcatattgttaaactgaatgtcacttgtgactgattcaacttagagttgtacttactatacttttctatctatttatttttttgatagataccatacttttctatctatacaaaggttgatgcatcattgttgtcaactagttctaaaatatatctgaaacttggattttacctcttggatactgttccaattcctttgactttccttatcattgatttcctgtccatgtaaacagttgttccccattttccttttttgtatttgagtgctttcttccctttaaaccacaagtcatttctttaatttttacatattaagaaagctgaacatcaagtttgaaccaatactttgagccaatgacaaagctagttcatgatgaaattaccttcaattggtctagaaattggtttttcaggaaacatttgtatatgaggttttgtcaagtatagtcttacaagcctaaagatattattggccatgttactgaaaagaattgtagagaaaagtattttttattgcttagaaaaagtgtatttatgtcagtgtacatttagtaaagaagggccgaaaaataggaaacctatagaatcccaagaaatcaggaaactaatttaaatctcctaaaagtacaaagtttgacttccaaactaattcaaatcttcaaatcctaaagatccaccaatactccccctcaagctagttcaaagatgtccaacatacccaacttgtcaattaagagagaatagatgttcaaaggtaaggccttagtgaacatatctgctagttgtgacttagaagctatgaacggtgtgtagatcaccccttcgttgatcttctccttgatgaagtgttgatcaatctcaacgtgctttgtcctgttatgttatactggattatgtgcaatgcttattgttgccttgttgtcacagtacaatctcataggttcatccacttttacatgtagttctttcataagagtgttgagccataatagctcacaaatcccaagagccatagccctaaattctacttcagcattggaacaagagaccacctactgttttttactccatgtaaccaaatttctagcaattagggtgtagtagcctgatgtagaacgcttgtctatgagtgaaccaccctaatcaacatcaatataggcttcaacacaatagtggttgagtttctcaaataagacctttgcctggagtatgcttcaagtacttgagaatgtagaacgcctgtctatgagtgagccaccccagtcaacatcaatataggcttcaacacaatagtggttgagtttctcaaataagacctttgcctggagtatgcttcaagtacttgagaatgtggctcactgcttccatatgacagttcattggagcattcatgaatttgctaacaaggccaacgacatcggctatgtcaggttgagtatgggacaaataaattagttttcccaccaatcattgatactgttccttgtctacaggtgttcctaaagggttagcccccaacttatgattaggattgatgggtgtagtttcgagtttgtaccccaacattccaacctcgtttaagaggtccataatgtatttttgtcatgacacgtaaatacctttctttgatcttgccacctcaatgccgaagaaaaatcgcaaactgtccaaatctttgatcttgaattctttggcaagcttcaacttgatcattttcatctcctcaacatcattccttgtcaagataatgtcgtccacatacacgaacaaggttgtacttttagaaaccaggaggagcatccataaatacttcttctagattttcatagaggaacgaattcttcacatctaattgctgtaagggccagtcattattagctgctagtgacaacaagactcgaatggaattgattttggcaactggagcgaatgtgtcttgatagtcaatccaataactctatgtgtatcccttcgcgactagatgtgctttgtatctctctatagtgttgttagagttgtatttgattgtaaacacccacttgcaccccacggtattcttccctttgggtaagtctgccacttcctaagtgttgttcttccacagtgctttgatctcctcattgatggcctctttccacgttggatctttcaaagcttttttaacattccttaggatagtctcatttggcaagttttctacaaaagtctactactcggagtcaattttctgataagagagaaaatgagcaataagatgctttgtacaacttcgcaccccttttctaacagctatgggaagatcacaattagtctcaatagaaaagctcggtttttcttgaaaattgcaagtttcaggacttaccttgggttcaaaagattgactatgctttggagagagagagcctattccctgattcaccgcttgcttgttcttcctagagtaaacttgaaaagggaaatctataattgcagaagctgctggtgttttaccctgaaattgatctgagtgcgcagaagttgctggttcttgactctgaaactgatccgagtgtgtagaagctgttggttcttgactttgaaactgatatgagacctccaaaggaacctgtttggattcattttcagtggttggaagtacaagaggggtttctatcttctctacattctccccttgacccaaagcaccaccttgcatatcaacactgatgatttcttcccactttgggagtggaaaaatatcttgtgactagtaaaataaccttgtgtctcaaaaaaggtgacatttaaggaaacatactttttcttagttagaggatggtagcaaatatggcccttttgatgaggtgaataacccataaataaacactttagggctctcggttctagttttgaatgactcctggctggaatgtgaacaaaaacaactgacccaaagactttcgatggtatggagcttggaaaacacactataggaaggaaccctttaagtgattcaaggggtgtctggttagcaagtattctggaaggcatccgatttattaagtaagctgctactaaaacagcattagcctaatgaatctttgggacgttcctagcaaagagaagtgattgagtaacctctaaaagatgtctattcttacgctcgacaacgccatctactcaggtatatctgtgtatgatgactcatgaacaattccattatccattagaaacatgttgagagatccactaaagtattctcctctattatcggatctaatgatcttaactttggcatcaaattagacactaatcatcttgtgaaaatttttggaaaatccctatagcatcaaatttttttctcatcaaataaatctaggtcactctaatgcaatcatcaatgaaactaattaaccaccttgtcccagacatacttgtgaccttagaaggatcccatatgtgaataagagaaaatggaaaatcacatctattatttctcaacgagtatggaacacgatgactctttgcaagttcacaaatttcacacttaagaaaagataaatcaaaacccttaaacaaatcagggtacattattcttaaagaagcaaaatttaaatttcctaatttttcatgttgcaacctaatctatcgttctctagggacttcctttcacttggtatgcttggttctcttaatcttgcggaattaggtagtataggccctctctttcctcaacattgccaatcgtcttccttgtagtaagatcctaaaaaacacactgatttgagaaaaatgttattgaatagttttgagactttgtaagcttgctaacggacaacaaatttgctgatatctcaggaacatgtaaaacaaagtcgagtaatgtctttgttaatggctatactcccttttccatgcattggtatattcgagccgtttgccacgacaaccttctgttttctagagcaagggatatgagttaaagagttttgactcttgagtcatatgatcacttgctccaaagtcaacaatctaaggaacatgctttaggactgatgtcatgcaaataataggttgggttatacctgacatcccagatatcctagctatagacagaaataagaatagcttccccatctcaggttgcatagaattaagaagccaagacatgatcatggagttcttagagtctcatgattcaaagagaggatcagtagttttgggagccttaatcattcccaaaatgtagcccatcttcttcttgctcctcagaaacagcttcgtggaatgagactactctagaaatttttttccattcaatttctttgtagtgctctgaagtgtagggttgtcaaggcttccattcaatctgtttgggtttgaagaaacctcaggagatgtcgtcctagatccttccgacattttttagagaaaagagcacatggggataaagaagatgaaagcagagagaaaatctcagtcaaatactaagatctgttacacagacgttggacccagaaaaaaggaattcttcagccaagtgctgagaataaaataggtacaaacgtctctagaaaagaaaagaagaaccctagttcaacagctctgataccatgaaaagaattgctgagacaagtatctttgttgcttggaaaaagtgtatatatatgtgtacatttggtaaagaaggccagaaaaataggaaacctatagaatcctaagaaatcaggaaattaatttaaatctcctaaaaatacaaagtttgacttctaaactaattcaaatcttcaaatcctaaagatccgccaatagttaccaatggtgacatcacaataatgatacaaagtgaattatttaagctcccttaagtctgtgctcccattagatgtcaatttggtattagttaattgataatattctttttggacttgcagctctagatgcttatggaaatggaatcccatttctccttctaaggagtttaatgattggaaaagagatgccctctccaaaagttgtttaaagtattattattttttaaagcaaaagaaatcctttaaaccattggatcatgatattagtcattcagtttttatctcaagatccagtactatatggcaaagaaatcctctggatatggattttgtctcatggatctgttgcatacatcttggtaatggctaataattctcagattgaatcatgcaagattgatattgatttatgtaatagcaaaaataccgctaggtttaacgaagtcaaattggcatttgtttatttagttgcaacattcatcaaaagtgtttattatttttctgtatgttctgatcatgttttctcattgttctaaaattcaagttcagatcatcattatataaatagatgtatgccttgtgaatccatgttttttgatcttcattatcaaatagtttgagtttagttttgccaccttggctattttcattttcaaataatttgacttattcttttgtttttaacctgcttgttcttcatatgcctgttgtaaattgaaggtttagttgcagattttctacctgttttgagataattatatgatgaagtggcatgtagagaggttacttcagttttgcttttcatttgtttgctggtccttttgtccttaaactactggcttcaaaatctaattatcagtgatttttgctttgactttgttgaaatttaacttccataagtatgttttataaggacatcctgtgaatgtttaatgtcattattcctacagggctcagcta

SEQ ID NO: 10975 - DNA, 8876 bp, Vitis vinifera
  Intron number 1 from transcript GSVIVT01001583001 (locus G SVIVG01001583001) derived from phytozome v7.0 (chr-ID chrU n; pos 5541935 to 5550810)
tgggactccttgggtgatatggacggattgttctttttgaaatccaaaaagaatttttctgatggaggaaacagagaatttggagaaaggaggacgacttcaaaatggacggctgcaaattgccataaaaaccacgggctggtggttttaaaaggggagaaagagatttttttcaaagagagaaggaagaaaagaagtggaagaaaggaagaatttttcattgccttcgtgagaagaaaaagaactcgtgttcaccagtcttttgagggttttgaagacaacttaaagtcgagaaattggagtgtagattaccaggtatgttctctgagattttgttattgctgcttgcattctactctttattctctggctgtttctaagaatttattcttgctgtttggtgtggatgctaagggccacagtttgatttgttgagactagttgcttgcatatttacactattttagttttccttttgatgtctttggttccatctgaaagcaatctgaatataggtccatctttaaacttgatgctagaagtcatgcccctgtttatgttctactctcactttgaatacccgcccattccaagcctatggaagttgcatgaaatgaggctttgcaaacttttgcttgtttttctgttgcctttcccctggttatcttttactccacttttttctttgctatctattcctgtgtacactttcttctaagtcctctattggggtagcgtgaggtttgagaggaaagaagatgtgctcaggttattgagtgaactgttgaggaaaagctcaaacaaaagaggttaattcttgttttgaatcaagtgatgggttgattactacccaaaaagtgctattttacacctttaatgcattatgttttaagcacttttgtgtagtagttctccatctttagtccaattggcatgttaaggacctagcaatgtcttctaatcatatttgtggctagttttaatgttttgacagctttttggatcattaagacaagtcaagcaaaggagagaagcaaagagaagcaaagtgaaaaaaatcaagatgtagcagctgcagtcttctttcacacttttggagcacttcccgaagtccattttttacatgctatataccatttcaaagctctggaagtcaagaatccaacgcttcaaaccgtgtacgatttggagctgaaatgaggaagatatggccttcggaagccaactgctccaggttatgcgaaaatttcgcattccacaaggtgttatgcgaaattcgcataacattcgcataaccatgcgtgttgcgaattttgctctgcctttgccgactccactttagatattttcctttgtattttgtgatgtaatttcctttattatccttgtaactaaccaatcataagcttttgcttttgtaaagactttaaaaggggtggaaatcacctcttggaagatatagaatacgtattacgtttttacacttagaattttacagagctctctcgtttctcttttctctttattattttctttttctcggaagccaaacaacctctaaggatgtttgcccggaggatgagaggctaaactttcggtttcttggagtaaaggaagctaggtgaaaagtccagatgaaaaggtggaaagcttccatgcattaaattcaggtagttggaattcataaacggcttctaaatccaaagttttgctttaaaccccttagaatcactttgaatgaccaatacatggtaagcttcaggtctttatggatgcttattgctagatccatattagtccattagttatcatgtacgagtcattggaaagtgattcaaggtgaagacccatagtgtcttaagccattaatggaccttgactaccatttctattgaccttttatggattaaatcttcattgtcaaacctataccggttcgggaaataactataggttaaatccccaatgcgaggagaaaaatccggaattttccactttctattctgaacttgatcctagcaacccttagctccgggagactttctttcttccatttttaattagtttatgttagtttagttttaaacactttcaaatcaaattttattttcttttaaactttaagtttttgatcaaggaaatcattaaatccaatttctaattttgagtatatcactggtagaatgaaaacccatcccagagttcgaccctagagccactatactatagtagctttgctacattagtatgaggtcataggttttataaatgtttttgattaaatgacccaattggagttacacgcgaatcatgggtgtatatgtatttgggagttccaaactggtagaggacatttttatgagtttatggtaattctaaggttattggaatgagttttgaggagttttcaaggtctaagagagagagagtgaggcaaaggtgaagtttccgagtaatgaggtgaagccgtgagagagaacagaggcggtctttattttcttggggctgatttctatgagggtgcagggtacttttgagttaagtaagaaaagtttattgagctgggatctctttcatgtaaaggagcattcatcgattttgggaggagttagacgggggaggaaaaagcaagatattcagagaagaaaagcaaagagaacagaaaggaaagagggtggctcgttttgggggtctgaatagtttttggaagagaatacagcttatcaaaaggtaagcaatattcctgtcgaagtgggtggagaaattggcgatagtgaggctcctatgattgtagttgaggaattttttggaaaggagctctacatcttgattgaaaaacaaaggttttgagtggatatatagtcttaaggatttcttattgtccccattggaatttctaataatgaaggaacataaggaaattaaaagctaaactccagtttctgacatcgagttcacatgatggtcgagtatctcgttttgagttggttgtttagaaaaatcacaaccaaaatcactttcaattagtgccagaagtagattctgaagtcccaatgattgagtcggtttcgaagaacacatatgaaatatgatttgtgtacagtgacaaagaatttagtgagaagatgatcaatgatatttggtatcggtgttgctagttttggaggttgtttgttggataaacagggaattaccttatcttttatcccaaaggatgaacatgtagttcagatacagtttgctccggagagagttcttgctattcttgtagtcattgaaacccaaaaactagtatatccaaatgatgtatgtgattttgtcctctatgcctgcttcagggtccattgagatgcagatggtggaagacctaaatttactgaaacccaataggatcttcagaactgaagggtattttgtatggtctactttccctgcttatcataaggatgaaaaagatcaatatgtctggaatgctgtgtttgatgtgacaaaatctacaagcgagaagagatggctttgtcctctgccaatcttctgaatgccagtggctggaaaccatatcggctaacgctaacttggtcaaagatttgcagcaaaaacatgtttacttggcctaaggagcattatacccagatgtggttgagtcttgcccaccacctaaaagttgtagaagcttttctggtgcagagatggaatggaagctccacaaaatctttcagagatcatctctcaatctcagcacacggataccgtctatagttccccctagctacatttcagtaccagtatctaaatccaggtctgtcttcacgtcttggtactcatgtttcatctttagcaaataaaataatatcttgtgaagatgatgcttcaaagacagcgtttggagctcttgttggcgagggagatgttcctaggattgttgcttcatctctggagaacagtttaaactcatttgatctccatccaatctggaccactatataaatgatagcaaaaccttccttgaggcaatgtgctttttgatggatcccaataactcaaagatatgttttgttcaatctcctcagaagttcaaaggtgtgtatattctactcaaggctcaaacacacccttgtttagttgggttttagagttttagctctcttacccgtctgggtctgtattggagaactaggtatcacgtaaatgtcagtttggggtttttcttggaaccttgagcgttcgagtttaaatatttttttagttttggtaaactgaagttcactatttaaaccaccttgaagtcgatatttcatcccatttgagtatgagatgatacaaccatctgatcttctcttcagcctgtttcatcggactttagcttgctagagatctaaaatgcttagggagttctagatgcactctccttcgcacgtgcatgcaacctgtatgcatggccaccataatgtacgtgtggctagttcttacttgtcctcagccttggtatcctcagcatctagcagtccctatgggcaacttgacaaagaacaatgaagataactaccaccccaccagttgccccccttgcattcactgctccccaacctaaatatctttccattccaagactatgcactaaccccagggacatcttgaattttagtctcatgcaaacacaccaaatccactctttgagacctgatcagggccttgattatcttccttttatttctatcattagcccctctaacattccaagataaaaattttaacttcgtctaagggtcgagagtctggccccacctcctctaaccaaaaagttctccttgctcgcaccattataattaatggaccactctaatttttttagttctcgatcaaacttagtagaccttgtggtttccctcttaatactttgctctcttcttctcttggtccttagaagcaaattcaaaatttcaccttcaaaccctttcgttgaaaaacccaaaaacttgttgaacctcgccagatagttgtcttctcatcgacaacctttcccctccaaatcctgtagcaactcctcatcctcaccccccactccttcctcagccagagttttctcccccttagaggccatcttcctagatctgccatcaaccaaaataatactcagtgggttctgctcctcttcaccatccacggaggccaacccgtcgaaagacccctccttcgtcacaactcgaatgaaatcagaagaatgagtagaaaaagagagctcccgaccccctacggagaacgaaagggtctcgacgtacttggaagcctctacaaatagagctttgttagtcaacgacgctctttccaccacctcaagggcctccagcgacaaagcagccctcgttaaccctacgagaggatcctcatctccgctttcttctctagccttgctaagcaaaaactcatctagagccctaaaaaaagggactgaagactctggcccaattaaatcccctcctcccgttgcgctaacaactttgggccaaggcccatgaccaactccccctcgctgcacccttttaaattttttaaagcaatgggcttaaagacccggcccaaacccacctgcaactccttatcttgtccttgggcctccccaaggcccaatctagaagacccacaactgagaccactcgtccctaaaagtcagcccagtctgtttaaaaaagacttctcaacccctctctcttggaaatgagagttacctaccctaaacctctctttagtctctacgatagagacctcagcaagaagggtagttgggttgcctctaactgacgacatgtcctatacctcaagctgcaagttcaactgctccaccttctccctttaactcccaaagcaagcaacgcatgaacttcccccctcttcttctccttcccttgaaacgccctccttgtagtttcttcccgccgacaccacctgtgcgaaacaaggaggagtcttccaccacatatgaaaggaataacaccctaaccccacaacaacctgagcaatgttaggtaaaacctttaccgcacgcttcaccaagatctgatcccactgcagctcagttaaagaatcagtatcttcatccactacaacaaagcctccacacccatcatcgattcttttaaacacctcacgactccacaagtgaagtgggagcctcaccaccctcacccaagcctcattagcaaaggagtccttgcaaagacaccccacctttgggttccatctatccaaaataagaaaattctccttaatacttcttttgcctctagctagaactcgctcagcctcacttggtgtctcaaattcaaacaacaagagttctatacctaacacatcaacacttagattcccctttaaaagccaatgttgaggcatccatctccttatgaaatctaactcaggtaatggagttgaattattaccccaccagacactgtttcatctgttctaaccttcctcacacttcttttaccctcacctctaaccaaactgaatcacctattcttcccaattttgactttacaacatctgcgtaggactatgtctccacccccttctccctccacagaacctttgggccccctttcaccctcagcggaacctctagaactctggtttcctttaagccttctactaggaccactccaagacctctcaaccttttggctaaaggattccaaccatcagacaaccccttctcttctagaaagataatgctgaatttttttttactcaagatcacagacagagcaaagaatgaaccttcctgcctcattaaaacgttgctccagcctaaacttccttaccccctcctcccagctaagaacctaacttcagttatcgatctctctacaacaggcttctactccttctagtaagcaccgtaaactaacctcccctaatctaatccatgaagagatacctttgcttctctcctaaatacaacctttcagcaagatcgtattcaatgcaatataagcatatcaaacaccaatctcatacgtgcacccatgtggtattatgttgatacttgacatgagtattttaattgaagttaacatatttgtatatcatcagatttacctatatttcttatttctttttttttccttttgtttttttatgagtttttgttcccactgtcacaatcttaattccttgttctctttcttacaactctatggttatcctacatccagatagttgatatgatcttattaggtgtggcattggaaagagtggagtctagtgaaagtttgtagagaatggcttgtgttgtttagatagaattcaagcaagcactttagagtcattcttggtccaagtggttatggatctactacatgcaactgattctatgtttattccatgaagatattgcctaatggcttccattaaatgaagtgagaggaccattatatgtaatttttgtcattaattttaactgaaataacctcattgtttctcaatgatggtgtaaatatcaaatacccatctaaatttctgaaatgtaaatacaaagtagattgaagagaaacaaaattgatcttttgatacaaaaggaaaaggctctaagactaaagattgtaattggtgactacgaatttgatcatgatcttttttatgctctataaacttgggattatcaaagaatggaatggatccaataccatacaactatttaatacttttagtaaacagaccaacagtggatataagatcacactcctggttaaggcccaacccaaacaaaattagattaacttaagtaaaacctagtattgggaatatagggcaacatatttacccatttatttgtttgacaataggagaagacagtttgcttaatggcatctggggctgattggtcatcaaaatacccaaggtaaaggacaatgctatgacatgtcattctataagaatcatttgaaagaatcatgtgaattaagtttttgtataatgaacctaaaaatgtagatcttgcaattcctttgtgaaattcagtttacattttgattattggaattggtagtttgggaatatttgcatatatatttcatctaagctcatatgatttgagatcctatgcacccttgttgggggttctaaggcattgtaccccaactcgtagagggttaagttagaggctttttaatactattgaactttagatcttttagactagttggtatattttaaccatattttatttgacacaaggaaaaaagtaaaggaatcaagccatgactaagaaaaaaggaaaggttatatttgaaagatttatgatatctgttttgagaaaatgaatttggttaatatgttgtgaatatgatattcgctattttgatttctctttcgaactttcagttgatcttccttcttttatttttttttccattactaggctactagctcatcctatttttagcccccgaggtgattataaggtgtgtgaggtgtgaataagacggaatggaatctgaatttggtcttgaattcaacataggtgcagtcagcttaggattatatcatgttttagaatatattgaaacctagatgcttgaatatggccttggttttggaatgttgactcatctcttagagatgtagtcttatcctcatttaacttgacaaacaactgtatggctctaaacaaaccctacatttgtcaaaaagccctcaaatcaagctctaggatagtgttttaagagagaaggtcctatctctaattggtatacctttccttcatttcctcaagattatctcgaggcaaaacattgaaacatgtttttttttttcatggttgctatagtgctttagaaatattaacaaattatgtgttttgcagtaaatcaactctc

SEQ ID NO: 10976 - DNA, 6480 bp, Vitis vinifera
  Intron number 3 from transcript GSVIVT01011140001 (locus G SVIVG01011140001) derived from phytozome v7.0 (chr-ID chr8 ; pos 7116898 to 7123377 reverse strand)
tgggtgtggtggcgaaattgtgtttggtgcttcaagtggattgtgggagcaggaccaaggagaaaaccagagatatcctcagattgcatgccagggcatggaagaactctccatgcatacccaccaatttgctttcttcatatccataggcccaccgagagaacgtgcaaattcattctttcttattttcccccttttgtgtacataattaattgattggatgaataccttagaatagactctctacatgggcattaagcagtgcccactgaaacattttatggcacatagattgctattttcagaaaatttatgttccacacaacatttcagagatcctcttgtagttggttgttcttggtctccttcaacgaatcaattcttacaatagttgaaaatgtcaagacagagatgaaccttcccaaaagaatatgtcactgaggtggtttaccaggtgaagaaaactttggattttaattaatttttaggctttgtcttgaagtgtgcagcacatcatcatgcagaagctggcatttggaacacatcctcaaattttcaagtccaatatgtacaagtttgctcctttgaattttcacagcaataatttttagatcaaatttgatgatcagcactgcgggtcaaccggggattctagatctaatttttaacatgacgttaagaaaggggagatagaagggtattctgtggacagctagcttactctctctctctctctctctctctctctctctctctctatatatatatatatatatatatatatatatatatatatatatcttcaagtatcgaaggtgggatttaaaaggatcaatggcttccaatgactagataaaataagcatgaaagcaagcacatacaagcaaccaatagttatcattcttctcgcttttggtaattgtacctaatatgagatcacaaaaccagtgccattatgctttcacgtcactgctgaattactaatggcctaaattggaaggtttgtttaggggattgacttaagatgtttttctttaattggggttgcaacaaataaaataaatagagaccatccattttttatgttcatcttgccgtgcttacctctcacctccaccattggttctagctagtcggacctggtcagaattattggctcagtcgctgcaaccctgaaaccactcttattgagcattgcagtgatcgggattgtaggcatgtatctagaactttgtctctgatgtgtggaagggcacacagcttgcacctttctgtcggagaaagtgaaaaattgaaaataaatggactggagttggtctaacaaagtggggagctagacttctgttgcagtaaggctcgtagcttgatatatggcacctaattcccttatatagataaattatagctttcttaatttatagtaactttgacatttcatgtcgattggggaaaaatgttcatgatcaccatattgtatatatgaatttttgttaataaagtagacacgttccaatgtcatgagcgtcattgaaggaatgagtgattccaaatgatattaaaaccaattcttaccatggtatgagattttgtttggcctaaaaagggatgtttatctccttcgtttgcatgaggggtaatgcgatatctcacatcaaatagagaaagtttataacactatccatgtatgagtttatcttaaatgtatttgaaacccatgaaagctaacggggctcacagggaataacatttatatgggacgaagcttaaccaagtagacgtattttaaagttgatgaagatctattagacccataatggataatatctacatggaagagagaaaattgttccagttgttttacattttaagcattttctagcgagttgttatgaaatttgttacatccgtatattcatttacaaaataaaagtaaaaaaagtgaagatgtcatccaccaataattgaacttagagaaaaaaaaaagcactatttggtttaaatgatgtttggtaaatttatttaatgactcgataacttaatttaaatcattaaatagattaaatatgtctgataaaataatttaatatcataattaaaaattaaaaataattttaaatattatgttaaaatagttaacttcttcttaacatttttttttaaacatcatttacccacttctactaataagagcatattttataaccataattccatatccatgacttcttttttattataattattttatggttaattattttatatatctataatactttaaatgtaaatgtttaacgaataaatttattaattaaaattgattaaagtaactatcgtttaaaattaattaggtaaatattagttttaactcatgaagttaaatatgttaatttgatgatttaaaataaattttataaaacttatcaaatgataagttttaaatcaatggtttatcttagaatcaacttaagtataaaactatatcaaatatcttcttaatattatccttaatttaatttaatggagaaatgaggtgagcttggtagctataaaccacattaatttccaggtaagcaattggtggattagatccatatatacatcccttgttgtacatagaaataccagtgattctaaaaatttatcagcaagttagcagtggtcaactcaatcgcaaccacttcgaggtggggtggggggtggggcggcgcgggccacttagacgtacgtgccaccaaatttgaataagaaatggtatgtgcttaattattggactaattcaaagttctggagctaagtccacaattaattaatttatttgtcttgatcttaaatgaaatcggtcctgtgttgaactaataaactttactggttccctcctttaactactactttctaggaggattgagtctgcttattgtttattataacgctacacatatagatttggtctcttttcagtaacctggattttgagatgcctttgcagttggtcacaaaatttcactttttgattatcatagtgaagcgaaaatacagaactgaagaaaacaaaagaaaaaaaattgaatctttgaaagataaaattcaaacaacatatataggcagctggtcaaactgggggtgccctctagataccatgctgaggctcctgatttgcctacactaaaacatgctaaggccaaactgcaaatcactagtgaagctctttgtctgatcatggtcattcttctcttatgagaaaggcgatggcatctcttccaatgccaatggcttctctttcatggcgcgcacaaggatacacgtactactagtataaaaatagtgcgtaaaaatcccccaagtattaaactaatatattcatgaagcttatcttgataataatttatactgatcattaagcttcaattaattatccgattctatcagacttaatagttcctttgccctagaagtttgtcagcactgatatgtttatgagaagacaatttaattcttggatcatgggtctgtctgggatcatgtgtgatgccctgagttttatgttggtgatgactcataacaagtctttcaattttctaagccaaatttgctaatccacatgcccagaaatgtcgccccactcagcattttatatatgctagctgctccatctatatggttcataacaaaccaaaaccactgcatgcaattcttaatttcgttccatttgacacttctgagaagatggaccagatagtttattggcatctttagctctacaatcagaaagttaattctatgtcaatagggaaacaggagagcctcgaactacagttacggaaactatctgataaaagtattaaaatctgcttctcatgtttctttgatttcagtaatgtcttaatctacatatccactggtctgcaaaatgtttcttaaccaaggaaacaatcttctttgatgaaggagattaatttaattcacttaattagttaggatcaatgatttgctcatcgagaactgggatttgaacttcagtccttcaaggcacaatctttgaaactcaggaagagaaggtctgcttgttctgtactggcctcaagactcaacgaaagtgggcttgaggatcaaatcccgaaggcgagagctttccaaggaaattgtcccagaggaatggctgttaacttgatgtacattatgggcttatttccccattgcttattcttttgagtaattagtagctgaacagaaacagcactcccgcacattattcttcaaccagttccacacttgatggtggcagctctatttgtatttggtctcaaatcctcaaccctaatccactagtaaaattagcaacagacaatcagcatatattgcttaatatataattaggattatcccaacatgaaattgatattctgtatcgctcaggttgtacaggactaaggagattagatcatcaattagctcaaacactcttttttcaatctccattgcctgagcagttcaaccttattttcacaaacttgtcccgccaaaaccatatatattattactattattattattatttctcatgtagtgaggctctttgatccattacgaagcacatcatatgatctgtaaacgaaatcccaatatggcactgttgggtacatctagtctctccagaagttaaacgtcatggctgttcttttaggaagtatttatcattgtgaatttaactataaagcatatatttgttgacacctgaaaattatttcattataagctttccattgtatacaagattatatagcaagtaaaacaagaaaacaataagcaaaatggaatctctcaaggccgagagaaggtttcgtagcatgacaaatcaaatgggctccagttaccagcagtgacagctacatgatttggatgttgagcagcttctgggtgcagagctggcaattgtgtctcgtgcaaggtctgattctgaaccatggcttgagaaatgggccacaacatctccagaggagcaacctcttggcctggcagtggtggcagcccataaatattggcagagtcatggtcatgatgggtgtgaatagggtggaagccactaagatagacctggttatcctcactcaaatgagtgtccggcggtaattgaatatgtgatgaatccaggctggtgttcgacgttgaaagagttgatgaaagctggaaagatggatggaattcacaaggcaattctggcatttcaaaccctgttgactttggctccggcttctggtttaggaagttggcataaacaagagcaagatcaatattggaagcggaagcatcgtgtagcccagaagaggtagtggcggagtcagccaaggcacttccacgagggtcagggtcaggatcactggccaaacccttggaggcaaggcgatcggtcaatatcctgaacgacttgcctctccggttcttcctgcagcctccgccggcgggcagtcttcttctactactagtggtgctacttagcagtgggtttcttctagcacgtgttcaagcccaatatttatcaacacacttcacatcatcgtcatccaaatcccattcactaagtttggctctatcccgcattgaaattaatataacttaatatgtcttaaaatcaatagattcgtcctttatgcatatatttattcatttattttaaattattcttctttttttaagggcaagatgcctatcatttttattttaaaaacattttaggataaaacttaagatagtgtaaatttcgttttgaaagccttttaggataaaactaagcataaaatataacaaagaaaaccatttcaaggataaggacaataatgtaacgagttttttcaagtacccatcttatacgtcccatcttgtcctgtctctaataggatgagtttgagattctttttaatccgagatgagttcaagagaggtttgggtgttgtcttgtcaaaattatatataaaattaatttttaaaattaatttaattttttttatttttaatatatagataataataaaatactttttaataaaataagttaaaaaattataataatttatttatttataaaatatattcattttaatgtaattaaaaaatttaaaaatgatttaaaaaaattttaaaatttcaaaaaaaggttaaataggacgaggtgggacggatatgagaatttttcatacccatcccgtctaatttaatgttttaaataagacaagaatgaaaattattttaaataaatgggatataattgagatggaggtgaatagtctcaaactcacctgttgttattcctattcaagaaacatataaaattcaaatcaaattgaattcaagatatcatgtgatcttacgtttgggctctgaaactaatttttcttatatggattatgaagtgtcttggacaatgtcttatggtaattacttaaaaaaaaatttaattttccattaaccaccttccaagttggc

SEQ ID NO: 10977 - DNA, 3121 bp, Vitis vinifera
  Intron number 4 from transcript GSVIVT01010010001 (locus G SVIVG01010010001) derived from phytozome v7.0 (chr-ID chr1 8; pos 13439527 to 13442647)
aatctgggggtcaactatccattgtaagtttgagatctcaaccttaaactctaaagtattctattttgagcttaatggattttgaagtgttatttttatttttttttattttattttttttgaagaagaagagacataacattatatattataagatctacaacatgttagagtgcatgatatacatggtggacctaaatcttacaagatttaacttttaggaaaattggttgatcaatatggtattataaccttgtttatttccccatttattgtgtaagtccaaaagagattaattgtagttgtttgtctactagcccgagtttctctccatgtgtgggtatggagcaagaaagggcgttaaagtgcatgatatgcatggtggaccccaatcctactagtttaagtttttaggaaaattggttgttcaatatggtattagaagtcaaaattcctctagcatcctcacacataattcaaaacatattcctaggaaaagaaatcatctatatctattcatcatcaatactatgaccaagatgagcaatatataataaactagcctatttgctttcacaaaaatatgactacatataacgtcaaactcattgatcatcaatcaaatatccttgactaactagcaacatttgcatgaaacttaattaacctgttaacaatatcaataactattttgaaatcaccttcaatactttcgttgaattgttttgctaagttcattccccaaggcttcacacccagctactataataattgatgcttgacccattaattttgtaccctgacaaaaatattaccatcatgttttttaataatgcaacccattgtactagatttcccagtaccaaccctagggccatcaaaattaagtttgaaacctccatgtttaggaggattccacttgatccatatactcaaattcctgttaggaatacaatgataaccagctctaaaatcactcaaacagattagctgtaccaagtgttcagatttagtttacccatcattaactcatgttactggttggaattcaaatataattatatatgttagcttgcttagcatcatgtacaataatctttatctatttctttatctggaatatataatgaataggggtccccttcaggccttttctagagctctaggagatttgagacaaggagacccattgtctccttatttgttcatcttggcaatggaggctatctccatgcttgctctctagggcaaaggaaggtggttttttttatggtttcctggtcaaaggaagacatgatgtaggagtggaggtctcccatttattctttgcaaatgatacccccatcctttgtgacgctagtaaggaaaattttgagcacctaagttgggtcttcgtgtggtttgaggcatgttcaaggctaaagattaatctggagaaaagtgagttaattctagttgggaatgtcccaaatatggaggagcttgctgaggttctagggtgcaaggtgggtgttctcccaaccacctacttaggtctccctttgggtgctccttacaagtcttctaggatttggaaaggggtggagtagtttcaaaaaaggcttgctttgtgaaagaggtagtatttctcaaaaaatggaagacaaacactgtttaagagcactttatcaaacaattaaaagttcttttttgtataacttttgggattgggttagattgtatattggggatggttctatgttgttgttagattttgtgaactggttaggctcttcgtagggggcggttgatggtttttgtgtgttcatgctttctttctctttgtttgctttgtatacatcatatatactttttaaatattaatacaatctgcatttacctatccaaaaaaataaaataaatagggtggagtagctttacttgatagctgttggagtgtttacaaaatcaaccaggagaacatagtttaaatcaagtaccaaaactccaagactatgccctttatttgactcattttgaatgatgcaatggaagaactggtgattaccaccatttgttcccccaccgcctaccaaaaacatattaaaaatgaaaagaagaaagtataaagaaaccaaaaaagcctttataacttgacttgtcataaataagcaatggtcattgggaggtcaacattcattcctttcatatggtcttaagagacaatggtgacaaattgggagccatttacttgtgcaataatttggagtagtacattttaaatttttttcagaaagcagttactgaggcagtaatattcagcaagctttttaggttttttttttccccctggtgggtgcataggtaggggcttagaatcaatttgaatggatggaaaataatgcaggttaaagaaaatcatcattttggaatcatccatggtgattcaagagttttaattattctagaactagtcttaaattttatatacctttgcaataaactcacctattaaaatatcctacacaacaaattctgatttttttttttttttttgctctatcaagagctagaagtactttcttgggttattgctctagagaaggagagcatttctgacttgctttgatttagaattatgagggcctctacccaaagtttaaaattgtaggtgaaaaatgtttctgctttaataggaaccaaatctggttaataagccaaatttgcaatttagaaattgagcatgtcctggtaatttaacaaaattataaaatttaaaaaaaataaaaaccctagaaatggggcattccttctagtcatatctttatgttattgatggactgattgaagtgaaagtattaaaaaggtttttctaaactggtgtatgcaaattccctcattgaagttggctcaattatgaagtgagtaaaaagattgtattaaatctgtaggcttgatgtacagctgattgatacacaattgaagtgttaggatgttccttttttgtatttttcttttttgtttgtattttattctttgtagtcaaataaagatatcagtatctcacattcttttgatattgattttcttctatttttacttcctggaattcaacatctttattcttttgcagatctgtgaa

SEQ ID NO: 10978 - DNA, 13392 bp, Vitis vinifera
  Intron number 1 from transcript GSVIVT01021525001 (locus G SVIVG01021525001) derived from phytozome v7.0 (chr-ID chr1 0; pos 6611762 to 6625153)
aatacagtgctcacaagtatttcctccccccactctctctctctctctccaaatctttctgttttgcttgatttctgtcccatcgagtttgtgtaatttcagcctattccatgttttggtttctgggtttcgttccttttcctcttgcgtccgtatctaatcggtttccttctcgtgggttttgtctaattctattattttgttttttggtctggtgttatgatcacatatgaagaaagttaacaattaattttttctttttattgttggggtttttcttgtattcatgatcacacacaaataaggatcaagatagggtgttaaggttaggggcttttttcagtgttgaatggctttgtttgtttaagcttcttattttctatgtggtttggtctaactgaattccttgacttggcctctttccttttattgattcatctgttgaagcagaagttttcagataattattggcccctctctctctctctgtttatctagtggggtaaaatggcatgtttcttcaagatggtttccatgcaatctgaaagttaaaatgtatgcagaaatgtgtcaatgacacaagttatctaaaggtacccatgaagatgcaaaaatgggatcagagattaataggaaaggattttgatctatagattgggcatgaatttgaatctgcgctagctttggttgctttttatagtgaaagtaacctgtagatttttccatttaagattcttggccaccaaatttaaaaaatattgaatttgcatttaccaaactgtggttttgtcttagcgtaagaactacagaggaatgttttctctccctttgccatggatggagcatacatgtgattgatgtctggaagattctttatgaggacttaaaactttctttggtattacatttatgccaacctctataactaattgccttttgaaattcctggttccactaccaagtttctattagcaatgctcattccccttagattctcctacaatctagttcccttctctttagtaccattatccattcatttcatagaatattggtttctgtctaacttcgaacttcatcacatttttaagcttgtgaaaatgtaaaacatgcaacaccctttagttttatccatgcatccacctcccccaagttttcctgaattagtaaaacataatgcaaatcaaatttccattttgacgtttccatttcctaggcagtgaaatcaaaatttaattctgctgttcatttgtattggcctagcttttgtaggcatcattgtttcataaggtagccttactacatgctttttccaatctcaaaatgcaggagggatctcagcacacacttccctttccaagagtatctgtaattctcctatttttttctggaagctgaggctcttttttgtttttgttctactatcttatgaagcaattcttccttctaggaatacaaaaatttgtctttcctttctaccctttcttgggtttggtttaaaaaccaatgtttgaggctcctcaataaaaccaaaattttacctcatacccttggactcttgactggattccagtattatctagattttctatcgggtataacatattaacaaatggcgtgccaagaattactacttgagtaaggtcttttactattataatggttattggaagcatagaccttgattgcacactgccatgtctgatatttataatttatcatcattctctttccatttgttgtagaactcgggttgttttaaaaaagtactaggttggtactaaccccctatttatgcaattcaaattgacccctgagtcaaataagtgccacagcctcaaaactacattccttgtttgccacaatagtaatttgcgcataccatttatggctaacaattctatccaccagatttatgaattgtagtccttccatctactcttttcctgcatctttatctttgtgcttaacgcttatagactttttcctaggcttatgatctcatcaaattcttcactcaaatttccttcatctccaccaaaataaagttgtaccaaagtttggaccctaatcttaagatctttaatttctcccttaattcattgcactcctatctcaattcttggagagtgggtaccctatgggttatttgctgctgggacctttctataatagccataaaactataaagttcttttggtttctttacaacccccgctttggggtttgagcatttcctcaattctaggcattttctaagagcctgttctctagtgtgaggattttccatgctatccacaaattctaagatgaatctacaggtcctatgatattttcatcttccatttatgaagtatctagatgaccttcagattctgatgtttcttccaatattgacttgacaaagctatttcttgaggtcttcatccagctttaattcatcaactttttgttttgttctgcatttattttggtaatgtcctaccttaccacacttgtagttaactggaagagatctttttatcagttcctttttcaaggtttggcctctgtgggggttctctcctatcctttctattctccagtctccctttcttggggtattttattctatgaagtcttccttttcacaaactctagtcttctgttcttttagaagtggattttgcgaagactgtttcacaatcataaccaaactatttgcaaaaattgctgaagtctgttcttgcattcattttttctctgccagtttttatttttattttttttattttaaatcagttcataaggataatcccttagtgtagatctcagctgctagtgtcccataggtttattgggaaaaaggaataatttccccatgcctggcttttattctacattattctaaacctaaccttttctgcaaatagaggaggaagtcctgatatgaacttctccttccaaaaatctgaacttgagtccagtctcatataaacctttgatataaaggcatccccataccgcttaaaatgtgatagagtaggacatgttaagctcatcaaaaactctttacgcctatcttctaataattctgtggtccccacaaagcacagtgcaatggtgtaaactaatgtgtttattgtatcttcttcacaagacattgtattctcttgtttaacacctgatgtcccttctattggctcttagactgtagggccttgctttgagataatcaccaagatagccttccaccatcctctaagttgtccaatgaagccactaataatggttctaagctgcatcagcatctctattcctatttaagtgtgaggcttgggcatatatcctcatatgcctcatcgtgtttaatatccaatattccaataacccatctatatttgcattatacgatggatctcccatcatgttgagcttaatcatgaaggtagttttcctcatgttgcatatctattggagtgggtttgtggtaatacatttttgttggagccatagggacatttttttccccaagttgctttgttaacttctaaaggctcccctaagctactcctaaatccttcttccattctatttaaatctccttcttggcccttctttttccaaggcattaacttgcggagcttttccattagatatctgtaatttggctagcctatctgccaatttatttacaaattctccctcccttgaggtagacttgtataatttaaatgactcttttattagagttgaaggaggttggaacattgtcttttcctttccttaagggataggacttgaagaaaccgattccgccttggcctataaattttctatcctagtggcatgcttccctaaagattattttttttgatagataatgcttccctaaagattataggtatgggttggtataattatttgttggataacatgacttattctttctagattggctggttgctccatcccttgtccttctgctttagaaggagatgctttactcctttattgacctctgtaatcccttttggaggctgaatagcctgaacactcttccctgaagccgtcttgtatgtctggaaagtgttcttcaccacattgatggtattatcttcataacctttcactttgtgttttttccataatccttaaaccaagagaaccattcaatctgaatcttattttcccttatgtacttataatatcttttctgaatcaattctctagatttttgagagaatttttcaaaaaactattttcagaggttgtcatttttctttcataaaattcttctttcaatgcctccttatttattaaaaatttgtctacaaattgactaattgaggctacattagagaaagatggatctatttgtctagagtggatatttccaaattaatccctccgatctcttagatttctgacttgagaagctataccctctgtcttgggatttcaaccatataatattgttgttgaatctgttctagggttctcctaatcctttctaaaatgatcttctcatgttctctttcaagttcactctaggggattgaagagcaggatgtccttgccaggaagagggtcctgacctactccttatttctatcagatgggataaattttatttttattcttccatcagaaaacttctcaatactcgctaattccgtattttctatgagttttctatgatttgttatattgtaattcctgtaaacctggcagaggagcttgatcccacttgataatctttggaacatgtacttagacttactagcatttacttgaaatatggtaatttgtcccctcgtgtctaacatcctagcattaggacacaaggtatctataaccttgtagtagacgcggtacactacctctatactatgagatcctggagtcattctaaacccatgcgtctaaagagtcagggtcaaggccctagtaatctctttctcagttagaaccattaccagatttgggcaacaattttaaaatattggtccttcactcaggcttgattcaacttctccgaataaggagtcaaaaaaaacatcatgcatatcatctgttacaaactaggactgaagtatttaaccctagcctaatgattggtataacagccggttgaatcatcccaacatgcaaataagtaaacttctagtccttatgctatgctagcatgttttttagataaaagtgggatgtctatgtaagacttgaaatggaaacagtttttttctattgttcttatcgcatcatgaaacttaggcttaaaagaacctatgtctgttactggtaccttaggaatgttccagttgtgaagtctacaatctacatcaggcattactaccttttccatattattaattctatttttgtcccttaaatttgtatattctttaaacattcttcatgatagtaatcttataagcccttccatttagtcatagagtagctacttaaatgaatgatctagtttctgtcaacagaaaatcctgcttcaaactacccttatcctctgagcaggctcatatgcattatgtgactttggtgtaacccaagcatctactgactactgtgctaccaatgccagtttacgctttcacagactctaataccaatttttctcccaagatccaaattatatgatgcacaccataaaataaaatttaaataaaatagtacaatttgagaataacaccagcatgcaatcagactgggattatataagaacatagtatacacttagattcaagccaagtgacaatggtgtacaatattgggaatgaaggagagaagaatcaagagcatgcttagcaaaaaagactgtacggtagaagtgcctcctccaaacaaccacacccttatttatagatatagtaagccattagtaagccattaaagaggtgaagtcatgccgtcctcactttagctttaatcaatgttttgaaaagaaaagaaatcttcaacttttgaaaagaaagggaatcatgcagctttaaatctgtggagaccctttagtgagtggtaaaagaaccctacaacaatatttcccatttggttgagcataatcctcctcatcctcttccattagcctagttaatgatgatatggatgcattatcatcttcttcgagggccattagaatctttctcttaagttcttattgttaaccaaacttttataaactttatgcggaaataattatttaaaaaaacaattttggatgcataaaacaaaataaatggaagtactaaaataatgatcatattcttaccttgatccatggtaccaataacacttttgaagtgagattgagtcaccttgtgaattgtattgttaaggtcttcaactcactactctcaaatagtggatgggtcacttgtgtggtgtatgttgttaaaaataaaacaacaaaaggacataagaatgagagtgtggcttgggaccttaacttataaaaattgtactgtggaccctcacccgatccactcggatggcgcgactcgctatctctttttttaaagagtagtgtggaatggaatggaaaagtggttttcaagttttgaaaaattcgtccccgatgaggaacggttttgtttggagtcaccacttacttcttatttttattttttaaagggggaaaaattaagtaagaacaaaaacccctgatgactctagtatggaaaaagcggtttacgaaacttgagtctgggtctacggattaggttacctatcaggaaggtacctcatgtgaggtagcacccctctaggctcggaactcggtctctactattgaattgggcatgtgggagtatatgggtcaaggatcaaatagcctcttaggctaatcatagacaacacgaatcacacaaacctactcgatatctagcatgcataggcactcaataaatcaacaaatggcgtacctgaggtctctagccatgccctgcagaaaagatcagtcaataagcatcaatgcacaacaagcatcgcaatccaaatgccatgtgggcatactaacacaaaagccgacaatcaaactcatacctgtggtccctagccaagtgctgcataaatgattagccaataggaataaatacacaacaagcatgcatggcaatcacatgtcaaaacatcaatcactaggtaccaaggcccacaaatgagctcaaaccatgggtcaaagtacgtaccttgggtccctagccaagcgctgcaatgaggggttagtcaacacgtggcaagcattttttaaacaaacatcaaaatgtgcccaagccaaacattcacaataaacccccccgaccttcctagccaataatacccttaactcataggtgggcccacattaattcaaaccaaatctggatttagaccctaaaaatggcctacaagtgccttggagcctaagtgcctaaaccataacaaaaatgggggtcaaaacacgttgaaactggaactacctagcataaccggttgaaccggttcccaactggctcaaccggttgagaaaaaatctgaaactttaccagaatattcctcaaagaataaggaatccaactaaacaaacgacactcaattctgagcccgaataagggagaactggccgaaacaatgcaaagcatttataaaacagggctgccaccaagccacctgttgaaccggttcccaactggttcatccgattgagaaaaaatttgaaactttaccaaaatattcctcagaaaataaggaatccaacaaaacaaacgacactcaattccgagctcggatgagggagaaccggctgaaacaatgcgatgtgttccataaaaggccaaacccaagccacccaaaatgcattgttttctttaaaattcgccacttaagccaatgctttagtagatgcaatttttccataagcctttagcatgcatgcctaaaagggcaaggccacgaatgaaagggcctacttcccaaacaaattaaccgtatttcctacaatcaaaggaaatgaacaccatgtcccctcccttgccaaatctaggaccaacgaggccccaatggctgaatgatgagcacagtggctcagccaatatgccataacctctaatcctaattgaaaaaccgaaatggtttaccccaaattccaaacaaaacagtccaaagagactttttctcaaatcaaaactaaagggaatggttccctaaactagaggtgcaagcccctttttggtattttggaacctagcatgaaagcccaatggcaacccaaaaaaaaaaaaaattgactgcacttccaaacctgaaaccaataacgcagcaaggaccttacttgaatgccacaagcagaatgcaaattccaccctcactatgcaaccaaacaatggagtccttaccccaaacatacatgcaaccaagatcctaaagaatgccatttaatgagcacaaaagccttacctgcataagcaatcagatatgaccaaagctttaaacagttgccttataagccattaggactattaattctctttccacattcaggcttaaaacaaacgaatgcatcaaatagtcaaccaatgccccatttttatttgcaaactactaaggtcaaggcctcaggggccaatataaaaaaaactaaacttggacagcctttgaaacccaatcaatgatcagttagccaagaaaatcacacacaagtaacagcagaagaaaataatagcagaaaaaaagaaataaaaataaaataaaggaaaaaacagaggatctccagtagcaaccaaatcacacaagagatcagtttaattctaaaacccagaatcttacccataaatgggcaccaaaaccccaaaggtcctctagatgcaatgacaaggggaaccacgaaggccttatgaaggaaacaaaacaaacctaaattgagggctaaggaaccctcattccaaacctgaattcgagcaccaaagacctttgcttactcaaagcaaatcaaaactggttgctaatgagagaaatacttgctttgttcacaaaacaagtcacaccatagatgagagcttaggcatgcaataacgaaaatgcaaggatcccagccttatctttcatatacctccaatgaccgtttcaaatgctcaaaaaataacagactcactctcagttgaatcaaacatgcatagtctcagacaacttacaaacttgacccaaagactaatcagcaaaggccctcattttcttgtctaaacagattattgcaacaaacctcagaaagaatgagaatataaaatagcagaaagcaagatcaaagagttacctatgcatgcattgaagatgccgaggtagaaatgacgtcattggggtagcaaacgtccaagttccgctttcagaaatcaaggccttccccttcaacagcacgaacaagaaactactccctctacaaccagaaaatctctcaaaacctccgtctccttcactttttcctctgtttcttttttctattttttttcctcgcttctttcttttcctttctctcccaacacatagaactttctcaagtccagaactcttcccccactctctctctctctttttaagctctcaccctcttttcatttggctttcaccgttttgacagagtttcctcctagaatctagagagaagtccccctcttcttcctcttttttggcttttatatcagacccctttgttcctccagtttccattcattttcccatgcattcagctctggaaaacagcccttcaacctcgaaaccacactccccaataactctcctcaccaattctccatgcaagctgactcctttaagttttcagcttgcttcaccaccaaggatccatatgaattcatggtgggctgcaaggaacccaaaccaaggcccaaaatggacccacaatatagcccaagaccgatttggagcttatgggcccaagccatgtaggaattgggcttcaaaatcatcaaaaccagtgctccatacaagctagctcgatgaaccggttgaatcggactccaacaggtcgaatcggttgagaaaaattatgaaattttgacagaattttccttgaagaataaggagtccatgaaaaaaaacggtgcacgattccaaggtcggatgagggagatatggccaaaacaagcctgagtgctccgaattcagacttgctcccatgcattctgcctaaactgaaattttggggattggtcgagccgattgagaaaaattatgaaattttgacagaattttctctaaagaataaggagtccataaaaaaaaaacggtgcgcaattccaagtttggatgagggagatatggccaaaacaagcccgagtactccgaatttggacttgctcccatgcattctgcctaaactgaaactttggggaccggtcgagccggttgagaaaaattatgaaattttgacagaattttccctgaaggataaggagtccatgaaaaaaaacggtgcgcaatttcaagttcggatgagggagatatggccaaaacaggcccaagtgctccgagctcagacacactccgataaactccaactaagctaaaacttcgggatggccccagttccttcctatggcatgatgccaacaactaggaaaatggccacgatggcactccaaaatgaaccatactcccaccacaatgaaccacatacgaacctaaacaaggctaaaaaaaaaccgactaagcccaaaaggaggccctagtggtgccatacgaaaacatgggtgcatgtgacactcataggataaaagcaagtgtcaagggacaaaattgagggtctacaaatgtacatctcttagtcttcccatcaaagactacatgggagttgtactcattatttacacccattatgtacaaattaatgggtaatggtgggttattaacttgaatgcatctctataattgcataggttatacttttccattttcctccattactcataaacataatgtaccaaataaatttcataatgatggggttacaaaagttgtaacaccacattcatataaattaaattttctaactcctcatttataatttgagtcttccatacataaggctcttggatgcccaatcaattgattcacctacctatcaattgatacccttaaataatatttacacaaatgtaattatatatgcccacacattataggaaaaaagctaacacttatttgaataaggagtgctattgagcgaagatttctttaatctgtgttgataaagatggaacatctgttgacctggattcttgtgattcaattagggcagaaggaaagagagataaaacagattctataggaataacttctggatataaggctgagaacttgagctttttctaccttctcactgaagataagggacatagtcccaaggcccctcatcattagaagttacttcataagttcattttaaaattcacggcacctcgtataaggcgatgaactagaacaatagttgtctattatctacctacttattggtagatttaaacctatctaaggactcctttaataactgtggcaagatatcttggattggttcctaaatattgaatcaatgcttaaaccaatttaatatatcttttaaggtctaagtctaaaccggatatactagctatgaaagaaatactcatattgatatcacaaaacattttctcatgcctttatatcatcgaaataagtataagcactagatctggtattggaaagcctaagatatcttggcttgtttcagttgaaaccccaatctttacaagagatcacatccataatatggagctttgagtatgctataaatctttctttattactccaattgtgttgaatgctgatagatcttgcatccactaatattgccttgtggacgtttttgttcctcccttcatatggaagtgaatgacctctaagattcatagatgaaatttctggaggattcttggaagtatcctcatgttcaattattattacaattactgttcctgaatttataaagggagtggttgcaccttgagaagaactatgacgtttgaccagcagtagggttaactggggtgattttttaatatgttggagagatttttttttattggcataaagtgttataaggcccttataagggcttagcttttcttctttttgtccctacaagaatccttgattaacaaggttaaacaaagaattggtttcacctttaatgcattcaattttgaaatcaaaagcacagagaatggtctgcaacatgccaaagatctattttgatgccaaattttttacatccttttttagatgtctttggttgctttgtaatctaccctaataagaaactcttggttaacagggtcactttcaaattttgtgacactatggacaacgggctaaggtttcctttttaataaataatcttttgagttggtttccatgctcttgaactatagctgatcaaaacctctttttcatcaattttttgcataaggattcctccaaaccctacctcaaaggcatctaccttcatgattttaaaggctttgggatgagggatggataagcaacgcaatatttttgtcttaagcttaatcctttttactgccttggtatgttcttctgtccatccatgtgggttctttctgagtttcttgtatagaggttcacaatctttcaccagatccttacagaagtttgagagttaatttagacttttcaagaatccctgcaattattttctatcttttatttcacctgggagcttatcagcaaacttgattgacctctctattgtgacaatagttctcatgtaaatatgttgtcctaggaattcaaccttgtttggaacaactttgccctttttgccaaactaccaaacttgcattttttaccactctaagaaacgcattaaatgtttccaatgttgataaatatattgagaagaaacaaaaaattatcaatataaacagttgcgaagaataaatatatcattcataatattttggaagtctgacatggcatttttttaatccaaatgttattacattccattcataatggtatccaaagcctgatagtatacacagtatactaccactatactatgacacccctagtgtcattctataatatacagaattgtgtatgtgtattttagctttcatcaaattagtaaaaaaaatgtgaaaaggaactcaattgaattactttgattggtaaccatttagaacaagaaaaacaaatgattgatgttgagaagcaaataatcttagcatgtaccatgtatccttttgttggtgtgttttgttgaattttttggtaataagcccttactgaagtcagttctctggttaaaatgcagttaccacccaattcccattgtgttctctcaagcaa

SEQ ID NO: 10979 - DNA, 5461 bp, Vitis vinifera
  Intron number 1 from transcript GSVIVT01027590001 (locus G SVIVG01027590001) derived from phytozome v7.0 (chr-ID chr1 5; pos 15244315 to 15249775)
aactaggttggcatccacttatttatcaatcatttgtacttttcaaccacaaaaaataaaaataaaaataaaaatatgacatacatttagtaaaatattttaatcattatcttttggcggtgatggcgaactatcgcaaattcatgaagatcttgatgattttagtttttccatattggcaaacatattttcttcttgaatagaatcaaatatccttttatctgctattgcctagtctttcacacatatatttgcttcaatagaatctggcgttaagctgcatcgtttatcactaactactcttccacctacactaaaagcagcttctaatgcaactgtactcacaggaactgttagtacatcacgagcaatgataaaaaatacaggatatttgtgttgttgtgatttccaccatattaaaatatcaaaatcttcatcatcttcaaatgaaattaaatcagtattaagatatctatctaaatcagttgtgttgtttggagaactatttgttgtcttctttcgacttttcaacatttctagagctcctttataaaaagatgaagagcttgtagatgtaggtggtaatttaatagaactaatatcatcaccatatttttctttataatagttatataaattatataataatgaatttttttcatttttaagttcttcaatttttatttggtcattaaaataaataattgttaaccattcatccaaagcttcaaatttcaatctagggtccataattaaaccaagataaaaaattaaaggtatttctccccaatattttctaaatttttctatcattgcaaatattacatcattaaatatatccaaatttaaatattttttaagtacaataaaaatattagttatttgcataacaactcggtttgaagatggataatatacaccacaaattttttttgttaaagtatcaaatacttcaaaaagatctcttaaaagatctgcaatatgccaatcataatcatttaatacatcaatatctgtttcacaatcattgctaattaattgtatttcatatagttctactacttttctatattttataatagtttataaaagtttataagtggaattccatctagtgggcatatccaaatttatatttcttttttttcatatttaacattttggaacaataaaaaaataattcatgttttgcttgagaactattaagacccgcagcaatgcctctaattttttgtaatgtatcatcaatgtgttttaatccattttttacaattaaaattaaaatatgtgcacaacaacgctcatgaaatatttttcattgattttcttttatttgccaatatcgttttaatctatatactgctgcatcattattaaaagcattatctaatgttattgtaaatattttatcacgaatgccaaaatctataatttcatcatttattaaaaatgctatatttttaccattatgtggagcatttattattttaaatgaaataattcttttatttaatttccattcattatcaatataatgagcagttatacatgaaaaaaaccactgtgagttaaagatgtccaaatatcagatgttaaacaaattcttccttcaaaatttgcaaaaaaaaaaaatttgaattttctttttgtgtttcaaaattttttataagacttcttttaaccgtatttccagagcaaccttaaaattgaggattaacagctcgttgcattgttcccgtataataatgagtttccatgaaattgaaaggttgttctgctcttattatataatcagtcatttcttcacgacaataagattcatcataaaaaaaatgtttttaaatttccactttcatctttacctaattgcatataatttctaatatctacattatttttagttttataattttcatgatgcctttttaaatgacttgtacttgcatttaaaccaccactaagaagtttgttacaaattttacattttgcttttatttcttttttattattttctaaatttatttctattctatcaaaaaaatttcatatatttgaagtaaattttttgttatcacatgcattagatgaagaacaataaccacttgtcataattataattattgataaaatattatgctaaaaataataaatgtaaaattaaaatgtaacaaataaataaaagaaaaggtgaagtatgttactaaattggagaaccgaagcagaaattccttcaaattcgaactctttgagccaccaatacttgtttttcaccaccaataatattgaataatttgagacaaaatgcaataattggaaatattgtggaatgggagagagcttaagagttgagagaatgaaataaattgaggatatttaatatttatagggaggtatgtgaccgttaagatttaattttttttttaactgccaagatgactgttcaacggtcatatactttgaaatttaacatttgaagtgagtggtttgttcaacggtcatgtgactgttgaacagtcaactcacttttttttttttcaaaaatcatacaatatttataatatatatatatatatatatatatatatatatatatatatatatatatataactaatgcaaaatagttgcataaaagagggacaacttaattggtggttggctcttcttgaaatccacaagggaagtgttcaaatcccccttcctttaaaactcaaaagacattttaatttttacccaagcccgcccgccaagcctggccagcccattgactggtcaacgggctcagtggcccaccccgagctgggccatgggccttgctcctccgggcagggcggcccggcccgttggagacccttatatatatatatatatataggaagttagatgaagggggttcctttaagtggatggttatgaggaggaacttccaagaatggggacctcccttaagggagagcccaaataatgtggtgaaatatttttacagtgcttaaaggtttacctttttgaaaataaattaagtccagagagtaaatgcaaatagccttttttctacttaaccaagctctataatatcacgttgaagtaccaattttcctaatcatgctctttaacatgttttaaggctattcttctgtcatagcatgccgtctccttcttagctaaatgtggttaaagaaacaaggacattggtgtggtgccaaccaggtcccctttgatgcctagaatagggagaaatcatgcattcgtagaaaaagaggaaagtgggggtgaaatcaatacctctccattttaatagaagaaaaggattatgagttctcattttttattctatcaatcttctacatgtccatgaacttaatgtctgctttttttttttctttattattattattattattattcatgtggtttatatcacaagtgcacgacaaggtgaaacaaccagactagctagttttcagaaaggaaggccaaaaagaactttgtttagtttttcttttgtaaaagtgtgctagtgtgctcaaccaccttcacagtacactcatctgttggcaataaaagtggcaatagcttaaaatgggacaaaagggaagaagactctgatgatgagggcatatggtcacaccccatgagctggctggtcccatcaagatggtccccaaagaggggttattggatttctttttaccaactatatgcctcatcactactaccggtgagaaagcaaaaaaaatgatgtgtcaaatgctacacccctcttctcatgctctaccaaacccacttgtcaattcccatcactcccaccccctagtggcattttttaggaatgaggcatataattctaactccttaattttctttcggttctgagttgattccctaagttttattttagatgtttgtcggatttcagaaaaagaaacaagcgatacttcatctttgatagatgttaatcaattttctgatcaatctctctatcatcaaaggttccaaattgctagaccctcgatcactctagaaattgggtgatccaatgtcaattctttaaccactattaagatgttttgatctctatgtagaagctcagctatcttcactcacaagtcaaatgaggagatgattaacttgtcaattcgtttgtgacatcaagtttgagaatctaccctttaatggaaaagctacatgattagtgggtcactagacgacggaatgttattgaatcatgttgttttagaatcttatgctggtaatagaccaccttacattctctagctattagaaaatgtgaaagaaacaagacccagaaaatcacaaatgcccactgagaagcacgaatgtgtcaagctcataaatgacacagcacataaaagatctggaaaaagggttccttttctctagcattttcccgagaaacatgattggaaagaaaattttccaatcctttctctagcttgttccaataataagtacccagaaaatgcccatcaacaactacaaacgtgacaagctcaaaaatgggagaacagtatgaagaatttggataagggtttccttccccaccattttcctttagaggcatcattcaacacaacataaaatgaaagactcctaaagtttaagaccctctttggttgtataagtataatcaagtgtccatgaagacatgtaaacacctctctccactgaacaatacgaaactacactcctacaagtaattgtaagcagaagtgcttttcttacaccctcaaaattggattttccaaagcgggttgatcagggcgtagggcagtcccacatctctcactctcaagttgattttgcagctttatttcgtgtccctttttcaaaaccaaggcgtgctgttttgaggaaaaggagaggtagtgggtagatactttgatcgtaagtcagttagttattatgtcaactctatgtggcacctttctttgcctatataagccactcttcaactttggacattcttcacccttttgaggacaaaacagaggtacagttgcgcaagaagttgttaattagttgtgtgtttgtgtgtgtataatgggctgttaggtccattccttcatgggtttgggtggtgatattcttttctgtctcatgtgatcagtaggataacagtataacaccttagtatgtgtatcagcagttctgccactgggtcggggtcgggttggtagtactagtaaggcatgttgctgcatacgggtctttaggcccattcctaaattggcatctagttcaaatgtaagtcacatagaatcatgtctagctagcttgcttggcttgtagttttgctgctgggctcggcctaggtttgcctggtttgatctccaaatgttcttgggtgtcaccggcagttcaattgttaattatcaaagctctagtcttctgatctttgctcacgttaccccccataattagtgactaattcacttgacata

SEQ ID NO: 10980 - DNA, 3785 bp, Vitis vinifera
  Intron number 8 from transcript GSVIVT01017418001 (locus G SVIVG01017418001) derived from phytozome v7.0 (chr-ID chr9 ; pos 8280999 to 8284783)
gctccctatcaatccaaggtaaattctaattagaattatcattatatttaggacatataataaatcaattaaattgttttatctattatcattacttggttatttggattttcttgatattgtttatcattttacataggaaaatgaaattaaaaaatcaacccatgcttagtgtttaagcattgggctagaagtatatttttcttcccaatttaatcaaagagaaaagtcataaataacataatttaacttataccttatattgattgaagaggttagactacttttggatttaatggtcaatatttgttgaaggtagggtttcctaaatttgatcaaaagaacttcaatttaaattaccataactacataaagttgtgactagcataattaaactcttttattaatagatgttcatagactagtattacaatcccacacacacaaataattaaaatttgaaattagacttcaaataactatgcaatatacgaaactacaaaatgaatggtaggtcataattaattaaattcgtactatattcaatgttggtcaacacgtgtcaagtaaaagttttggcctaagtgtaagggctcacttgctcctatatagatgttattcactttgggtcaaggcctactttaaaatatctctatacagttatgagaagtctactaaatataaagtcgtagaaacttttcttcttaggtgatttggaatttcacattaggaccaacattttatatattttgaaaacataatttaattaacattttagaactaattattagttatccatttataatcctagaggaaattccttttacctatgcaaattatatacctctagtaattacctttaatttctcatttacaacttcctaaaataatatgaaaaatgacaaagtgtacaatatctaccaatatgggtggaatatgcaatgagacccacaatgctcaatatagtactagtatctatgtcatctaatagcaatgaaagtactaagtaataaaaacaattgttttgggcactttatgcaattggccttgtaaaaaaagaaatctaaggtagttggactcatttactagtaatttaacatatgactagaacctattgaatcatttgcaatagcacttgctttggtcatgtccaaatttattacacatggtgcaaaaaggggtggtgctagaggatgctttgttttcccacttatggaagtctcaatcttgctaatatattttatgccatgtttatcatatacaaatttagcctaagtgtaagggctcgcttgctcctatatagatgttattcattttgggtcgaggcctactttaaaatatctctatacgtttatgagaagtatactaaatataaagtcgtagaaacttttctccttaggtgatgtggaatttcacattaggaccaacattttatatattttgaaaacataatttaattaacattctagaactaattattagttatccatttataatccttgaggaaattccttttacctatgaaaattatatacctctagaaattacttttaatttctcatttacaacttcctaaaataatatgaaaaatgacaaagtgtataatatgagccaatatgggtggtatatgcagtgagacccacaatgctcaatataatactagaatctatgtcatctaatagcaatgaaagtactaaggaacaatttaacgtatgttttgggtacttcatgcaatggccttgtaaaaaaagaaatataaggaagttggactcatttactagcaatttaacatatgactaaaacctattgaagaatttgcaatagcacttactttggtcatgtctaaacttattgcacatggtgcaaaaaggggtagtgctcgaggatgcttccacataagaaagaccctacttaactgttacaaaggttattttcccacttgtgggaatgctaaccttactaatatattatatgccatgtttatcatatacaaatttttctttactaaatatttctttaatgatcttggacctaaaattaaatatttcattagtattggtcatgtcgttcctcaacttttcaacttttagagttaaatctttatctttatcattgatagttttatgtttagtccctagaaacttcaccttattaacaatatgttcatttaatatgttgatatttttaattttcaaagaatcatagagctcattaattttaatgtctttttattcacttttatgctttcaacctttgtttttagttttcctataataatgcatcatagaccccatgtacatcattaaaataaaactcatttttttcattaggattcaattaacccaatggatcataatcaaaattagctgcatatgaacaaaagcaataagattatcattttgtacatctttactttcatttgagttcttagccctacaatcatcaaacatggaattactccaagtcacctacatagccttcatacctaatgtttttaaggcaaggataatcaacaaccatgtgtcccattcccccaatggttcactacaaaatcaaggtacatatgttatgctttctttgtttcatagagattagagaggataaacattgtataaaaaaaaaaattgtcatagttaatgtaagctaaaactaaaaaacttgttttttcaattgtgtaagcatgttttgttcttgattaatatttacaacattcagatttactaatgtttataattcacagagacctcattaacaagaagtaacaactaattgcaagtaaccatgaaaaaaaataaggagaaaaataaaggaaaatcaaggaaaatggaaaaaattttcatccccataaaaaatgctaaggaagaaaaaggtgaagaaagtttaaagaaagcatatttttcaaaaattgaattttctttcccttaaaattggtatggacaaccaaacaagaaaatgatttttaaattcttttttgacctttttctatcattctttttttttccccctactctatttcctttccctcaaactttctaggtagtaaacattacctaagataaatagggaagaaaatattttatcatttattaatttagtatttttcttaccttttttgtattttatccaaatatgagaaaactatttttctttattttttcttttccttgttgcttttcaagaatcaagcatactttaaactctaattaagagttacatagatttacgaagaaacaatgcaactagtaacaaaaaattaaggaaatttaatttttgagagtaggtataatgagattggtttgtttgatacaaaatttgaataaaaattctttcaatgaaaattcaaggaaaggaaaaaaaaaaacaactttatctctagactataatactaaatcacttaaaaaatatcttaacatcgtttatgttcatctttctttttatggatttgaaaaacccaataatttggagaaaattgattcaaggaagaataatttttagaataaaatattattatttaagaagatcataaatattatagtcattgttgaatatgataaatgatttaaaaaaaatggtagttggaaatttagatacttttataagacaaatgaatttttctagtattgtatgaaaaaaggtaaaatgataggctttcatcattttttaaagtagtttgtttaaatcattttaatttattttgatttaagaacaataacttttattacactagttattttgattttcttttgatagattttgcaagcttaagcaatttggagctattggat

SEQ ID NO: 10981 - DNA, 20913 bp, Vitis vinifera
  Intron number 13 from transcript GSVIVT01029958001 (locus GSVIVG01029958001) derived from phytozome v7.0 (chr-ID chr 8; pos 2210473 to 2231385 reverse strand)
aattgaagaggttctatcttcaggtttataaaagcaattttccttttgtttagttatgtagaggagtgaaaatcctttcttatttatttatggttttaagcaaagctctaagaatgctttacatgaatgtttcttacctattatttctctacttattatgttgtgacttgtttctagaataattgacatgatcacttcatcactgtaggcaacttgttctttcctatttgattgcgtatttggtgaaaagtttgctctgtagtgtaattatgtttcaatgtcaataagttactatttttgttattagtggttaaagttttcatttatatatttgttctttctttctttctttttgttgaaaaattcaagtaccaacattgcaatgaccaacattgcatgaatcagtcttctaatgactgaatgttgttttctagatactttccttttcctttttctttccttttccttttttctttccctaaaattatgtatagaatttggttgttgactttccccttcttaggtagaattcaattgtgcagctgcacttcattttatttcttagtttagattagactttgtaactatagacatgtgtaaccatcaccattaaaaaatcaatggaaagaattcagaatttcctcattgtattagagccattctaaggttttacgtcttctttttctcttgactaccatagttgagtttgttaaccagcttgttgctagttctcccataataaaccatggctggggttacatcaggaaacaatggaaaagaaactgagaaggagatggttccaaatgacaaccattctctacagatccccacttgtaaattgaatggtgctaattttctgcattgttccaattagtgaaatgtttgtttgaggcaagggaaagatgggactccttgatgaatcctaaccaatcactaagcttggaaaccccgattttagagcatggggtgtgagaattctatgatgatgtcttggtttgttaactccatcaagctagacatcactcaagggtacatgttctataccacaggatgaaaaatttgggaggccgtgatacttatgtacttagataaggcaaatggcgcatagttgtatgaactgaaaagaaaggtacacaatactcgtcaagcttctatgagtgtaactgcctactataacgagataaatagaatttggcaagagatggatacataccaagattatgagtggaaaaatgtgaaagatggtgtgctgtttaagcctattcattagaaggataaggtctttggatttttgaaaggtttgaatccataattcaatcaagcaagaagttggggtttggggaaggagccaatcctgtccatgagagaagtctttgccacaattgggaaagacgcaagcagacttcaattgatggtgagaaagtcaaattttcaaccaaccacaaggaatacaatgttggaagactcaacacttgtagttaggaaatctgaagctgttgtttttggaggaccaagatgcaaaaatgatgaaaaagataagttgtagtgtgatcattgtctcatgtcatagttgtgatatgtgttggaagcttcatggaatgcctaaaaaaaaatgcaggtaatagtggttattgataacaagcaatgacactagatcctcctagtgctcctgaaacaacaaatgcaacagatgcagaggtgcctttcttcacaaaggaatatatgtagcaacattacaagttcatgtgtcaatcttagaaacaaccttcctcatcacatctcgcccaaaccggtaattttcttatcattgctttccatacgtcaaaacccaacccttggataattgatttagggggcatggatcatatgatagttttgtccaatctcttcatgtcttatataccgtgttttattcataaaaatgctaagatagtagatggaatgttgtcttcggttactagtcaagggtttgttaaaatcttagataaattggttctaaattttatattatatgtccttaatctttcatgcaaccttatatttatgagtaaattgacctatgatctaaactttgtggtgaaatttttccctgcgtattgcgactttcagaaccattgtatagggaaaaggattaaaagtggtagaggtgaatggtctttatgtcttggaagaggaattagagaaagaaaatgagaagtttgaagaaaggaaaccttaagcttatatagctaatgaagaagagatctgtttgtgtcattgtaggttaggtcaaccctagttttgcttacctaaagttgatgtttccaactgtgttagagaataaaaagattattgatttttagtgtgatacttgtgagatttctaaacatcatcatgccttttttcattacaagtttatgaaaaatccaatccgtttgttcttattcataatgactaatgggggccatcgtacgtaaaaaaatttaactgggattagatggtttattactcttacggatgatcattctagagtgtgtgactaggattaaaattaatggggagtggttctttgaggataatgggttgagggaagggatagttagagcttattcttcccttctttctaaacttccaaattgacgacctagaatcaatgctctggattttaaagttttaggtgctttgatgctgtagcgttaaagggttggtttacaaaggaggaggattttagtgctttggtggatttaaatggagataaggctccaagattggatgtgttttttttagctttttggcattttagttggcattttgtgaaggatgaggtgttgggtttagtaagagaattttatgatcttgagaggtttgagaaaagtcttaatgttacttttttggtgttaatcccaaagaaagagggtgtagaggatcttaaggattttagacctattagtttggtgggtagtttgtataaactcttggcaaaggttttggctaatagactcaagttggtattaggtaaggtgatttcacagtcatagaatgcttttgtacaaggtagacagattcttgatgcggtgctaattgcaaatgaggtcattgattttatgctcaagaataacaattgtggggttttgtgcaaatcagatattgaaaaggcctacaatcatgtgaattggaactttttgttggttgtccttgagaagatgaattttggacaaaggtgggttggttggattaaatggtgtatctcttctgccatgttctttgtgatcgttaatggttctcctatgggtttcttcccaagctctaaaggtttgaggcaaggggaccctttatttccttatttatttgttatagcaatggaggctctaagttgttttcttcaaagagctacgaaaggtggttatatttaagtggtaaaggttaggaggagaggaggccatgggctggaggtgtcccatttttttttttgttgatgatactcttgttttttttaaggcttccctaaatcaattggttcatttatgttggttgctcatgtggtttgaagcttgtttagggttgaaagtgaatttggagaaaagcgaactaattcctattggtagtgtggactaggttgaggagttgatcttagtgcttgggtgtaaagttagcacacttccttctacctatttagggttgcctcttggagctccttttagatctatggcagtataagatgggggataaaagacttttgttttggaaaaggtagttcatccctaaaggggggaggcttactcttattaagagcactttatctagcattcccatttactttgtctttatttcctattttgaggttagtcagattgccattggagaaaattcagagggatttcctttagggaggtggaaggttagtgaagaagatacatcttgtgaagtggtccactgtgtgtttggagaagagcaagagtagttagggatttgacgtcctttgttataaaggtgccttttggacatgagtgattaggggcaaagatggagaggaagagggtggatggtggtcaggtgaagttaaagatgggtatggagttgggctttggaaatccattatgaaggaccaaatctctttgttgggttgtttttcttttgtggtgtgtaatgggagaagggtggtggaggttttgattgataaatggtgtggtgacgaactgttatgttgtccttcccacctttatttgtcttagctgtatcaaaagatgattgggtgacgaatgtttaggttcggttagaagagagtgggcattggaacccttgtttttctcatcctttgaatgattgggaggtggaggaagttatggatttatttttaaggttgcatggattggcagttgatagagagggcgtagatgagagggtgtggatgactttggatgttaataagttctctattaagcctttatatgtcgtcttggaaccgagggttgttgtttcttttccaacatgggtagtttggaattcttgggtaccttttaaagttaacttttttgcatgggaggtgtagtggggaaaagttttgactttagattagttttagaaatgcagatggtctttggtaaataggtgttttcttcgcaaggaagatgaagaatccatagaccacattctccttcattgttcattggttcgaatgctttggaagttattgtttgatctttttggtatccattgggtgcaatctactacaattaaggaggctttatttgggtggcatgacgcgtttgtggggaaaaaaatggaaaaaggtttggagagctgctcctttatatattttttagacggtttggaaggaaagaaatctcaaagtgtttgacaatgaggagcattctgctctttttttgaagatgttctttcttaggatttttttcttttggataaagctgtacttagagatagattcttcatctctctttgattttattgagtggttgggctttggtttagggagggtgttgttgttggggttcttttccaatttctatgctttaggcgctatttgtatactctctgtgtactttgtggcatccttgggttgttttttattttataatgaatttggtgtttatttatcaaaaaaaaagaaaagaaaagaaaaaaaaacttctaaaagacaagtatgaaacaaagaaaatttttataagatgatggaaaagaatatctcctagaaattttaggggactatttggctaataatgggatcatgcaccaaacctcttgtgtcaacacttcttaaccagtggattggcagaaaggaaaaatagacatatcctagaggtggctaggagtttaaggcatcaaatgagagttcccaaacactattggggtgaggttgtgttaacaatggtatacttgatcaataggatgcctagttatgttctgaaattcaatacccccttaaatacattcaaagagtttttttcccatggctagtttcttaatttcttcaatgtcacccaagatgcttggttctactgcatttgctcatgatcatagccagggacaaagtaaactagacccagaagctcataagtgtgtatttgtaagggacttaccaacaaaagagggctaaaagtgttttcatccatcaacaagaaggcttcatgtgtccacagatgtcactttctttgaataacaaccatattgctcccagactgttcttcaggggaagaataaggttgatgaagaatagtttttgaatgtgttacttgtggtggaatcttttacaaccgtctcctagaatctgttgagaaagtgaaaatgttgctggaatttctgaagagggggggaacaaaatgttggcggaatttctaaaggggcggagcaattgagaaggattgtagttctcactaatgagataccctgagcaagctgggaaagaaccagaacagtcccaatccgagaaggaaactacacaactccaagtttatattctcgaaggaataaagagaccattcatcaaatgcacaatcaattctctactccaaaaattcttaacttaggaaacaatagtgttaactctcctattttagttcctactccatttgattttaatatcctaatagccatccggaagggagttagatcttgtactcaacaacccattttgaaaattgtgtcctattgttgttttaactatacttgtaaagccttagctactaatctctctggtgtgaatatcccaaagaatatattggaggcacttgaaaatccaaagtgaagagatgttttagaggggatgagggctctgggaaaaaacaacacttgggcaattgtagaacttcgaagagatgaaaaaggcatttggatgcaagtgggtgtttacagttaagttcaaggttgatggaaccatagagaaatatgaggcccaacttgtagctaagggattcacttagacgtgggggatttgattaccaagaaacattcgccttagttgcaaaatgaacactataagagtgttgctctcaattgcaacaaattatgattggtcgatataacaacttgatgtaaagaatgcctctcttcatggagatcttgaagaagaggtttttatgcaattcctgcacgggtttaaaacatatatgggaaaaggaaattttttcagattaaagaagtcactctttgacaatctctaagaccttggtttgacaaatagacaatttccatggataaattggactatagacaaagccaaggggatcatccaatgttctacaaacacgagagagagaggagaatgactgttctcattgtgcatatggatgatattattctaattagaaatgatatttatgagatggaaagtctaaaaagtaagttggctgttgaatttgaaattaagaaccttagcaacttgacatactttttgggaattgaagtggaatgatcaaaatgagggattttcatctcttaatggaagtatgttctagatttattgaaagaaataggtatgcttggaagcaaactaggaggtatattgatcgaggccagtcataattttgatcttggcacactagggactctaatggatggagaaagatatcagagactagtgggcaagttaatctatttgtctcacaccggactcgacattgcttttgttgtgggagtcgttagccaattcaagcataatcctaatgaagaccgcttagccacggtcatggtaattttcagttacttagaaggaacccctagaaaaggatgctgattaggcaggatcaaaggtatatagaaggttaacttcaagctactttacatttataggggcgatctagtgacttggagaagcaaaaaacaacctgttgtgggaagagctagtgctaaagcggagttcaagtcaatggcacatggcatttgtgagctaatatggttaaaatctttattgatagaacttagaatgataaataaagaatcccttttgggctaattaagaaaatattctggtgatatatttctaatacatgtacaagaatacattatatagggagattacaaaagaatagataaggaaagaatggataggaaaaaatctctacaactatacaaatatttacagctagaaaatatctctacagcagtataaatatttacaactagcaattatctttacagctgtacaaatatttacagctagcatctaggataacagctcctaggatctcccgagatttccaacgctccccctcaagctggcttgaaaatgtcttccatggccagcttgctcactaacttatcaaattgcttctttggtagtcccttagtgagtatatcagctacttgttcatcagtgggaatgtaggacgtacaaatgagtccttcctccaatttctccttcataaaatgcttgtcaacctcaacatgctttgtcctatcatgtaggataggattgtgagcaattgcaattgctgccttattatcacaaaacaccttcataggaagactagttaccctgagttctttaagtattcttttgatccaaagggtcttgcatataccatgagcaactgctctgaattttgcttctgcactactcgtagcaactacattatgctttttactccactatgtaaccaagtttcctcccacaaaggtgcaatacccagaagtaaatctcctatccgttacactcctagcccaatcagtatcaatgtaaacttcaactctcaaatgacccgtcttaaaataaaagaccctttcctaaagttccttttaggtatctaaggatcctataaacaagattgaagtgctcctgtcctggtgagtgcatgaattgactaaccatgctcattgcaaattctatatctggacgtgtgtgggagagatagattaatttgcctaccaaatgttgaaacttgtctctatcaacaacatcctcggtcttgattggttgcaattttaagttatagagttaataggagtttcgacagctttacaccctaataagcttgtcttcttaagtaaatccagtacgtacttcctctaggaaacaaaaattcctgtccttgatctttcaaattccataccaaggaaatgcttcaaggttcccaagtctttgatctcaaaatcctgagcaagcaaccctttcaatctctcaatctccaagctatcatcactagttaatataatatcatccacataaacgattaagatagcaatcttatcttcacaagaatgtttaaagaccatcgtatgatttgcttgactctgggtataactgtgactcgtcattcctttcccaaagcatttgaaccaagctctaggtgactacttaagtctatagagggattttttcaacttacaaactctctgtctacctcctttctcttcaaaccccaacatctagtccaaaatacctcttcttctagatctctgttcaaaaaagcatttttcacatctagttgaagaggctagtttgatttgactgcaagagaaagtagaatccgaattaagttgatctttgccgttggtacgaaagtttcttggtagtctatcccgaatgcctgagtaaagccctttgccactaaacgtgccttgtatctttccacactaccatcaactttgtatttgattgttaacacccgcttatagcccatagtcttctttccctcggacaattctacggtctcccatattccatttcttttaagggcgttcatttcttctaaaactgttgtcctccaatctgaatgactaagagcttcttgaacattccttggcacaaacagataaatgatttttttttttttgatagataaacacaaatatattaaagggcaaaaggccacaaagcttacagggagtatacaaagcagccttaaacaagaacgcaaaaaacaacctcacccacccttaagtggccgctagccactccaaaaagcctaagagcgaagaggactcctctccaatatacaccctagcccaattccacaaattacatacaaaagaatttttgagtttctgtatagctaaagatccccccctaaaagctaatctattcctttcctttcataccgtccaaaaaatacacaacgggatggaattccaaatctttttcctttttttccccacaaaagagcccctccaactgagtaacgcctctttaattgactctgggaacacccactaaaccccaacaagggcaaggacgatctcccagagggcccttaccactatacagtgtaaaagaatgtgatttatattttcctcttcacaaccacacaaaaaacaacggttagcgagctgccacccccgtttttgaagcctatctaaagtgagaatcttcccccacgtggcttcccaagcaaaaaaaacagctttggttggtaccttattcacccaaatgcatttaatcgggaaggcgcaggcattgggaacaactagcaaattataagcatccttaactccaaatatgccacgacccccacctttccatagcagtgagtcctcctctgaagatatcctgaattccctgagcatattaagcaatcctcttttcaagttcagctcccaatcattaaaatctctataaaatctaagattctaacctccttgaccaaggcttgagtcccacatcttattgactgttgcattcctatggaccgccaaggcaaatagctgggggaaagtttgggacaacgccgcattgccacaccactgatcagtccagaatttaactctagtccctttccccgccttaaactttatgctatcccagcaccagtttgcctacttcaaatctccttccaaacccccactccaaaagtcccgcgggcttctttagtcctccacctaaagccttcctgaccatatttcaccccaatcaccatcttccaaagattgtccttttcaaaggcaaatctccagatccatttacccagcaaggctttgttcaacggatcaatcttccgaatgcctagaccacccttctccttttgggtgcataccaccttccaattaattaagtggattttcctctccaagcttccccctccccaaagaaaatctctttgtaattttttgagcctttttgcaacaattttaggcattcgaaagagggacaaattgtaaataggcatgctggccagtgtgctcttaattagggtgatacgcccacccgtagatatatattgtcttttccactgggctaatcttctcctcattctgtcttccaccccatcccacatagaaatagctttgtgatgggctccaaggggcaaccccaagtaaacagtgggtagagaccccactttgcacctaagctccactgccatttcctcaatctcttccacctcaccaaccggaattaagacgctcttatctaggttaattctgagactggaagacgcctcaaaccaagccaaaatccagcttaaagcggttagttgctctttcctagcttcgcaaaagatgattgtatcatcagcaaaaagaaggtgggaaactatcatctccactccccctctcccctgaagtctgcagcctaacaagaagcccccatcaaccgcccttcttataagattgcttagcatttccatgcccaatacgaagagatacggagaaagaggatctccttgccgcaaccccttggaattcgagaagaagccaacaggcaccccattaaccatgactgaaaatttggcgattgagatgcacgaccaaatccactccatccactgcgacccaaagcccattttaaacaaaactttcatgagaaagttccagttgatgctatcataggctttttcaatgtctaatttgcagatcaaccctttctcttttcttttgtgccaaaaatcaatcacctcattgaaaataagcgacgcatccaaaatctatttgcccctcacaaaggcattttgatccccagaaaccaccttgtctaacaccttcttcagcctattcgccaacgccttagccaaaagcttgtacaaccccccaacagactgataggccgaaaatcccctaggtcttcaacacctcatttcttagggatgaggaccaagaaggtggtattaaggcttttagcaaaagatctttgatcataaaactctttaaacaggtccacaatctcctccttcacaaactcccagcatgattgccaaaaggccactgtgaacccatttggacctgaagctttatcaccattcatttccattaaggcagagtatatttcctctttagtaaaaggcagctccaaaacttcagcttcattggaattgaggcgattgaggtgcaacccctcaatatcagctctccagcctggctcttctgagagcaaatgctgaaaagcattcacaatcccctccctcatctcctgatcctcagttatccacaccccattaattttaattctatccagggaattattccttcggtgggcatttgccattcgatgaaaaaagccagtgttcctatccccttccttaagccacaactcccttgacaattgtctccagtggatctcttccattaaaacccactttttaaaagattccttggcttcttttttcatctctgtttctccttcagaaaggctcctctcactttccaccccatcccagaactcaacttgttgaagagctgagtttttattagcttccagcctaccaaacactccctattccacactttgattttttgcttcagtccttcattttagtggctaagctgaaactgaccctctctctcacctcagacccctgtcaccatccccgaagaaggtccttgaaaccattagctttaagccacatattttcaaacctaaacggggaagggccctgccttaacccacccctcatcaataagataggaaagtgatctgaggtaggtctgggcaacctgctttgaacgaccccattgaaatgatcaagccaattctgggtcactaggaacctatccagtctggcccaggcctgattattcctccccccactccaggtaaacacacccccttgcaaaggaagatcaatgagctttaactcatcaacaatttgggcaaaccttctcattgctcccattagccttccctgattactcctttccctctgggatagaatgacattgaagtcaccccgtaaacaccaaggatcatcccaaatgcctttgatcacccctatctcctcccacatacactccctatcctctttagagaaaggcctatacacaccagtaaacatccaaactagcccatcttccacgttcctcagcctacaggaaattgagaaatttcccacctccatttcaagcacctccagggtccttttatcccagcaaatcaataaacctcctgtagaaccatgggcatccagggtaccccagtcgagaaatctaccaatgcccaagcttctcaccagcccctctatcattgcctgaattttggtctcctggagacagaacaaatccaccctttgacttctgatcacgaccttaatcacctttcttttggaactgtcgttagctccacgaacattctaactcaagagtcttagcttcatttaaccttcttgatctgacaccctcttacttgcattccacatttctgtttttttcccccctcgtagttaattgagcactctaatcttttcaattcccttttgaacttagatttttccagaagggttttgctgtggactctttcccttctctttcggattttaaccaaaaaatctaaaatgtctttctccagtccttctgtcggaaaccccaaaaacttactaaatttggccaaatcactttcctcccaactatcctcctcccaaccctttccttcttgtggcatagattgaactaaacacaactcctttccacagttttcattgtggccattattaacctccgtcagttcccagcgactgacagtctcctcttctatgggccccggagtgaagagcatgcgtaacagggtttctctctggaatgtctccctatcgtccccagaatagttgcaatactcccccaatgaagccaacaaaccacaagggttaggagcactctcatacctcgacgcttcctcaattagggcaatgttagtccttgatctctccacggattggagctcctcctcaatttgcttccgccggccatccttcacccagaaaggggagctttcagcgtctggacccctcaaaggacttgggccagcccacaccagtggcagggccacaccaaagctgcccaccaaagattgggatgggcctcggcagtcgtccagcctagtcggcccgggcgccccaaaggcctccaaggccttaacccacttagtgccctccaaagacgaaggcccaggagaagatgccccagccttagaagaaggggataagactgggtctagcccaacgggcccagagcccagattagagcttcgaggggccttagaagggccaggcttaatgggtccccccagaaactgcagacctccctgggcccccacaaacgacccaataaggccccgagaccaacccaaatggtgccccgacccacttgtctgcccttgcgtcccatcagcagactgcaagtgggtctcgatccttgcgtcttcaacctcctccaacacgcgcttgcccgggcgtgcagagacatcaccctcaatctctccttctgcttcgctgttcttccccctcttctttgtcggcatcgatctcattaccggccttgccttacctcccaccacaaggttattgaataacacacccctttgacccaaatttccaccacgctagggatctcctcaccatttagcttcaccagaatccttgtgatgtaggacaaccctaggatggttgcctacactcaagggtaggtgggctagggttttatttttagggtgtaaggagaggaacaaggaataaactttatggtagagaaaattataagataagaaatagagagaaagaagaaacaatgaagaaaagatggaaaatcttagagtctcactaagaccttctaggagtctcacctagaagaaaatcaatggagtctcaccattgagggttgcaaccttgcaatgaaagaaagtataatattattcatcaaaattcattcctttgatttacattgattagcctatttataggcttctctaagaaatccaaagtctactaggactctaataacctattctactaggactctaataacctatcatgactcaaattctaattatattaatcctacttaaagtttacttaggtcttccctttcttccttgaataaactttaaaaggctttcccccatcaccttgccactgcaactcttccagcttctccgtttgagaatcaatagctaaaaatcccccacatttctcccctgcctttctaaggatggcccaatcccataaagagatgggtaaacccacgattctcacccatgcctcactcttcttctctccttccatcagacaccccgttttagggcttcatttctccagtcgcagaaacatccccctaaccaaaattcttcccaggtttagagcttttttggcttcaacaaacatctcaaattccagtagcaccttacccttttccaacttagccaatcctaagttgcccttcaacccccaagtttgtgccatttgggtcccccaacttctcaagtcatcccccttcattgatcttgggtcccaagagccaacgaggtagtgatccaacctttttaaattgcggctaaggtccttatggctgacttccaccttagccactgatctgcctttgcgactttgcagcttaaccacttcggcaaaagttttccccaaaatgggctctgatggcatcgcctcgtccttctgactctccttcctctcggtagcaacacccaagccccgaagcatctccaccattgaaacccagcccccttacactccttttccttttgggataaagatgttgaaccttttcttctccagatccacgacacccagacaaatgaagcatccccccttgttttcatcacgcagcaacgagtagatcctccctctttccttccaatttctttcccattttctagttcgcgtgtccttaatgcacagaaccggactttctacaaagagccctagactcttcggtcctagcttaacccatgaagaaacccctcttttcctttccacaataatgacttgcactttgcccttcttcttttctacctcgatctcgaaggtcttcgactccacatcgaagctgctcttcctcaagctatttcgaggctccaagcggacgttgctttctgcaccctcgctcgcacacagattcactcgctctcctccatcgctctcgctctctctctctccagccctctctctctctcgctctcctccttttctatgataagttcttgggattaaacagataaatgattttagaagtaaaggtgctatgattttcagacagtttatggtaagataaaaaatttgcaatagggtgtttggtacaagttctaattccttttctaagagcaatagaaacatcgagatcaatgaattgaataggattagaagaggaatctgatatccctggaccttaagaaatcagtggggctgatgattgaccttccagaacagctggattgtctctagtagtttgatgaaattttcttcttgtataaacatgtagttcaataggattattattattttggagtgtttctccccctgcttgcaactcactatcctttaacgtaaactaggctcttctattttttctctatcaaacaattcaatcccaacaataaaacaagtatcattaagagaaatatttgctgttggagaagaaatttggcaaaactgatcttcattttctctctccccctaaagagaagttttgtgaaaaaaaaaaagaaaggtatttgcaacaaaatgaacatccatactgatatgaaatttccttgttactagattgaaacatttgtaaccctttttattcaaggcataaccaacaaaaacacatttttcatccctaggcttgacttattccttagatgactagttatgtgaacataagcaatgtaattgaacactttcaaggataattctatggtaagttgatttgtagggaataatttttgcaaacactgcaggggtgtatatattttaaaatagggctagacattatattgatcaaataacaagaagttgaaatcatttcaccccacaaatattttggtatatgcatggaaaacatgagggaccctagccacttctaaaaagtgatggttttaacgttcaaatatattgttttgttgggttgtgtccctcctagtggattgatggtgaatgcccttttccttcaaaaaaagtccccaaacaatcattgaaatattctgtaccattatcagtttttaaaatattgatttttatttggaattgtgtttcaacaaaagcatagaaatctttgaagatttgttcaacgtctgatttatttttcattaagtaaacctaacacaattgagtgtgatcatctatgaatgtcacaaaacatctttttcccttcaaattatgaattttagagggccccctcacatcacctatagattaaataaaaaggttttgatggaggatatgcctttattttataagaagttcaatgattttttttgataaaacacaaggttcacagtgcagcaaattacaatcaactcctcttaaatattcctggaaataaatgttttaaataggaaaaacagggatgtcctagtataagattccaaagcattattctatcataagtagaagtagaactaacactagcaccattggacttgtttatttttgaagaccttttcatcaaaataatagagaccatctttcatcctagcattaccaatcatcttcctcgtgtttcggtcctaaaattcacaatgagaataaaaaaagggcgatgcaacaattagagtctttagacaatttactcacagacaacaaattgcaagtaagtttaggaacatgtagaacttattgaagtacaatgttttttgaaatacaaatttagcctttcgttgcaatggatgagagactaccatttgcaattcggacctttttattgccaagacaagggatataagtttgaaaccaacaagagatactggtaatatgactcacattcctagctattttcttttttttttaagatcccaacatcaatggcctcaaggattgagaaattgcaaagggactttatttggtttggggctagggatatgatgaaaattgaaaagctattagagctattatccaagtaaactacaaccaagttactccaaacaccgtcagagccaagatttcttaaggaaaaatataggaaaaaccctttgcaaaagctgaaaccaggaacttctcgttaatcactttttatatatttttttggataatcatcaaaagttcttacaataagcaagttcttcttttttataatgacaaccctcaactaatttttaataacaaaaattgacctttggacttctaatttaataacaaacctttcccatgcaaatcctttatgttttcaaactgctataaattgtctagtattgactgtatcaggatagcaagagatatcatcttattagttgggatatggtgtgtaggccaaaggagatgggaggtttgtggttagggaagacttccttgagaaatagtgcacttttaggaagtggttttggaggtttcttaaggaaagttgtggtatttggcatcatgttattgtgagtatttagggacacatcctaatggatggaatgtcagcattatggttagatggtcatacagatgtccttgaaaggctattgcataagtctttcaagaatttgccccacacattcgctatggtgggggggagcggtgtttggggagagaatcacgttttgggaagatttatggtggggagtcaacctttgtgttcccaatttccaggactttattgagttattctaatgaaaaatcacaccatcttagctgtccttggtagttccaacttgccttggaattttaatttccaccgtaatttcattgatgttaaatggattctctccaaaggcgcatgtcttcactcaccttgatgcggttgtcttgcaatactgcagatttaagggcatggtctttgtcctcctctagcttattttcagttaaatctttctccagttcccttcttttcaaccaattttgtttggaaatcaaaagccccttcaaaggtcaaggcctttgcttggttactggagcacaagaaggtaaataccaatgacttgttacagatgagaatactctacaaatcccttagtttgcattggtacattttatgcaaaggaagtggagaaatggttgaccatctttttctacattgtccattagccttggggctgtggcataagttctttaggctggcccttatggattggatgccgccaaggagtattagagacatgatgattatctcttttagatgagtggggaattcattgagaggcaagactctttggcaaattgcttgcctcatgattatttggattgtatggtaagagaggaatgctaagatttttgaggaaagatggagaacataagagacgttgtgggatctacttcatttatattcctccctttgggcctcttgctccgtcgcttttaagggagttccatttaatgttatgcaactaagttggctttcagtttgtaattcatagggggtggataacattgtgagaagtttgttctcaattttcttttattttgtgtagttctcattgtatagtgggtatactctactatcaggttttgtatgtgtgtgagaaggacccctcatccttctctttttattatatcaataaaatttatcttcgtttcttataaaaaaaatgaaaaggaaaaaaagaaatgagttggggtcttccctgtaagggcttgtcagggtttctgaattcctactagcttttttgatgtttaggctcagaagttttgctgaaattcttgtgtctgtagttcactattttcctgaagggcaccttttaaaaaaggtcttttcacctattttcaggtaattagtcaagatataacattggcatgaatatgataaacttattcaagctgataatcttacaagagcatacaatacatttaataggagtagctttattttttctgtgtcaatttttgaatttaagtgggaaccaggaatcttatttcatggatctagaattcttcattccatatccttctccagttctgacacatgcttgtataaataaaatgttgattaactttattcaaatacattttacttaattctggagcaatttaaattgtaatttttgtttcttcaaacaataaaaaaaaggccatgaaaaaactaaattgcagaagaaatttcctgtgccttaaaagattcgttcaactgtaaatatatcggtagattggtttgaattcctaagtatggtccttaaaattgcaaccccctgctttctgtcttttatttttttttaatttttatttgtattttctgcatgaaaaagacaaaggacactgctattaccatggattcatgataccctgcatcttggaactctgtagtgggaccaaacactgcatgtggttccttcatatgggggaactccaaatatctaaactgtggaatatccaaaagagaaaaaaaaaaaaaaaaaaaattctaggtgaatatgtgaatattttttattttctgtcatgtctggatgtgtatgcatgaacatgcctgtagatatgcttaagatgttttctgcaaaaaaaattcagtgaagtgttgatttctaggtgaatatgtgaggaacattttggaatctcattcagcatgttattggacaataacttaatgttattttatcctaagcattttgtcattggcagttgatgtgcgttctgatttaattattctcaaattcatcatcattaaaatattagggggaaatatgtgattaatatgattaaataaagttaactttgataacatagattggttcttagcttggagaaaaaacagtagttaaattgtagtttagaattttcatataggacctgggcatatgaagtttttgactaaagttctatctgttggctttgttaaggtgagaaatttatctgtgcttctgagtttaatatgccatgtttgatttgattaaccttgtctttgacagaactctcttttgtccttgtcctgtgttcttgtctgcatgcttcactttgtgaatgacttggccatgataattgattcgatgcatctcttgtattataatttgattgctctaatgtcaataaccctattagttagaaattcttttcttgttttacaagcttagaatgctatttcattccagtaaactctcagaaagcagctaactatttgagtattcttttattcaatttttcagtactcatttcctccttc

SEQ ID NO: 10982 - DNA, 3846 bp, Vitis vinifera
  Intron number 3 from transcript GSVIVT01008200001 (locus G SVIVG01008200001) derived from phytozome v7.0 (chr-ID chr1 7; pos 4746446 to 4750291)
acccttgaggaattgcgtagagaggtttggtatgctactttttatcttacaactgtagtttagcagtggtttttctctacttgagccatatgtaatatttcatattcagatggtttatctaaacctagaaatgcaatctgccaaaaagtatttattgctgtggtttccatatctcctgttgatcagaaatatatgcatcctctattttggcttataggcttgttgtaaatattgttatacagtgtgtcttatatgtcttaactgtagcataaatcatttatatattaaaagcttatggtttggaaggctagcaagagtggggtattctttgtgaggtctttctttgttgcattggaagcggagggtgaagtgactttaccctcaaagatagtatggggatcttggccacctaccaaagtaagttttttttgcttgggaagcaacctagggacagatcctaactatggaccaacttaagaggggaggatgggttttggcaggtttttaacgggtcggcttggtagctttgtgggcaagaagagaaggaaggtttggagaacagctcctatttgccttttgtggacaatttggaaggaacaaaaccggagaacctttgaaggggagaaacgcactatccaagctcttaaggatttgctaattactaatctatatttgtggtcttgagggtttcttcttggtaatggtcaaagaggtccatggtctttgttagtttttatagaatggttgtgcttcaagtcttaaatttgggttgtagctacagtagctggtttttgttcctcacttgtatacttccggtatgtagtgtttgccatattagtttgacacttttttttctatatatatatatatacacacactcttatttgcctatcaaaaataaaataaaaaatgcttatggtgacatcatattatatgattatttctgatatttcattggaggatttcatgtgacagcctgtaagtggcttgatagcagtgaaatgctgcacatgtggcttttttaactttaatgtttatctctgttttccttctctctttttttttttttttgcctcttgagacttatttgggtgcttggaaatgacatccatcatgttagacatttttgtctcagatttttccatctgacaattttctttagatttccatttagggaagtagatacatgaaacactttttaggggaaaaaatgtgaaaattttggtgtcaacaccctaaagagattgaagtttcctctcaatatagtaatacatgtcatgtatgggtaattggaggtgtggcttctaggccatcattacagcacatgcaatgcatgggtgtatgttaatttgcatattgtgctggcttgcagttttctttttttttctttttttttttttcttttttttccatagctgattcaatggagctgcttaaataattagataaaaaaatttgccagatgctttccagcaaaatactgctgcagggttcaacatccttaactcaacagagccttaatccaattggctgcatgaatcctttttcatcatccagatctatgaagaaccataccttatgttagatccctggcaattgtgcctttcctaactgtctctaaccttgtattttttggcccacctcttgtccttttggtgccatcaacaatacaaagctaagaaactgaaactgatgcttatgaaacaaagaattaactataaaagtttctaaaaatcagagcagttgtgagcttgagaatgatgtgcaaagagctgctcttcaacctttttccttgcacgtgaggattgctgtatcttcttgcttcaaaggaacaaacaaaaatggtgctgatattgaaagaagtagtaggtttcctatttcaattctccaaccatcacatttaatgaacgttattatgagtaactactgtccatccagaaaagagaagtaagattaattatttgaaatatgagggaaaactaagaaaagctttctatactcattggagtcgctacttcctcattggaggataccccaatactagataagttggtctgactttgacttgcttccagttgatttgtttcaaatgtcagcctgtatcatgtctctagtaaagtctaccatcatctctagtccagattcacaatgtttcatgtaatttattgttttctagctttgaggattttagtttttaaaacatgttaatgtttaattctactgcatttctaatagtttctgttagttgttgctccaaaagctttgctaattcccaggtttcatgcttgaatgaaaatgcattaacaactctcttatttatttatttatttatttattttttataaagaacaaaaacattttcgttaacagagtaaaccagagaaggatgtgaaattcttccctaaatacaaaacctgatcaaatcaaaggaaaagaaaaattgaccaaaagacatcaaaacatcttgacataaaaaaaaaaaaaaaaaaacaacactcttatttctggagctgtcaaatggattccgttctttctgaagttgaacatgtattagagagtaagaaaggagagcatgataagttcctatgcatagtacatatctgaatgatatggttttacataatgtgcttactaagagatggctattggctactcattggatgcattcttggaatcaacctcttcaatgtagattagagtttgactttgatggataagacttttgggaaactttggtgcaagtggacttggaagcactttttagacatcatttgagagaggttaagaatatcttttctatgtctggtgacaagggtagtgccatagaggctgaagtgggggctgattatgatttggctctatatggcaagagtcctcatcatggggaatttcttactgaaagtgttcttgtcctgctacatcttgggaaaaggtggaagtcctggtagttggtttcatcggcattggatgttagaggatgttggattaacagttcatatcaggttcacctctcttgggtgcaccaatttgccaatagaggcagattttctagttaagcagggaatgaatacaggcaaaacctcctctgaaaatgttatccctacttgatatgcctctctcctttgttgtaattttagtcttgcacatttggctgttctatttgatggatcatcttgcccttctctctctaataaaattgttgtttcttgtgaaaaaaatgtcatgtgaatattaataaatttcattaacaagcattaatcctaacatctaattggccctatataccatgttagaatgacttttacaaactggggtgaacgtcatgctgcagctaatgtggcacaacaaaatgtttttagaatggcacaataaaatcatgtcagtcacaactcaaaaccatgacttcaattgggttgattgcttcttagaagcactcctgaaagatgaataagtttagtaatcatgttgctttatgttcctcaagttgataaatgaataatgctataaacagttaattaagtgatggtggttttggagatgcataactgaagtagcaaatactagaatgtagagtgaattacatgattcttttttctttaacattctttttgtccataccgactcacctggaacctcccatattctttcatttcctgggacacgtttccttactattcgctaaagaagccaagacagttatattaaaatgatagctttgccactaagttgatctaagaagaactttgtttgatgagttaaaattttcattttcttcaaaattttctccaactcagaatattttataaagtgaaattcttttggctctattttgtaggtcagttgcat

SEQ ID NO: 10983 - DNA, 1240 bp, Vitis vinifera
  Intron number 5 from transcript GSVIVT01017049001 (locus G SVIVG01017049001) derived from phytozome v7.0 (chr-ID chr9 ; pos 3778320 to 3779559)
ttcagcaacctgctcatattcctttttacaggaaggtatgttagtaagcatcaaacatttgccttctcaagtggttttttggagcttttctacagaaagattactattagcaaaccccaatcattctctgaaataccatattcttttggttagcttgtattagaacagacgaacacacttgataaagctaagtgaatacagggggaaaaaatgccgtgcagcaacttgaaattcagttatgttaaaaatttaaagttccaaatagcagaaggctctctgtagaagaggaaatgagactgttgtgtccaagtttacataaagtttaacacaaaatggtgtctgagctgtaaatggctgatcattgttaattaattgttctgatcactaggtcctgatccaattgactattaatttctcagtattctttgaatgttttttttttcttgatgataatccttatgtttctcaacattacaaattataatttgtagtgtgaaacagtgtatttgacaacctaaaatgacaaaatattgacaattcaacaggggcagatgtgaatcaataaataatgggtctacattccttatcttacttttttctgttgggcctaatctgcatccttcccttaaacttgggttatggcatttttgcttttatatatgttcagcagcaactagttttattacaggacagttcaaaatctgtgtataaaaaaatgggcaaacattcattatatttgcacaaacactcgttttatttgcacaaacagacaacgaaaacagaaatgttattgattctccaatttcagtgagagtaccataacaaaattagtgctaatggcagtaaaagctgggaatattttattctgctcccactttaattaattattattttctcaagacttttaaatcaaaaaagtttaagaagatttgatggtcatatcatgataaaaatctagaatagactaatattaaaaatgttttctgtaacctgaagttatggaatgatgacactacttattggaactaacctccattacgctccatcctccaacttatttataagtttaatttagcgatttgcagcaattgaccgggagaattgtatgagtgtgagttgggtaatttctattcagttgccaaaaatggcaaaagttggtataaaattcagcatttcttcatgttgtatgtatctttgtgatgcaggtatagaaaccttattgagagagctttacaagcaa

SEQ ID NO: 10984 - DNA, 22307 bp, Vitis vinifera
  Intron number 5 from transcript GSVIVT01029407001 (locus G SVIVG01029407001) derived from phytozome v7.0 (chr-ID chr1 7; pos 16598404 to 16620710 reverse strand)
taattgatttatttattgttttaccgcttcctcaagtaagtcttctctctttcatgctgacgttttcttcttgacctccttttgcttttgctttaagtcaattgattgtttctttgtgaacgatgatgttttttccttgacatccttttgcttgaagttttaagatccatatgctcaatattttcacattgttataaataaatagaaatcttgaaattgactttggttttttaatgaggatctatgctgatgtttatttttcagataacttttaattcattttgagagattgaaacattaattactaaattgaaggatgtacatgtaacttttagttttttatttcaaatttatctttcttttacttcacattaataaatgtcttcgagtttttgatggaccatttattgatagactgaacaagaaggttttgtgagaaattgtttgtcttaatttttctcacacaacttggtacttttgtttattttgtcattgatgttaaaaatcttctactgagagttaagagacaagcttgtcatggctgtcatgcaaaaacattttgtatcttttgattgtgttcatggttgggaatctgttttctaaattttttttctccatctctgaatcttagaagttgtcttgatctaaattaaaatcaagtaagattggacttccattgcttgcgaaaagaatccgatgagttccttttcccttgattttatacttttctggtattcatgaactttaaatatagtttccaggtgtagggcattttctttagagaatcaagaacttgatatttgatgtttttaaaattctgtgagagtttttgggatgagcagctatctagtgtctttgcttgctgtaaggaaaaatagggttgagagaggggtcaaggttgactcatgaagttgcactcacctttttctcttcttcttcttccttccattttccattcctagatcctgctaattttactactagtcatgggtcaatgttattatggagttgaatcaaagaatcctaatcaggggctacaggaggttagaaaactcactgattacatctgtaaagatgctgaagttgatactggtacagttgaccagtaaggaaaaccatattcccttggatccgtctcttttaaaccttcctatgatacttttccaatatatatgttggtgttctagaacgttttcttgtagtaggaaaagtactgtaggtatgcttaaaaagtggctcagaaaagatgaaacaaatgaccaaacttcaaagaaaatacacggctctatttgggactttaaaatacttttgaatagtgttcttaaggttgtttaaaacaccagcacaaaagatggaaataacctccagatttgtgaattttacccaactcatatgcagtggaaccatctttgataaaagaataaaaaaaaaaataagaattgtacttcaaagatgcatgatgaaaacagtttcctaatctacttgtaaagttactggttttctgtgaaatacaggtcaaggaacgaacttcatatataaacacacaagctttaaacaaaatgcaaataagatatcaatgtcaagcatggagagtgaaactttactttttatcaaagaatcaatctgaataaaacatgaaatgacacaaaaaaattagaattgtactggtcatacattttgctgtattaggcaaaagaataatcaaatcaagtgcctaatctaaaaaataagaacgacttacatttggtaatattgattactgcccttaggcagtcaaatcctctgttctttgtcttcaagccatcctggcttatttatcaactcaatgcttgtttgaaggtttatgctaatttccatacccagtaaatattgagattcaaggttcaatatcaacccttaatgtttggggatgatggagattaggattttaatctttgaaacatctagggatttggatgagatggaggcttggagtcactcctcccttcctagggttttctcattaaattcttcttgttcatatggatgccaaagcaatacatctttaaacaaaggtctaaagacttgctatttgaaacccaatcatatttggttcagcagcaagcaaaattgaggaaatagacctgagagccataaagctctccagcaggctggagtggactatggttgatagagagcaaaactactgttggttttacctcaatttttttgccttcactccaaagaaacagaacattgaaggaagatgctatcctctgttatcaattattagagaagcaaaattaaatgcttggagaaagggcaatccatggcctcttaatccttatgaagttattattggtatttttttttttaagcttggaataagaattaactctaatatcggttgaaataatatatttaggttaattttcagaattagaattaggaggttgaaattgagtgttcattcgtattcccacaattctacaacataatctgatagttgaacttacatagcccttggtatcataaatatatttccatccaagcttggaagagactttggagatagatacctcaatgtgcaatctatatttaagccatctaagttcccactctaacaaatgatgttccactgctttgatgccatttcaacctagaacataaaacaattcataaattaaaagataaattctgcaaatgaaatttaaagcataaaatgaacacataaattgaacatagaaatacaaaaattgaatctgaaaataaaactttatattgaaattatgccttgatacaaagatgttgaatctttgattacaagctattgacaacaaagggttttgattacaaaggaaagctttttgaaaggagagggattacaaaaagctaagagaattttttggaacactcttgctagctctaattgtcttttgtttgcctttaccttgtgatgaacttgatgactctaattatagagaaatttgatggactggaaacttgttgaagtccacggaattgaaacttgtttaaatccattgaattaatgaagtagacaacttgtgttgttgtagctcttacatcttgaagcttataaggaatcctgaacagttcttggaatgatttgatcttttatctcattcacatcacctttctactattcacatcttgtaaattttgtctcacggtttttttttttttatatatttttttattttatccataggatatatataaggtttacatgggctatgaaaataattatctagattcacccataggtccaccatataggattaattttgggcctacatatgaatcatctgaaagagttgtcttcattttcttcattattattattatttttttatcagaaacgaagaaaaatatattaaaagaagaaaagatacaaaagaaagaagagatacaagagaaagagaagaaacaatagaaggatgagaggttcttccgaccaaaaaaaaaaaactgaacaaaagagaaatcactcaactttagaaaactaaatacaaagaaaaaccccaacactctcaaacttttgaaacgcaaaccgtagtctagttgagttgtaaaacactaagaggaactccgctaaaagctgcagtacaagaggctcaaagagaggaatagaaaagaagcaagtcccataacatctcttccgttctccccttatcctaaaaaatcctattgtttctctcttaccacaccatccataacaaagtaaggcaagcgatttgccaaagtgtcttgcctcttaatgaattcctcatacctttaaaaacaataaccatcatgtccccaatactccttggagggacccaagccaaccctgctagattgaacagcttgtgccagagtccaatggtaatgggacaatgaagaaaaaggtggtcgatcaattctccatttcctttgcaaagaatgcaccattgaggacagagggatttctagggtcttttcaattgcaacttgtcattggtgtttaccttcccatgtactactaaccaagtgagggccttaacctttgagggggcttttgaactccacaaaaacttggccggaaggaacaagataggatttgagacttttgacaaggccaaggaaaaagatttcaccgaaaacaagcttgatgatgacaaagaccaaactcttgaatctaccaaagaaggagagaaaagcattgaactaagggaggacatgattctctaaagtagatcaatttctgtattagtaagattacgacgaaaattaaaattccaagacagtggaaaggaattgccaaggacatttgagacagtgaggtttttcacagaaataactttataaagaccaaaaaattgagagcacaaagtctggataccccaccaaagatcttcccaaaaacggattctctccccgttccccaccactaagcggacaaaaggggagaaatcctggaaaatttgagcaatagtcttccaaggacatctgtgtgaccataatttttcttcattattttgattatctcaaggaaatcaatgataattcattattttgattatcactgatctacttgagagtttgaataagtccttgtcgatattgttccagatctgtagcaacggttaatgaaacttgacattttgaagtttatattctattttaatttacctttatttacggcgaaaagttcttgtcccgttttttcataatattgagtaggattattctttcttgtatacaattcatatcaactcctgaattactagtactattatttttactttgaagtcttcaactattaatcttacatttgtatatctttgaaaatttattttagatattgtatttataaatgcttctatctgagtttctttatctaggattatgattcctggatcaaatgtttcagcaaaatttacttgtttgtattgtattacatttcttatttgttcattttcttgttttatttgtttgttttcttgttttagttgatctatttccttttttatttcttatatttcctctttcaaatcttcaatagttatgagttttttaatttttttaaatctattaaatgtttcatcatagagtattgagttggtctaatttcttgagttttatttgtattttccgtgaaaattaaatttgttaagttttgtaaatattttctttgtctcttcatcatctattttgtctataacatcaaaaaaatatttgtttatccacttttgaagaaatcatgttcgttgttttgtttttattttgaatttatttatttacgttgggttgttgttttctgttttgtttgtttcttttttttcaatttgtcaattcacctatctcaactttctcaatcttttcaaccttttgaattattttgtctattgatgttgatgtttctcctaccacacttgtatccttatctttttgttttgtgtgtgtgtagtagattcttttggtacttcatcatttatttcacatgtttcaactttttgacttttgtcaccacttgtttcacccttaattatttcacttgatgcttctactttctccaattttaatacattttgtatttcttccacaatagttcataaataaaaaaggacataaaactgttcataaatcaaaagataaattctgcaaatgaaatttaaagcataaaatgaacgcaaaaattgaacatagaaacacagaaattgaatctgaaaatagaactttatattgaaaattataccttgatacagagatgttgaatctttgattacaagcttgttgaaaatagagagttttgattacaacggaaaagtttttgaaatgagagggattacaaaaaaagcaaagagaattttttgaaacactcttgctagctcagattgtctctcgtttgcctctgccttgtgatgaacttgatgactcttactatttatagagaaatttgatgagcttgaaacttgtggaaatccacagaattgaagcttgttgaaatttacaaaattattggagtagacaactagttgcttcttgattcagaaggacagagaaaatttttcccatgttagaaagccttcaggtaagcttaagaaggaataaattccttttacaccttttctccacgttgtcttcttgtgagaataaatgagagttacttttttaaaatgaattctattatttgaatacttaattttatttttttttactggataaatacaagaagacaagggtataaagatttgaaagatacaattgtataaaaagattcttcaaatcttttatctcatcatttctaagagaggtttttcaaattctcttctagcttgctttttttttttttttaatgtattctcttttgtgcatatctacaagataagagaattgagtttggaaaaggaaagcgacttcagggaagtcatttgtagagatggttttttgaatattgtcttcagcaaggagtttatggttaaaagaactataaatctcataatctaaatctcttgcaatcaatttttatctacaacaatggatttgttttttgagattgaatttacagggccaaggggtctctgtaccaaacaaatgatgttttcttgaacgggctttgaggaagatgatatgttgagtagggtaaactcctccatcgtttgaccactcaagaggtttgctttcaatgatgagttcaactaatttaaatccttagataaaggaattttaatatatactactagttttcttccaaatccattggtttacttaggattggagaaaactaattgatgaattaccccataatccatgaggagagcaagggttaactttattggcttattgttaaacctgaagactattgggtgatagctatctaggtcaatgttgaccttgcaaataccataagtgaaggcacacttacaatcttgcctttctaataaaacttttctacacaagggattgagctttggacactcatttttggtgttgccataatgagagtgtcaaataaaactcattccttgaataagaattccaaaagtgctatagtcagcaagaaattgcattttgtgttcttgctttgctttgcttctcctgcagcttgggcctttaaacttatcatatgtctaaggtcttgaggaagatttaaaaatatttgttgataaaaaaaaaatcttgctttttaaaatttttgactctcttttgaaagttctggaaattcattttaaaaatcatttcgaaagtgttgaagactttttgaatgaggattttttaaaaatatagcttttgactcttcttcacaaatttttctttgtttcttgcaattgaaaatttcaagatctatatccattggggtgcaatgtctatcaaaacttgaagcattaaaagatttgtctaaattatcattcatctgtttaaaacaaaaagataatgcatttaaaacttctaaattttgaatatcactttgtgcattacagagtttgtccaaaatgcatttttgtgatctgtctaaatttttcacatctttatgaatccgaaatgacattacttttagcaaatactggaaaagtaaattttctaaaattaatccattcttgctccatctgtaagaaaaaaaaaattaaatgttagtatagttttttacacatcttatatttatctagtattaacaaaaaaaaaaaaaaaaagcatagatacatatggatgtaaatttgaaaaaaaaaaaaaaatcaagtcttcaaatagtagaattcactttaaaaaagtaactcaattatctcaagaagacatggagaaaaggtgtaaaaggaatttattccttttgaagcttacctaaaggctttctgacctgggaaaaattttcaccgtccttctgaatcaagaagtagtcaattgtctactccaataattttttaaatttcaacaagcttcaattccgtggatttcaacaagttcaagcctgtcaatttctctataaatagagttatcaagttcatcacaaggcagaggtgaacgagagacaatcagagctagcaagagtgtttcaaaaaattctctttgcatttttgtaatctctctcatttcaaaaacctttcctttgtaatcaaactctttattgtcaacaaacttgtaatcaaagattcaacatctttatatcaagacataattttcaatataaagttcaattttcagattcaatttttgtgtttctatgttcaatttttgcgttcatattatgttttaaatttcattttcagaatttatcttttgatttataaactgttttatatcctttttatttatgaactgttgtggaagaaatacaaaaaacataaaaattggaaaaagtagaaacatcaagtgaaataattaaaggtgaaacaagtagtgaaaaaattcaaaaagttgaaacatgtgaaataaatgatgaagtaccaaaagaatctactacacacacatataaaacaaaaagataaggatataagtgtggtaggagaaacatcaacatcaatagacaaaatgattcaaaaggttgaaaagattgagaaagatgagatagttgaattgaaaaaattgaaaaaaaaagaaacaaacaaaatagaaaacaacaactcaatagaaataaataaattcaaaataaaaacaaaacaatgaacatgatttcttcaaaagtggataaacaaatatttttttgatgttataggcaaaatagatgatgaagagacaaaaaatatttacaaaacttaacaaatttaattttcacggaaaacacaaataaaactcaagaaattagaccaactcaatactctacgacgaaatatttaatggatttaaaaaaattcaaaaactcataactattgaagatttgaatgaggaaatataagaaatgaaaaaggaaatagatcaactaaaacaagaaaacaaacaaatgaaacaagaaaccgaacaaataagaaatttaatacaataaaattttgttgaaacatctgatccaggaatcataatcccagataaacaaactccaatagaagcattgataaatataatatctaaaataaattttcaaagatggtatacaaatttaagattaatagttgaagactttgaaatagaaatggtagcactagtagatttaggagctgatatgaattgtatacaaaaaggaataatccctactcaataatatgaaaaaataggacaaacttttgccgcaagtaaaggtaaattggaaatagaatataaatttcaaaatgttcacatatgttaaaataaatgttgttttagaactcaatttatgtttgtacaaaatatgactgaacctttaactttaagaatcccttttattacattactttacccttttcaagtaagtgatgaaggtgtaacactatatttttcccttttatatatccattaactaaaaaagagatacatcaagtctaaagtgattcaataaacaaaaagataaatttaattcaaagaaagtaagctcacacaagtttttttttaaaagaaattcaatataagaaaatagaagaacaacttttagaagataaagtcgaaaagagaaaaaaaagaaattcaagatctttttcaaaaagaaatttgttctaatcttccaaatgctttttggtcaagaaagaaacatgaagtgagtttaccatatagtcaaaattttgatgagtccaaaatacccactaaagctagacctatacaaatgaatgaaaaacttccagaatattgtaaacaagaaattgattcattattaaagaagaaattaatttgatctttaaaatctctttagagttatgccgctttttatgttcaaaatactgttgagctaaagagaggtgcacgtagattagtcattaattataagcctataaacaaagtattacaatggataagataccctattcctaatatacaagatttactcaaaaggcttcatagtgcagtaatttattcaaaatttgatatgaaatcaggatttttgcaactacaaattaaagaacaagatagatatacaaaactgcttttacaatcgcttttgatcattataaatggaatgttatgcctcttggtctttaaaatgccctttttgaatttcaaaatattattaatgatattttcaatcttcattttcaattcattattggtatgcattgacgatgttttagtattttctaactcattagagaaacattttgtgcatttaaaacgtttttcaaggtaatcaaagcaaatgaaatgacatgttttgcaccaaaaatgaaattgtttcaaacaaaaattagatttttaggtcatgagattaatcaatgaatgacaaaattgattcaaagatcaatagaatttgctgataagtttcctaatgaaataaaagacaaaaaacaattgtaaagatttttaggttgtttaaattatgtttcttattatttcaaagatttaagaatcatttgtgaacctttatacaaaagacttaggaaaaatgcacctgcatagatcgagtctcatactgagttagtcaaaaaaattaaacaaagagtcaaacatttaccatgcataagcatcccttatcctaatgcattactcattgtagaatcagatgcctctaatataggttatggaggcatattaaaacaagaatataatagtcaagtacatatagataggaatcattcaagaatttggttgggtgctaaaataaactattcaattgtcaaaaaaggagttttatcaatagttttatgcatttcaaagtaatttgataaacaaaaattttcttttaaaaatttattgcaaagttgcaaaagatatcttacaaaaggatgttaaaaaattggtttcaaaacaaatttttgcaagatggcaagctttactttcaaactttgattttgaaattgaatttatcaaaggagagttaaaaaattggtttcaaaacaaatttttgcaagatggcaaactttactttcaaactttgattttgaaattgaatttatcaaaggagagttgagttcctttcttgacttccttactcaggagtttttgcaaggtaaggattctccaccctaatgggtactcttgttaggaactaacttctttcatcatctaagaaaacaaaagtttcttacgtcatgacttcaaatctctaaaatatccatccttcttttcctttagaaacctcaaattcctttcaagtcccgagttcagactttcctcttcttcagccttcaaaaagctttattcaagcttcaaaatcaacttacaagagctttcttgttcaaagtcaatccagtcctagtactatttcaacacttccttcttcctctttttttttccaaacaatcaatatttcaaaaaacccaaaacattagaaattgctttcattgagcctgagttcaattttgaagaaattcatagaatgcttccttataactttcctcaaggagtcaacttcaattcaaatgatcatttgaaaacctgtcaattttatgagtttatcttggttgatactaattcaatcaagattactcatagtattaatagaaacaatccttagagaattacattctccaaatgtcaaattcttaagagttatgaccattgctgattggaataaaaagcccttcacttacaaagtttttcgttaacctttccatcccatgagcttcaactatatagactatatggatgtttggtacaatatgatttatttacatagttatcagcattcatggtttatgcaattttcaagaggtcgtaatgccaaatttcttgcttggtttaaaaaatagtggaatttctttggtctacttgagacattatttcctttagagattcaagaaaaattcaacttctacaagagtaagacttcaactcagtctgttactcaactgagactcctgactttttgctccggattaagaattgtatggattcttagttggaattttatcaagaaacaagagcaaccacttcccttccccctttctctctccagagaattcaacatcaaatggtgggacaactttaatcaagagttcgtgtgtcaacaaaagattttacaaataatttcaagaccaggatcatcaaattcaaaaaatttagcaagttcctcgcaagggccaactcaaacagaatttctaactatgaaaagcaaatgtcaagtttcattagcagttgctacaaatctagaacaatatcaacaaggacttattcaaactctcaagtagttcagtgataatcataatagtgaagaaaataaagacatagccttttcagatgattcatacgcagacctagaattaatcctttatggtggacctatgggtcaatccatataattattttcataatccatgtaaaccttgtatatatcctatggataaaaaaaaacgtgagacaaaagttacaagatgtgaatagtagaaaggtgatgtgaataagataaaaaatcaaatccttccaagaattgttcaagaacccggataagcttcaagatgtaagagttgcaataagttgtgtactccaataaattagtggatttcaacaagtttcaattctgtagacttcaacaagtttcaagttcatcaaatttctctataaataaagtcattaagttcatcataaggcagagatgaacaagagacaattagagctagcatgagtgtttcaaaaaattctcttagattttttgtaatccctctccttttaaaaacctttccagtgttcaatttctctgttcattttatgctttaaattttgtttgtagaatttatcttttgatttatgaactgttttatatcctgagttgaaataatatcagagccaagttctacttaagaactgagtgatattacaacttggaacagtctgtaatcactggtttagtcctaagttcaaattaaattttttgtgaacggcttgatcaacctagatagcggtgtttgaaggacaaaaggagtgtaagtcctgtgttgatctgcttatggtgatccctgttcataagattttttgaattaataaagggtaagattgtaattaatttttgtgacaatgagtagtgttatgaaggaattaagcagagctagttcatccagatctcttaggatagaaagttatgcatcttataattatgcattcaatttagacagtgcatataatctagccagttactcatgtaagttagatgaatttgcaaaattagatagttcttcatctatattagaaaatcctaaaaatattgaagattcattagctgcatcatacaatcaacatgataaaaatttagagtcatcatcccatcacataaagtttaataactcaaaactaggcatagaaatgactcaaattgaaaatcaattgaattttttttcaaatttgtcaaacttcgttccaaaaattcctatttttgaagaagaatctgagtcaacacttcctgctcattttgataatccttctttaaacataaatattattagaaaacgaaacattaagagaaaaacacatccttttgttcttgatgtagaatagattaaattagattatttttctccttataatattgctagaagaaactattttaaacaactaccccctcaagtaagaaatgctttaagaaaacaataagaaaaatatatgcaacaaattaaaatgacaatccccctttcccactagtttttcaaatttaggaaaaccctttaaagaattgcaacattaatcacaaaaagaagcaatagaaaattctccacataataaacaaattttaaatcaacaaattctcattgtctcatttgagtagcacatggaaacataagcattcataatatccttagtggacattcttgaaagtttgttattgattatgcaactaagggtttgacttagatgaattatttttttgctttttattattggtgacattcctttttcctttctttaatcctcccttgtttgcgtttttttttctctctgaagtttcatataaattttagatttattaataaatatagttattttagtttgaccaagaactggttcactctcatctttagactctgactttttctttagaagaagcatttaagattgatcctttagatctgtttgatgagggaagagtcatcttataagttcatagggaaagtatcaactcattgactcccaagttatctatagttttttactttcttttatagtagttactttaggcctcaatctctcaataaaagttctcaacttttttcctaaccaccttagaataaaatataaaaaaaaatcaccaaacttaaaacatgaattcataatatcgcttagtttagtatagaatttagaaaaagtttcatcatcatttattctctagcaattaacatttagagcttagataacttcattgtacaagtgtgttaatgtgttacgaccaatatatcgcagacctacttagcatatttacatgtcactatccgtctcaattcttcatgatttacatcatttaaaatgcaataaagtaccttggcattagtttcattacctttgttgttaatcttatcccactcttactcggcttagtttcactagttgatcttccatccttatccacaaaagtaggaggtaaccattcatattccatcgtgttccaaacaagctctcgttgtgcttaggcttagtttcgccaattgatttttcattcttgtccatggatacgagaggtaaccatccatattcaattgtgttctgtaattcaacaaaggtatttggagaaattactgtatgtttattagaggaataatacacatatatatacaattgagagtcctaaattaggaaggtattatccctaagaatcagcctataagaaaggaaacaacttaattatggtaagtacagatatatacagctaacactccccctcaagctggagcatagatgttgatcatgcccagcttgttacaaaagtactcaactcgagttccatttagagcttttgtaaaaatatccccaagttgctctccagtcttcacatagctagtagagactagattttcctcaatcttttcacgaatgaagtgacaatcgacctcaatgtgtttggttctttcatgatagactgggttcgcaacaataagaagagcgacttgattgtcacaccaaagcttcgctggcattgtgcacttcattcccacttcacataagagttgatgtatccatatgatttcacaagtagcttgtgccatggccctatactcaaattctgcactcgaatgggatacaacacttcgcttcttacttttgcaagccactagattcccaccaaagaacacacaataacctgtagtggatcttctatcaaacttagaacctgtctaatccgcatcagaaaaacactcaatgtgagtgtgtccctgactactgtatagtatgcctagactaggagccctcttcagatagcacaaaatctgctctaaagctgcccaatgctttactgtaggcgtagatgtgaactgactaacaacacttactgcatatgcaatatctggtcgcatcacggtgagataattcagcttcccaatcaccttccaatacctctcaggattgtagaagggatctccatcatttggcataagctgtacattaggaaccatcgaggtaatacatggctttgcttttatcttaccagtctcttcaagcagatcaagcacatacttcctctgtgataagaacatccctttcttgctccttgatacttctattcccaagaaatacttcagttcacccaagtcctttgtatgaaacatggaatgcatgaatgccttaagatcagagattcctgcatgatcatttcctgtaataactatatcatcaacataaaccacaagaagtatgatactagcagccgatttcttgtagacaatggaatgatctttcttgctcttgttcatgccaaatgcttgagtctccttattgaattttccaaaccaagcatgaggactctgtttcaatccatagagagctttttcagacaacaaaccttcccataccccccctgagcaacaaacccaggaggttgctccatatagacttcttctagatcaccatgaataaaagcattcttgatgtctaactgatgtatcatccactgatgggaagcagcaatagaaataaatagttgaactaaattcagtttggcaactggagagaaagtatcagaatagtctactccatatgtctgagcatatcctctagctacaagcctagctttcagtcttgctacagagccatcaggattaacttttaccacaaagacccacttggagccaacaactttctttccttgaggcaaatcaacaagtttccatgtatgattgtcttccaatgcacggatttcttcaagcattgcattcttccaaccaggatgattcagggcctttgtaacagtttaaggtgctgaaatagaatctatagaggctaaaaaaacacttgaggaagatgataggggatcataagacaaaaagttagcaatggaataggtagatttgcattgtcgtttaccttttctaaggctaatgggaaggtcgagatcactggaaggatcagatgacgaaggagctggtgcaggacatgtatctattgtcactgggtgacgagagtacacctgtacaattggtggtttgactggagtaggaggaacatcaacaacagtacccaaatgagcaagagatgcattagaatcaaccatacttgattgcccaacaattggtcttgaattaaccacttgatacacaagccattcttcatcctcctcctcacttgcagaacttgtgggagaagagaaaaatgatgtgtcttctgaaaacacaacatccgttgatactagatacttattgagatcaatcgaaaaacatctatagcccttttgcagtcttgagtaccctaagaaaacacactttaacgccctaggatcaagtttagtaacagaaagccttgtatctctaacatagcatgtacatccaaaaattcttggttcaattggaaagagtgatttctgtggatgtattactttgtacagaatatcacctttaagcactacaacgggcatacggttgatcagaaaacaagccatggaaactgcatcagcccaaaattgttttggaacctgcatctgaaacatgagtgcatgagccgtctcaagtaaatgcctgttttttctttcagcaaccccattttgagaaggagtatcaacacaagatgtttgatgaagaatcccattgtgactcatgtagttctgaaatgagttagacacattcttttccattatcactccttaatattttcacaaacacatcatattgggttttaatctcagtagataatgcacaaaaatgtgaaaatacttctaaacgattcttcataaaataaatccaagtcattcaagaaaaatcatccataaaggtaacaaaatatcgaaacccagttttagaagtaacagaacaaggaccccaaacatcagaatgtactaactcaaaccaagactcaacccgtttattaatccttgggcctaaagaactacgatgatgcttcgcaaaatgacacgactcacaatctaatgaaggtaaattatcaaattgaggacataatttcttcaacaccggtagagaaggatgtcctaaccgacaatgagcttcaacaggagaggcagtactgacacacgcaactggtcgaggtacccactcatcaagaatatagagcccatcagatacatgtcctttaccaaatgtccgtttcatcataagatcctgaaacacacaatgattagggaaaaatgagacactacaattcagatttttagtaagtttactgacagagattaagttaaaggccaaatttggtaagtttaacacagaagataaagtaatagaagatgttggtttcacagtcctagaccctttaatctcataagtagaaccatcagcaacagtaacaggtggagcagaatgtgttctgaaggtagagaaagttttatgattacttgtcatatgatctgtgacacctgaatcaattatccatttgtttgaggaggagacaagacatgttttacctgactctgccagagcactaacaggagtagatgctttcagtgcttcttgatactgtgaatatttagcaaactcttttgctatcattgtgacgatcttgtctaaggagtctaaagatgtagcagtatcagatgtagcaacattggtagtttgatttctccgatttcgattccgcaatttcttgcagttcttcttggtaaggccagcctcatggcagtaaaaacacacaatggtacttgaatcattgccacgattttcaaatgccctgtttctgcccctgttattcaccctccttgcattctctgcatttcctccttttgcagcaagaacattggtgtgctgagaagacgggacattctcagttcgtagaactctactgaacacttcctgaaagggaaccaatgtcagaaccacaaagaatatgagattttgcagtctcaaactcagatgggagaccggataagaaactcataacaaccatttgttccctttgagcctgttgtactctaacatccggactaaaaggcataagtgcattcaattcctcatataccttcttgaagtccataaagtatgtagtgagggatttaactcccttctgaggacaatggaagacattccatacatcatacatccgagatacatttccttttccagagtaaagaaaatctagataatccattagttctttatcaaattcacaatgacttagcagaccaacaatatcactattaatagagtttttaatctgcagaaataaccgtatatcaacttgcatccaaagttttctagtgttatcattaggaggttccttagtcaagtggtcatctttagcaacacttctcagataaaatttgatcgtcttgctccattcaatataattagacccatttaatttgtgttcagttatttttgacacaacagacactatatcagcaacaagattcttattctcttccatggcaataaaatttaatctccaaagtaattttacccccagataagagcagcccagaccagaaattgcaattcaccacagcaagaagaaagaaagagacaagtgcctcttgtagaccaaacaaaaatagtaacaaaaatacttgaaatcccaataacagaatctcacaactgcaggggtggggtgctctttgtttttttttgtcaagggtttgatggttgaatttgtaccttgtgagggcgaagagaggcaaggtttaggctccagtggtttatgggaaaataggctttctttgaagccaatcaatagtccgatgggaggtagcgacgaaggtgatgatgggaaaggtagaagagcagtatctgtagcgtctgtggattacaacgaagaattcaagggccgaagagatagcatcgtcgaacgactttatacgcctgtggtttcgtgatgcctgaactgcgatcacgatcgtattcataagccaaatggtgattggtctatgaaggaaaagatggattagttgcaagacgagtcttggattgagacgccaaagtcagtggagagggatagagatggatcaatcgatgaagagcaatacttgtggcaagattggaatgcaagatcagcagcaaagggttgggttgttcaaaagctttcaagggtcggatgagagctcgccttgatgatcagggtgacagagattccaacaagaataagacttggaacctcaagaacgagatcaccgcaccacacactggttggaaaacgggattgcgacgccaatggaattggtcgaaggtcaaaagaagctgccacgctcctccacgtgccgacgcgtgccgacgcgtgagttgacacgtcctacttctcagggcacgtgagtttcacgcattcagcttccagttgccggactttgggtaccggccgatcctgataccgcactttcctctccgaaggcagtgacactaccaggtcactctcaaggcatgtgagactcacgtgttcagcttccagtcgcaggaggcactgataccatgtaattcaacaaaggtatttggagaaattactgtatgtttattagaggaataatacacatatatatacaattaagagtcctaaattaggaaggtattatccttaagaatcagcctacaagaaaggaaacaacttaattatggtaagtatagatagatacagctaacatgttccaaacactctttccttgcattattaggaaaaatgccattctgacctaacccgctagtgaaggtagtttattcccataaaaaagtataggataattgatggaagatctaactcaaatagaggataattgatgaaggatctaactctttgtaattttataattcaagaatcaaatagtaggaatcgcaattttttttttttttttaatttaaccaatttttaagttatattcaaaatttctaaattatcaattaaataaataagagataatagaaaaacagttggcacaaagtaacatcggatatacatgaaaaaatcacttacaaagtctcctagaactttacaagtgttataatatactaaatataaaaagaaggtatataattttacctaatttgaacacacctactcccatggttcttatattgatcaacatctgcacttgtctttcacttgcatgatttgactccttatgttccttaatagattacttgaatcccatgcttaggctagtggttcgatgcactatgccattctatcgaaaggacttctaagaaaagtttttgcaagctcttcagagttaggagtgctagggtaaaacaatggctatgagattacgtgcataccgtcatagtctaaagatttggtttttatgttaaaaccctaattggttgtttggagaaggttttctcaaagctaatttaccaaaaaatctgataaaaaccttaaaatcatttaaaaaaaattatttagagggttcaaactgctcgcaagggggcgtttcaagaggatgtttgaacctccgtcagcaggacgtttgagcctccctcaggagtgaatgcccctaacagaatgtttgaatgtctacccctttttgcttcatttttccacatgttcatgattttttttctctgattttccatagccattgaacttgccacaatacttccaatacagacatacctcaaatgaattcaactctcgagcagcttgaaattgactacaactgttgatactattctctttgcaaaaaaaaagaagaaaaaaaagtagagaggatagaaggaaaaactgctagaaaaactattgagaataaccattggcatttaggaattaaaattattgtgttaaataggaaacaagaattgtgttactgaaaaaaaaaaaaaacaaaaatggaggatgagctatttttaaagaaaaaagaatgagaaatcacaaaccaaaggcaaaaagagtttgaaatttaataagttcagaaaccctatttgttacctagttggaacaaagaggcttcatgcttcatgctctgccaatacatccgttacttggttgtttacttggggcatcagtgctgcaagcatcccatctgtattaagatatcaaagattttgcaaatccaaggaccctatttacaagcactcttcttccataagatatgagattgggtgcatccccttccacaagaaggcattaatccctaaaatcttcaccatggacaaacagtcccacgggctagattctttgacataggagtggaaaattcaaattcttggactactgaaatttctttcaatatcttttggaaatttaggccccccttttttttgttaacattagctttactttagaagtaataccatagagtttattaaaaatgttggttgagttcaataagatcaaagagctttgatagaagcaggagcaggcccatggagatttctgacattcctaaccatgtaaaggagttattggaagaaggtttattattatattccgtttgtgtagtggaggccagaaaatgacttatctagttgtgtatgtgcaagtgcctgtgaaagtgtatgttataatgttctagatttacttattgcttggaagtgtattttataacattcttgatcaacttattctttaacatataattgcttgtataacattgcatggaatatgcatcttcaacttagttttgtataatatttcgtggaatagttatctgtagcactgcattgatatattatcatatactgatagtagcaagaacaagctcatcataaataatttccttcaattgactgcagatc

SEQ ID NO: 10985 - DNA, 1535 bp, Vitis vinifera
  Intron number 2 from transcript GSVIVT01032155001 (locus G SVIVG01032155001) derived from phytozome v7.0 (chr-ID chr1 3; pos 22067620 to 22069154 reverse strand)
aagtgctttccgctgttgaaaagtacgaaaaaaaagaagagaaaattctatgttttttctctctttgctttgttgtttactttggattgatgcctgaatctctgttctggaattttcttcttctttttcttcgtatcactgaaaatgagattagttttgcattaattactctttataatgagtttagatcccttacgcactttcaatcaatgccaattttgatattgaccctgtcaacagtcaaatctagtgaaacgaaagtgtaatccgttgggattctttgagaactttgccttattgtatggatctattgcgtacgttgatcggaattttggtgatagttagattgtcgagattgcaatacggctgatgtgggcagctgtgggtccttagtttgggttgtgtactgagtgaagtacatttcgtttaagttctggtaaaaggtcacgatctgtctactgatcttatgtttgtgctaaggcttcgatgtactgaaatgtttcacgattgaattgtgttctccgcctggtatattcttggctttggtagctgaaaatcagggaaaatgaaaggaagatatttagaaggctaggggtttgaattgttgttgtaattaactttattttgtcctgttggccactgttgcttgacaagaaagcaattttaagctttgtttttttttttttttttttgaaaatgatgtgactggtgaaagatagtgcaccaatgctcttggatattatctaaaaaacaacaaaacaaacaaacaaataaataaataaataaaaaataagggggaagaaaaacaaagaaaagaaaatacgagcatgaattttggtgtagatcacaattctcgtatactatggggaattacttagggatttgcacattaaggtctgaaagggacctgcattataggatttgaatgatctggaatcacagcttatttcccagagagacgtggtccaagaaaaatagagtaagccagtttattcatcttggggattctagaattttcttatcatctttctgtgtctatgaatcctctagttttctgcacaagatgttatcatgagctttgtaaaaagactaacacagcctttggttgctgttgaaaaagggatgttgtcattacaatttcattgcccttatgctttatcttcaaagcattttcattctatattatcaaagaattgcacataataaatttacctaccaaaaaaaaaaacaaaaagaattgcacataataaatttatttcagtgtccatggcctgcattctttgtaaaatggcatatggaagattttggagtttctttccttcactttatagaattattggtgttatgcacaaattattaatattcttatactgtagacatggttgttatgtgagtttaagctttttgaaaaatatctgtatatgttttttactgattcctggcatggcatacatgatagcctgagtatctggtgcttgagatttgttagatgtatttgaacattttagtaagagtttcaggttaatgcttcaggt

SEQ ID NO: 10986 - DNA, 3767 bp, Vitis vinifera
  Intron number 2 from transcript GSVIVT01017925001 (locus G SVIVG01017925001) derived from phytozome v7.0 (chr-ID chr5 ; pos 4760025 to 4763791 reverse strand)
ggagtgcttttgctctgggtctccttgctgtaaaggtcatttgattatctttctgtttccttaattttgtgtatttatggagtgatttttgttggaaatttgtgtgataaacagatttttctatggcaatattcttattttatttcagttgtgccaacaaatgatattgtctgcagttcagaatttgtcaagatttgtgcaacttgtttagaaacttaggaaaattggtatttctgaattatgcattatacactgagagggttgaactattatatgaaaattgcagaactggaactgtaaggcaggtagttttagtccacttatcctatagcttgcatgtcttagtagccatgcatttgctctatgccttcttatttctagcagtaataagttggtatatgtttaagtgacatcttaagaagtgttttatgtaatcaatagtcatacagagatggaattttaagataaatgagtgttgataagctgaattgtcttctttttagtaagaatgcttctgtgattgtgttttatatgttgtatttgttttgacgttttaattgaagtcagataagactcagattatgttctcttgattgggaaagttattctgtttattcgttcatttatcattcaacatcttttgctttattggcaattttgaacaatttaaactcattatttttcagtcctgggaaggaaaatatgaaatgcgaggatcatcattgtcatggtagggctatttatcaaaaaaaaaaaaaaaaaatcattgtcatggtaggactacctaaacatttcatgaagtgggtcacaccgtcacacaagacctacttttatgctatatggttttgggaaggactgctgtactattggtttaaattccttgacatagattagggtggatcctcagtccgcaatctgcatgctatcttttggaagaaccaacttagcttaaagctgtaaacctttttgagcctgttttctgccaatagttgtggtttttggtttttaaaaattatttcctcagtccacaatcttcatgctgtcttttggaagaaccagcttagcttaaagctgtatgtctttttgagcctgttttctgccaattgtcatagtttttggtttttaaaacattttttaaaatttttttataggtaaataaggatacatatatttttttttgtaggtaaagaaaagatctattgaaaaaagacgccaaaagagcgactcaaggtatacaatacctatacacctaccgccaaactggccaaaaaagtacaagtgaacaagcgcccacggtaaaaaaacaaccttaactagagcccaaccaaccaataaaactaactaaagtttataaacaactttgcctctgaccaaaaggaaaaaacaaaaaagtatatatatatatatatatatatatacatacacacacacacgcacacacacacacacacataattgcaagatgaagtatagaacaatatataatatatttcatgaaagttactaaaggtaaaagaggcaaatagatatcaaatttcagtacaatatgtgtgtaaacattaaatattggagttttgatgaaatcaacctggcaaaataagaaattttatatcaaaaccaacttaacaaattataattttttttttttgataggtaaataagagattgtattagaaaagcctagaagaggcgaaaaaagtacacacgaagtatacaagcaagcaacgcccaagaagttaggcaaaaagaaagaagaaaacctttctcctatctagacaaaagccactctataaaatcaaataaggacaaagaatgatcccctctaaatacaccctaccccaattcacaaaagtgtacaaaaaagaaagttttaaagcttggtcggaatgttcagtgtcattgaacactctttcatttctttccttccataaggtccacattaaacataggggggcagccctccaagccttttcctttctcttactcacaaatgcaccatgtagaaattttaatttatagattcatcattgacttcattaaaaaaaaaacttttgctagatgttattgccctaaaactttcaagctttgacatgttctcaaacaataaaaaaagtaactgtgagcaattgagcatgttcaattataaacaaccaagtaaggtgaggttgtttttttgtgtgcctgctcgccttgctttggccttttggtgcccttgtatgcatcacgtgtatgtatatttgttaggacatatgtctctgggtgacatgtttggagttttgttctgactttatgaattcatcatttctccccttctccccactcccgaacacagacacacacctctaacacaaagaaacttcccattcagacatgaaagtgaaaaaaagaaacccatttttaattttaagaaagggaagaaagagagtgccatgaaactctaaaagctacaaatagattttttttcttttaactacagtatgggcaaaatgaaacaaaagaaagtttctgaaatcttattttaatttagtgttttttttaaacaggagtataataatcctttttaagataaaagttgaagttgaattttccgttaacctttaaaacattgtcaaatcaaatgcatgcattttctatctattgtgcattgtaagatacatttaagatattgcatcagtggtatgtttgtttcacattaaaaatatattgtatcatatgtgaactattatgtgctttaacttttgacaattattctgtcagttgagcttccatatattgttcatgtccaaacaaaaagaagtcaagccagcctgtttatgatctgtttactggtttttgggttccctaagcagcctctagattagtcgtgggtagaaaatctggtgaaactggcccttaatttttatttatttatttatttatattttaaatgagggtttaacaaattgtttacttgtaagaaatttgaaatctaaaaactacaagtattaggaatatagagtggcaattggaatgatctagaagtacaaaaaacattttattatgcttactcaatggaaagaaggtattaaagaaatgctatcatcatcttcgtctatctattcaggactgagaagttagaggaattttatttttatatctttctaataatgatgctaaaagggtttgtagtccccttttttgggtgggtttatattcaagccgttttagggattgggctagcacagagagaacttatccgaaagtttcttgcactcttgttgtattaataacaaccatgaatactaaagtgaaaagcttctttttggattagttattatatttcttttcaagactaagaatttggtcttcgatgctttcccaataacaacaatcacagttcaggtaaaagccttcatttttttctgggtttctactcttctccaattttaattcctgaaatgaccatgaagtttcattctgcttgtttgtgttacatatgtttgaggcaatttgttgtgagcatcaatagccaatatttctgtaggctggcgatttagagcatgccaccatttttttatgctgttgctagattggatgtccaagacaagttccacttattagatctagtcaattgttattctcattcttcctctaccttgcatgtttcctcatgaatttgaaaggctgtagcttattgaatacatttacctttacatttaattgctgagcccattgattttattgtcttctgaattaacagccagagcatcagcaactcatagttgata

SEQ ID NO: 10987 - DNA, 2198 bp, Vitis vinifera
  Intron number 1 from transcript GSVIVT01013388001 (locus G SVIVG01013388001) derived from phytozome v7.0 (chr-ID chr1 8; pos 782042 to 784239 reverse strand)
gcacaaggccattactacacaacaggacctcgctggtcttttaccctctctcttactcccacttgacttttttttttttgtgtgtgttaattgcttctgggtttgcattgattctccatttaatgctgtttgcttgggctttttggttgtttctgttggggtaattaatgggttttgcttgtattcgacggtggttgttttttattttttgtttgatttgtggttgttttcttgttttcccttttttggtacttcttgtctcctcttccaagattgtttttatttttaaaatttccaccattttctcgggaatcatgagctttcactctctttctcttcttttttctgttgaaatcttgttagaattgttcaaaatatcctaatatttggtgtttttgtaagttaaatggctttattcctaaatcattgtttccataattgtttttcttggctaaattaattagaatcatcaattactaattgaaattgcaggaatttgatttacttttattcatgtctgcctgccatttcttagaatgcatgagggtttttaaataaagaatcatttcttgatttaaagatcaataagggttttagtttagaagaatcattgtggctgatctctatcactctttgaactctgactgttcctaaaattttgtgattaagctgcttttggattcaatgctgcaccaaatcccaattggcccagaggcttttatttatttatttaatttaataaatccggttttattgacaatcttgttttgaaattagagggtggtgtgagattattcattttctccatctcattgacaattcttcacccaccccacaaagaaaattcaagtctgcctgccaagtctttcattttcaattctaatatccattgtgtaagtttgaccattagcaagcagaaattttcttaagttacatgcaagagcctttaccggtgagtctcaaaccaggagaaatataggatttgtttggtaatgttttcgtaaaaccattgtcccatatattttcaaggtattatatatttatgtacaacgtcatggttcccaggtgttctttatgttttcaattattgctttaacaactgaaaaaaaaaaaaaaaattactattttttgtcagaacacgttttctaagttaaaaactcttttttaagaacagtttccatatagcccatggatttccactatagaattattagacaatttccttcttttgggataacattgctcctagtaatttcctttttgaagttttcctttctaatcagaggcaagtggtccatcattttgttttcacaaagaaaaagttaaaaaaaaatagctttaaaacctagtttgcttgagttgctggaggttacttgagcttcggttcggctaatccagttacatggttgttcctttgtttgggacagtaggagttgctctatttcctgttctaattgagttgcatctgattacaagaaatttttttgtagctagttatgccatggcttctgttttttgcatacattaagagcctatttggcaatgttttcaaaattagtttttgagaacggttcttaaaaatgaaaattttgtttaggtcctctaattttaaaaatagttttttgggcaaagttttcgtttcagattgatgatgacctctgagattcatggagcatttttctttatggcactttgaacaactgcaaacttccatattccataattggaatagatgcgtctattgaatcctattccttctcatctgtaaggcaattgttagaagtttgaataacgggctgctaatttagatatgcagaaagctatcaagcgatttaggattctggtgatttatctggttcaagactctattgcctcttctcccttttcaattctagtttatgacttaaacttttcctccttctgatatcattttacagtatttgaactgctagaaaaattatgtttgtcatgcatgtcagctcagtacttctttcagcaaccaacattgtcgctattcttttttattaaaaaaatgaccttatttattattctccatttatatgattgaaggtttagttccatcctctcaaagtgtgtcagggttttgtaggtgattaagcttgaaataaggaccaccctaagtgatataatataggtctcggtctgccctaaaatcagttgctctttcttgtttaggg

SEQ ID NO: 10988 - DNA, 12896 bp, Vitis vinifera
  Intron number 6 from transcript GSVIVT01021313001 (locus G SVIVG01021313001) derived from phytozome v7.0 (chr-ID chr1 0; pos 3896423 to 3909318)
gatatctgcaatccaataatcgattgcttatactggtatgcttcttttttattattaaaactaaaaaattcagctcttgctgttattcacaaaatatttcatggcataagttttctagttcatactcttacttcataattctctcttgatcattgaagaataactttatttttcaatttttgaagtacatgaaagatgtgtccacaaatctacattgaacatataatttatttttcaacaagcttgtgttctcttgatgcttgctagtgttaatccaattatgccaagttgatggttcaagtcacaactttttttttttttttcttctctatcttataattgacattgttttagggagaagtgccaacagttaaaaccatctaactgaacaaaatgcgcagggattttttttttccttttctccaaagcttaaattgaaagatggttcgtgtacagatggacacttgaagcttgtttgcaggctgtaaaaagacagacgcaagtgaccttgctgctgcatgaacacatcatatttttcagtccttttaaggagattctttgcttttagtaaaggtatttgaaccctctcttggtgataggtaatccattaaaattatggtggttagcagaaaaacaaggtcagtatgagttctctagaactacttaacctattaattctctccattaccaaactgaatcacgaggtagggaaaaatccctcaaaatataatggcttgtcaatttgaagtcaataatagaatgtaattgtgactacatgaagaaaatgcagttcaggaataatatctcttgtgagttaactgtccacaaccattagcttgttgattgttggcgagtatgatggtcctaataataatcttgcacgtagtttgtgggaggcaaggaaagaaaaatgttgaagcatggatgaacctatattaaatttgattcggacattaagattttaactctcatgtcctttctctgaaaaatcttcattcagtgaccagatgacagttccaaattgatttcccatcgtgtgatattaccattatcagtttgatatatgccaagattattgcttaatgcataacgggaatttgtcaatactgatgcccattgattccatattttagcatgttatagtgttatatgttggagagtctacatgattgacatgtagagtttctttatattactgttagattctttcttttttcattttatggagtccctttaaaaatgaagatttttagtcttcattctaaacggatgccaatcacacaataatgagtccatgttgtctaatttgacttgcatgctctataattttattttatttttatatgagaatgtattaaaaatgcaaaaaagcgcacaaaagtacactgggtgtatacaatgagcaagaaaagcataacaaaaaggagggtaaacaaaaaactattccctacctcaacaagagctcatccaatcttcacaatcaattaaggacaaagatctcccattaatgtacacccaaatccatattagcaagatttttaaggaaagaacttttaagactttggtttggcgtctcctcatctttaaacacttgttgatttctttccttccatatagtccaaaaaatacatagagggactgctctccaacccttcctacgctttttttttcccacaaaggacttttgccaccctaaaagggagttttgtacaatggcaaaagtaacccaagggatgccaaataaagagaacaccaacagccataagatccttgccttagcacaatgaagaagaatatagtcgtaatactcaaaatataaaattagtgctcccaaaacttgggagacaagaataaatgctgaattttaggtgtatttttgtgtaaaatgaggatgtggaaacctgttatataaagagtatataccttgtgataaactttagaaacctttaattaacaaaatataatttgtttcatgtaaagaaaacttgtacaatattactttgcacatacaaaaaccccatagttcacttatgggtagcccatactacaagtgtacaaaaaaaaaaaacataagttacatcatttcttcaaaatgatttaatcttcttatgatataaaggcaaaagcctcaaaagactctcaacatgagcaagaccacatccactcaacaacacatgcaaaactcaagcattaaccccaatgagtgtcttccaacctgcatctaaaagtggaagggatagggtgagtttacagctcagtaggaaagtttatgatcatcctatatataaccttaaaaaaatcctcgaattaaacatataacatgcatgataaacattttataatcattaacaaatatgtaatagtgtcaagtatgcatgcctgttattgatggtttcatctctaccttgcctcatccattctcttacatatgataagttgctaattcccatcaatgtacaatcagtgctccaaaaaatgctcgaccataaataatgcctattttaggaatacttaaggacaagtcatatcccgtgtcttttgagactcatacccaagggtaggaccaatctcatgtcttttgggaatacaaccccaaccccttgtttttaaggactaaaacctagggacaacaccaaccccatacacccacattggattgttttcctcaagggctttagggattttcacctaaggacccatggtcctatatacacaatatatttgaatataatattgcaatttctcatagatacttttcgttgtcaatctgtcctttggatgttatctgtcgttattccataccattcttgtaatgtaaccataccatgaaccatatccacaatactgaagtcgtgattcctcatttccaatgcatatccaaacatcatgacaacattttaaaacaatgatgcaaatacactatgaacaccctgacatattaaaacacttcataaaattatattaaatataaggatttttaataaacgcttcaggaaaagaaaacaaagatactgttgaatataatgaatttataatgtacaatctttccttttttaatataggtcacatgtatggtagttaggactcctagccttgtatatatatatattttctcaattgtaagtagacaccatatgaatgagaatcaaggttttcttctctctctctcttaacatggtatcagagccaagggagaaaacctaattctttccagtttccccgtgtcatcaattccaggaaaccttcctatgaccgtgttttattccggtcaccttccccagaccccaaagctttccgatcggtcgaatcgtcgtcagaaaacattcaccgacgacgacttttctggcgaacttttccggcgacgtctttttccgacaccgcaaggagctcctggaggagatctccaatttttcccaaaacaccggagccagaaaaccacccacacgccggccacgcgcgtttttccggccggcgactgcatctcacgccccggcgcgtgagggcgcgtgagccactttctggcgacgcccttcctcctccagcctcgcctgacgccgactagccacccttcatacctgtttctgtcatccgagccctgcacgtgcctcttttggggttcttttgcctccacaggccctccgaacagcttttccggcgtcctccggctattttttctcaaccccaatccctgcacgtgccttgagaagtgttcttctacctttccgatggtgccacagttgtttttcttttccatttggtctctcacacgggcgattcttcggtttttccttcttcagccgcatctgaagccatattagggctctcttcgatccaaatatacttcattctccagataagtggatatggttactaaaacttccattttttcctctctcatatctggatctcctatgattacttcggagaaattggttggcagtgaaaattatctttcttggtctgcttctgttgaactttggtttatggaataaggatatgaggatcacttggttacacaggaagcagatatccctgaggttgagcgcgtatagtggagaaagatagatgcccagttatgtagtgtattatggcaatcagttgatcccaagatccttcttcatcttcgggcctacaaaacttgttttaaattttggactcaggccaaaggattatacacgaatgatatccagcgtctttataaggtggcttttgctattgtccatatcagccaacaggacttggatctatctacttatattggccagattgcctctcttaaggaggagttcttgactgtgatgcctcttactcctgatgttggggctcaacaaacacagcttgataagttcttcatggtccttactcttattggcatccgtccggatcttgagcctgtccgcgatcaaattcttggtagttcatcagttccgtccttggatgatgtgtttgctcgcctccttcgtatctcgtccactcagactttgccatctgatagtatttcagattcttctgtattagtttctcacactacctctcgaggaggacacaatggtaaccgaggtagaggccaacgtcctcattgcacctattgcaataaacttggccacactcgcgatcgttgctatcagttacatggacagcctcctcgcactgcccatgtggcccagtcctctgattctcagctgcctcagcctccgagctcctccgcatctcaggcatctcaggcttctgttgcctctgttgcccagcctggtaatgcttctgcctgtcttacccacacatcttctcttggaccttggattctagattctggagcttctgatcacctatctggtaataaggatcttttctcctctattactactacctctgctttacctactgttaccttagctaatggttctcaaactgtagttaaaggtattggtttgacccttcctctgccttctctacctctcacttctgtcctttatactcctgaatgtccttttaatcttattttcatcagcaaaatcactcgtactcttaattgctctattaccttttctgataaatttgtgaccttgcaggaccggagtacggggaagacgattggcataggacgtgagtctcaaggcctctatcacctcacctcgaattcatctcttgcagtttgcatttccactgatactcctctcctcattcacagtcgtttggcccaccctagtctcttcaagttccagaagatggtccctcgtttttccactttgtcgtcgctttcgtgtgagtcatgtcagcttgggaaacatactcgtttctcgttcccaaagcgtttgaataatcgggcaaagtctccttttgagcttgtccacactgatgtttggggtccttgtcggattgcgtctactttaggatttcagtattttgtcactttcattgatgactattctcgatgtacttggttatttttaatgaaaaatcgagctgagttattctctatttttcataaattttatgctgaaatccagacccagtttaatatttctattcgtgtgttacgcagtgataatgccagggaatatttttcagccccatttacttcatttatgtctcatcatgggattcttcatcagtcttcttgtgctcatactcctcaacaaaatggggtagctgaacgcaagaatcgacatcttgttgagacagctcgtactatcctcctccatagtaatgttccttttcgtttttggggggacgctattcttaccgtttgttatttgattaatcgtatgccctcctctattttacatgatcagattcctcatttccttctcttccctgaccaaccactttattttcttcctcctcgtgtctttggttgtacttgctttgttcatattctcactcttggacagacaaactttccgtaaaagccatgaagtgcctcttcttgggatattctagacttcagaagggttatcgttgttattcccttgagactcatcgatactttatctccactgatgtcactttctttgaggactcaccattcttttccaccacttctgagtctcttcttgtttttgaagtcttgccccttcccattgtctcctcatctgatgttgtgcctcctcgaccacttcagggttatcatcgtcgccctcgtgtcgctgctcctctcccttttgctgaggcacctgctgactcacttcctatcccttcggcttctcctgctccggctctgccttctcctgatgatttacccattgctattcggaaaggtactcgctctactcgtaatcctcatcctatttacaattttttgagttatcatcgcttatcttcaccatattctgcttttgtttctactatatcctttgtttctcttccaaagagcacccatgaagctctttcccatccaggctggcaacaggcaatggtggatgaaatggttgctctgcactctaatggcacttgggatcttgttgttttaccctctggtaaatctacagttggctgtcgttgggtctatacagttaaggttggtcctgatggtcaggttgatcgccttaaggcccgcttagttgctaaaggctatactcaggtgtatgattctgattatggtgacacattctctcctgttgccaagattgcttctgtccgcttgcttctctccatggctactatgtgttcttggcctctttatcagttggatattaaaaatgtcttccttcatggtgatcttgctgaggaagtttatatggagcaacctcctggttttgttgctcagggggagtctggtttagtgtgcaggttacgtcattctctatatggcttgaaacaatcttctcgagcatggtttggccgttttagttttgttgttcaagagtttggcaggcttcgcagtacagcagaccattcagttttctatcatcataactccttggggcagtatatttatctggttgtttatgtggacgacatcgtcattacaggcaatgatcaggatggtattcagaaactaaagcaacatctttttacccactttcagaccaaagacttggggaaactcaagtatttcttgggaattgagatagctcaatccagttccggtgtggtcctttcccaaaggaagtatgctttagacatcctggaagaaactggtatgttagactgtaaaccgatagacacacctatggatccgaatgtcaaacttgtaccaggacagggggagcctttagaagaccttgggagatatcgacgacttgtaggtaaattgaactatcttaccattactcgtccaaacatttcttttcctgtgagtgttgttagtcaattcctacagtcaccatgtgatagccattgggatgctgtaatccacattcttcgatatatcaaaagtacaccaggccaaggtgtgttgtacgagaacagaggtcatactcaggttgttggttacacagatgcagattgggctggctcacccacagatagacgttccacttcagggtactgtgtttttattggaggtaatctatatcttggaatagtaagaaacaagatgtagtggccagatctagtgctgaagctgagtatcgagctatggctttggcaacatgtgaattcatatggttgagacatcttcttcgagagttgaggtttggaaaggatgaacagatgaaactcatttgtgataaccaggccgcattacatattgcatccaatccagtctttcatgaaaggaccaaacatattgaagttgactgtcacttcattagagagaagatcgtatcaggatgtgttgctacaagttttgttaattcaaatgatcaactagcagacattttcactaaatctctcagaggtcctaggattaaatacatttgtaacaagcttggtgcatatgacgtatatgctccagcttgaggaggagtgttgaatataatgaatttatagtgtacaatctttccttttttaatataggtcacatgtatggtagttaggactcctaaccttgtatatatatattttctcaattgtaagtagacaccacatgaataagaatcaaggttttcttctctctctctcttaacagatacacaatagaataatataaaattctctacctgacactgatttttcatttgcaattcttctatgtagacgactcttactaaaataaaacaatataatttaggtttcctaaacataaaaattacacagttaaggtttattacatttttcccttttttctaattttagtaatttaatgttgataactttaatttccacattctctaatctacatgcctacaaatttttaagtcaaatttaaggtgaataaacaatctttcttatgcaagcttatattccccaattgctctaattattcttatttctcttgaactcaatccattagcatgctctaagtgtatagataagcctaactaatcacattattcatcaatctatttttcaattaaagcaaactaaataaataagcatgttgattcttcctttaaactaattaagtttaatttataattaagacatgattataactaattaaacttagtttttaaacaaacttcaccattaatttgcttcaaaagattatttggaatccaaatctaccaaaatcactaaccttgtcttcttcctcaccttgattttttcactttctccttctaacttctctctctatacctaccaaatttctgcagagaataagttgaaaatgaaagctaatagcccttatatagagtcttaaagcaagcatgaggtggcaagctctaaggccaccattaaccaacattctccaaattgtactttagtcctcttacttgtgatgttttatgtttttacacctaccgatcagtccctcaagtcttcttgattaaaattaatccccatgaagctaatacacatgcttaagacattaattaatcataattaaccttgatcaaagtttaatttataattaaacatgattagcattaaactagttttagtctctaactaaacatgtttaaggttaaatactaagataattaaggtttttattattattgtaattaaattactactaggtatcacacgcctcctctttgcatagagtgcacctatttactaacaatcaacctcttctttgcagctagtccaaagtcaacaccttcccctaacaagcttcctaagcaaaaaaaactcactttagggggaacccaagagttctaaataatccttaaatgaaaataggtgacaccatttgctttcaacgagtaaagggctctgacagaaaaccttcttttgctattgcctttccaaaccactctatccctctgcaccctttacatcgattaaccttgcaattgaagtaggaacctctccacagtatccaacttccaatgatttagattcctaacaaaatagaagttccaaacccccttctccctccctttcctcccataaatctactaccaatgtctgtttagccttagataaggcaaacaaattagggaacatctcatttaaaggatccttattacactaactatctttccaaaccttcactctcttcttatccccaatagcatagcaaactcttgagttgaagaaatcccattccttgctcatagctttccataagccgaccctataagggtctgtcacctcacaagagcttcatcccccttcttctaccctatatttccccttaatgaccttcttcctaagtgcttctctttcacttaaataacgccaacgcatttgcaaagaaaagctttattcatcaaaaagtgataacaaacacctaatccatctttctcatttgccctataaatggacaaccacttcattacgtggggtttgttctctaaggctcctcctccccaaaaaaagtccctttaaattttctcttgtctcagtctcactagtcttgggatagtgaaccatgacatgaaataaattggtaagctagaaaaagtactatgaattagggtaacccatccccttttagaaatgtattgtctattctacaaagggagctttttgtgtaactgcttttcaatgtcgtcccaaaccgcttttaacttgtaagaggcccttaaaggaagacctaggtaagataacgtagtttcccaaccttacaaccgatctccgacgccaacctcattagattatccactaaacttattggaatcatttcactcttctccaaatttatctttaaccccgaaatagcttcaaaccatatgagaagccaacataaattgttgacttgatctagagacgccccataaaacacaatagtgtcatcaacaaagagcatatgaaatatttcctcctttcaccccctcttccccccaccttaaaacccaacaagaaacttcctttctgagccctcaccaacatgttattaaaagcctccattgcaatcacaacccgcttgagcttcggaaaaaatctatgggagtaccctttactaaaacagaaaagcttgctgtagaaatacaccacttagtccactctagccatttctacctaaaatccattttacctataaccggtaacaagaaatcccaattgacatggtcataagcctttttaatatgaagcttacataacaaaccgcaatccttgtctttcaacatagaatcaactgcctcatttgctatgagcaccgcataaagaatttgtcttcccttccaaaaacgcattttgatacttagagactacttttcccaccactttcttaagcctaatagccaacacttttgctaattgcttatacaagccaccaaccaaattaatagatctaaaatccttaagatcttttgcccttttcttcttaggaatgagcactagaaaagaagtatagaaacttttcatgaacctaccatgctcatgaaactcactaaagaagcataacaccacaaaaccccaactaaactaccaaaaggccataggaaagctatctggactaggagctttgttgtcgtttaactccaacaatgcactaaacacctcttcctccaaaaaaggctcctccaactttctagcctcatgatcatgcaacacctcaaaagacatagcatcaatcccaagcctccgatccccttcttcaaaaaggagtcttaaaagcatgtgtcaccccctcttttatctctctctcttctgtaaaccacaccaaatctaccttgatcttagctagatgatttcttctcctgtgagcattggccatcttatgaaaaaacatggtatttttatccccctccttcagccataattcccttgatttttgcctccaagagtcttcttccatcaaggcccatttatgaaaaccttctctggcagtcttcttagcctcttcctcagcaagaaacagagggccttccctctccttggtatcccaaaaaacccaactacttgaaagccttctcttaagaaaacatttccaaacacctttttattctacctttcaaagaagccaagacaaaattggtagaaccagtaaaaattggactcatccaccaaccctttaacaggttagaaaacctttcctccctcagccacgtattttcaaatctaaaagaagtgggccctcttcttattccatagtaccatccacccacttccagtagaattgacgagcgatcagatataggatgaggtaaaatagatttcaccacccctctaaagtgactttcccatccctccgacactaggaaacaatctaatctggaggaggataggttgttctacccaccactgcatgtaaaaggcccccctaccataggaagatccctcagttctaactcattaatgattccaaagaatctcctcattggtgcagtcactctggagcccctactatgccctgcaacgaacctaacaacattgaaatctcctcctacgcaccacggctccttccacaaccctttattggcctccaaatcttcccgatggccctccatatcattaccttaagaaggatcataaacccctgtgaaaacccaaacaaaatcatcttcttggtttttaaacttgcatgaaactgagaaaccacccaactctagctctaagaactctaccactctattgtcccagaacaccaaaacccctcaagctgtacccaaagcattcacgtaaccccactctaggaacctgctcacacctaaactcctgacaatctccatcatcatcgactgaattttggtttcttgaagacaaccacacctccttgctacatccttatcactgacttgattatttttcttttatctgtatcattaacccctcttaacattccaagacagaatttttagtatcattgtccaaccagaatgatctcccacccagccttgtctctacctcccctcctcaaggctcctccaccacagtttatagaactctctaaccttttgagctccctgtcaaactttgaagaggaaatcattctcttcccctttctaacctctctactttgcatgcttagtaattttcttgttggaatgtacttaatcaccgctcaatgtctgttcatctccattttacatactcttgtcagttcaggagaagtgtttgtggtgtcctgttaaaatttcaccaaatgatgctttttaatcttcattgtaaaaagctgtcgttcacaatttataaattaatctgtgttacctggtttcagttacatggtcagtggctttcttgttttcatatactgtttttctctgctcaatgcctattcattttcatttatataaattctggagaagtctgtttgaaatgatagggtgaaagagtttaagcaacagttttatctttaattacataaatttaagattccttctttatttatcatctgaaaatcagcatgcttctgaattccagggcttcaattctacattaaccgaaccagtagacat

SEQ ID NO: 10989 - DNA, 4347 bp, Vitis vinifera
  Intron number 7 from transcript GSVIVT01029001001 (locus G SVIVG01029001001) derived from phytozome v7.0 (chr-ID chr5 ; pos 10478135 to 10482481 reverse strand)
cggaaatttcttcattcaagtatgcattacaatttctttgatagaaaaagaagaatttcttgatacatcttaaggctcacttgatagtttttgctcctacataattttttacatgacagaatttgttaaaaactagatatgaggaactgttgttgtcattttatgttatgcagaatagttagggttcaaatgaactaaaagtgaaccatggaattagcaagcctgaaaagtggaaaattactgtattgtagtgagtgcgatctgttatggatgctgctcttgaggccttttcaaaataaccttacatatcaggaagagaagtattatggatgattgataagaaagttccctggacttactctcgtgtattgtagtacaaaagtttcatacacctgtttactcacatctggacagagttgatatggatcacatttttctgtgggcaaggtattgtttgaaaggattaagttgattaatcccctcttattgcccctttagacctttatgatgatgatacatattggatattttattggtacaggttgataattgtgatgatttaaattttcatttgaacttgactgaaaattttataaaaaaatatctgactgtaaaggctgagaaaaatatctaagcactggaaatgaataagaatggatattaactggtatttttaatttatctttcatcctctatgtccaatcttcttagcttggtgagaccaagagaccgctatctctaattttttgcccactcattttctgtcatggaattttaattttcgctgaaaccctttagatcatgaaattgaggaatgaactcctctaatagcttctccggtagaagtgtatctattgccttttgacctttatgtggaggtttggtctttgactcccttgggtttgttcttggttatttcattctccaaaactcttctcatttcaccattcctcccctttttacttcgaaattttatagcctctcctaatattaaggtttgtgagattgaggacctcgaaagactcatgaggcatgaccactctttattgcgtacacttatctccatgtgtcccaaatgcgagtttgggcactatcttcttcatgcttattctcagtaaaatctttcatcttcactttgtccaatatattaaattcagtctctttccatctagccaattttttatggaaatctagtcccatttaagatcaaggcctttgtttggtagtggcacataagaaggtaaataccaatgacatgctacatttgagaagaccttttaaagcccttagtcctgattggtgcatcctctgttaggggagtgaagagacaattgaccatctctttctaaattgttcaattactctggggttatgacacaaaccattcagacaagccgggatggattgggttaagcctaggagtttatgagacatgttgattatttcatatatgggtttagggaactccattagaggcaagaccttgaggaaaattgcttgtctcactttgatatggatcgtgtggtgaaagagaaatgttaggatctttgaggataaatggaggatgttagagatgttgtgggattcacttcacttcttttcttctttttaggccttttgtattgatgacttcaaagacatccctctaaatgtcattcagctcaattggcatatgatgtgtataccaatagtgttggatcaactttgagaggagcttagctagtttgaggagttgaaatcttgtaaacttttttgtgatatatctttttgtatttatctccttgtagagtggagaagttctttgttttgatcaggtttgtgtatttatgggaaggattcctcatccttttcacgaactctctatttataattgatacatctcgtatttatgataaaaataaagaaataaaggcttatgtatgacttttgactaataagaaggttaatatcaatcacatgctccaaaattggaggccttgcaaagctgtcaattcatatgatgtgtcatgtgtgaggagagtgaagaatcagttgatcataatttcctttactgcctgttgccttagttggttcattcttactgggatcggctgggtctcaccgtgtagagtggagaggtgttgatcatttatttcaagggtttttagggacatccaagaggaaagagtttattgagtattactagcctcaacatgatttggattatatggtgggaaagaaatccaatgattttttaacatgtttgtaggatagtagatgcaatttgggacttgtttttctcttcttgctctctttaagcttttgtgaatgaagccttcatgtgcttcttatattatagattggctgtgaagtcttttcatgtatactcactgcctcctgagattgagagctatgtcaagttaaaccttgatggatgttctttgggtatcctagggtagcttgggattagagaactacttaagagtaaataaagcctacactaaacctgtaggtgaggtttcactattgagggctgagattgtggctcttttgaagggccttgtacaggttaaaaagtttggggcctttctaatcatgtagtagagggggattctgttgtcattttatgtgtgactaagaaggaagtaggctcatggaggtttgatgattggctccaccaaatgtttggtatcactacgaagttggggtgctccttttgctggcattcagatattggtccagaacttgaatggggcttctgagttaatatattaattaaatataaatgttggttagtaactgaattttgatcagtcatgattattatttaatttaagagactagcaatctttgttggtctctctagggtatgtagttaaggtaaggaaaggaattttttcaagagaaaagaagagaaaagttccttccccctgaaaatagaataaaaaagaaaacaaggtgtattaggagaaagtggggtaaaaactcatgcaaaacctgaggccatgtgattcctcaaatcaatgagaagagctttctgctctgcactgatgggtgttactgttattcattagaattctatcaatagcttgttaacccatattacactgggcatttctattagtgttaaaaatggtggtagaaaagtgaatctgaatattatttcacttgatgaaactagcgtacagagacaggttatatggattacacggttagcaaactaaatcctaacaaaaccacaaaaccaggaaactaagttatcagataatacaacaatcttatcccctaataattcgacctaacaaactcaaattattcctacttatccgaataatacaaattccagatttccaacaattagcattatgtttgactacattataaggagggagctaccatattctctgcagagcagcgtggggctgggcaggaaacaacacaactacttccgataataggataatgaggtattccccttaataaagtggttgcacatgcccaagtagagattattgtctgaatcctatcaatgatcacttgcaccaagtcaaacctgcccttaataaaaattcaccaatgaacctaattgctgcaatcaaagcacagatcaacaactaagcttgacttggaaaatcttgatatactttgtcaaaattaactttagggagggcttaaaatctttcttaaatgtctatgtatatgtgtgtgtgtgtgtgtggttttgtacatgaggaaatctgtcctattattaagtagcaataaggttttttggttttcttttaatgttgctgggatctggtacattaattgttgaagatgatgtcttcattgtaaaaagagataagtgaatgttcctttatagcaagaatataaacttctctgatattctcttgtctacttgtatatgtcaaagccacttagtgattattagttagaatgattttgaatatgttttgtagttgggaaggagctattctattaataggtgttttgtccactttaatattaaataatatactgatatgcttttggttgccaattaatgcttttacctgaagagtggttaccaattgatgcttttacctgaagagaaaccatgattgttgataatgtgagtccctatctggatagttgagggtggctattgaatggattcctaaatttaaaatgcaacttgggtgctttttcttgaaggttttttgggggttttagtttttattttttatttaaaattacataagcttggtaggtctcacttggtgatttttcatggtaagctttctttattgtgacatgcctttgacagtgacatgccttatgatgaatcttgcagaaagaaagtttctagcttagagaaagaacgtcagg

SEQ ID NO: 10990 - DNA, 5259 bp, Vitis vinifera
  Intron number 7 from transcript GSVIVT01015428001 (locus G SVIVG01015428001) derived from phytozome v7.0 (chr-ID chr1 1; pos 3583398 to 3588656)
catagcagcacagagtccaggagaaggatcagttggtatgctttttgttatttaagagttttgatggtttgaggatggaaccttttatttagtttcacatcaaagtttttgtatctgctatctatcataggtccacaggattttaaagtttcattttaaacttaattgtcaatagtcacagggtctaaaacccattataattgaagtgcttgaaagaagacagaacttgaaatgggtcttcttcacattattcttaggccattagcttattcaactgatataaaactgatttttgaaatccatttgatgtgggttatagactcattttcagcagaccttctgtctgcttctgtgatgtaagtaggctaaacatagttactagaactttcagatagatttcctttttggaatagcgtacacctattttcatttttatccaactttgcatagaggcgtctgtattttttggaatgatttttcatcctttgtacttattttttcaatgtaatgaaatggttgcttctaataaaaacaatccatagttatcggaacaagtaaaaaggcataaagcaaaagtggtgggtgggaagagaaaagggacaaaaatgttagagaaatgtacaagaaaaaattatgaaggcctctcaataaaagtatatgaagtatttgacatgtaacatatattaggatgcatcaaatccaaaaaagaaaaaagtttataaatacaagtgataactttacttttgggtgtacatgctttaaattatcattgattcaccaccaattgttgcaatgtttagttaacaaatactaacaatgaccatcaattctcataaaatacatgtagcttctaatgatcttgaaagtgctattttgaatttttttttttttttgataagtaaagcaaattgtattaaaacagaggcgagaagctacaaagcatacagggggtatacaaagcaactagcacctctcaaagcaaaaagaagaccaacaaagcctcaccaccccttaattggacgctaaccattccaagaaccgtataagggatagacgctcctctccaatatacaatctagcctagctccataaattacaaacaaaagaattcttaagcttctgaatatctaacactcctcccctaaaagttagtctatttctctccttccaaaccgtccaaaaaataaacaatggtatggacttccatatctttttccttttctttcccacaaaagggcccctccagctagttaagacctcctttacagtttctggaaagacccactgcacacctgataacccaaggacaatattccacagaactctgaccactatatagtgaataagtatatgatttacagtttcttcttcacacccacacagaaagcaacaattaggaagctgtcatcctcttttctgaagcctatcaagagtgagcaccctccctcacgtagcctcccaagcaaagaatgcaaccttggttgaaactaaatccacccaaatacatcttgacagaaaaacaatatcattgggattggccaacaagctgtacgcttctttgaccctaaactttccgttttttcctcccttccaacaaaatgaatcttcctccatagagggcttgtagcccctcagagcatagagcaattcccctatcatatccaactcccaatcattaaaatccctcagaaatcttagattccaaccccctgaccgaaattctgatcccacatctcctccaccgtagcattcctatgggaagccatagcaaaaagacgagggaaattttgggacaacgctataccagtacaccaaacatcagtccaaaaactgattttgcttcccttccaagctatgaacaccatgttatcccaacaccaattagtttccttcaaaatttccttccgcacccctactccgaacgccccataagccctctttgctctctaaccatgaccttcttgcctgtatttcgccgttatcacttgtttccaaatattatctttatcacaagcaaacctccagatccatttaccaagcaaagctttgttcaagagcactagcttccttaagcctatccttcccttgttcttgtccacacaaatcacctcccatttaattagatgagctttcctttccacgtttccccctccccaaaggaagtctctttgtactttttctaatcttctagcaactatcttaggcatccggaatagagacatatgatagattggcatgctagccaaggtgctctttatgagagtgattctcccacctttggagatatattgccgtttccgccgtgctagtctcctcctcattttctcttccaccccatcccacacagaaagtgctattttgaaatattagagttaccatttcaatttttttaagcacaagtggttcaaagaacttttgagttccaatggtaatcctaagaatcgaagaatcaagcatgaatagtttactctgatgtgtgctgccacaaaagtctggaaaacatatcaatactgccattctctaagggctaagaacaatcttttatttctagttaaagaggtttggggatcaggtgcctctctcaaaactcgttttttgattaggaagcggtgtgggggaagatattaactgtagatacgttgatgaagaggggatgccccttggttaatagatggtttctttgtaaaaatagtgaagagtcagctgatcatattttgattcattgtaattgaaaatgtgaatctcaataatgaactacacctagaggggggtgaataggtgttgtagaacaatttaaaaaatccttccaacaaagattacctaaccttagactatcttaatgtcaagaattttttcttctaataacttttcaacaaagcaaaacatccacaagcaataatgtatgcatcaacactctcccaacaatttataaatgcaaaacacatgcaaatacttcaacactcctcaaaaataaatcaaaacatagagtgagagaaagagacaatgaacaccggatttttaatgtggaaaacctccgaaaagatcaaaaaccacgggcctatcaccgattgaaaactccactatgaagaataaaaaaactgagtacaaagttttacctagttcaagccaaccaatccttcccggaatacttgactagtaccttcattttcagcttctccttttggagcacacttggagtccgcaccaagctcaatcttggcctcttcttgaatccacacaagaagaaaatgggtttttgcacaacccaaatagaatgagagatttagatgtgaatgaaggaatgaatcaacccatttattgctcaagaaaatccattgaaaactagttttgaaaacattaagagaagtggattttctttgcaatcaaaaaccccaacttaggaaagcaaaaatgagaaatgaagaacacttggagtgtggctactctccccacattttctgcagtctctctatttagaaaatgagaaaagatttgtttttaaagtgtaaaaagaaacccttaatctaatggctgagatttgatcaaaaaaacattagttggataaatccacccctacacttggatcgatccagaaacagaggaatgaaagccttgcaccaaaaaccatttttcccaactttctaacacatttaaaaattaaaaaccgagttgattcacacccaatcactccacactcgactacatacctcggcctcttagtaaagtcttagtcttcaagtcaagtagtccgaataggaataggaaagccgagttaggggacacttaggaattttgtccggaattgccaacctagctaaacactcacagtaataagacaagacaactttggttagtgttgttaacgacttttgatttggtatgggtgttcctagcttcagtgagaaatcttctcctataatggaaattcagggactctagagaagaagaagaagagagcagtttggcggctagctccgatttgtttattttggtgtatttggggagagtgcaactgaaggatcttcgaatatgaagaactgttggaccaaaggctgagtggtccaaacagttgctgaatgtggaaatcccctctcatctgaattttctggagactctatattgtggctacccttgcttttttctaggtttttgtctttattttctggtgcttgggttggttttttttgtgtgtactgcttgttacattgagtatgccccctttttttggcgcttcttaatacaagcttttgtctatccaaaaaaaatttgcctttccaggtgacctgttgggttttcacggtagcagctcctctaggtaatagtaatactaaggatcaaaaaatgaaatatgaatagttgctctaaggtgtgctaccagaaaagtctgggacatatattggaacctgctttccaagtgagtgacctgttgggtgttagtagcagctcctctaggcttcaccttaaaatattgtctctacatgtgtgatcgaagaaacttaaaaccaaatcacatgatcattgtacaattttttttaaaacctggaaccttccacaaacccttcccatcccttgaccacttgagtcaggcctcaagggcttgcatgatcattatacaatatcaacaccaatgcacatacgagttccagatctaccaacttgaaacttgctgcacttagaccaaaacctttgccggctacatcaataaaggaacttgaggaacagcaatattggaactagaattaagttgcttaaatgaaggtaatagcataaaaaaattaagttatcaaagtcctgactaaaattcacttttgaatgatgggggccatggcatggaaagtaaaagttggttgatttgttgaaagatttttttgctatgttgaaagtttacaagatctaggtccttgccttgatcctccgggagagggtctttagatgaaatgtcaccaaatgcgactaactggggcaatggcatgtcaagtaaaagttggttgacttgttgaaagattgtttagctatgttgaaagtttacaagatctagctccttgtcttattcttctaggtaatggtgaaacaggagtttttgttttttcccatcttctacatcggcatagggaataatttatccttcctaggcatattgtttatccatctttttgtagctgttaaacctagctttgttataaaatagtcgataccatggtcttctgtgtttatttcatgctttaactaattcaagttttttcaggtgcttatcttgga

SEQ ID NO: 10991 - DNA, 9045 bp, Vitis vinifera
  Intron number 5 from transcript GSVIVT01024099001 (locus G SVIVG01024099001) derived from phytozome v7.0 (chr-ID chr3 ; pos 1068898 to 1077942 reverse strand)
accctgagagttgtcctccagagttaagtggatgctattcttcttgaaagatgcagatgcaaggcagcaagaagatgagaggatgcgcaactgggtttccgagatctgggatcttgcttattgttacgaaaaaacaagaacataaggacacacaaatttatgtggaaaatcctaaatgggaaaaattaggggtagaggaaaagaaaatcaattatgtcaaaaattagtacaaaaggggagagaatcaagcagctaatgcataaataaatgaagtccatattgccagggcaaaaaatccataatttttcttcatcacatatgtcgcatggcaaacttttcaagttggacaaaaaaagaattcaggttgccaagctctaacacttatgatgctgaggacactatagatgttttcatcttcaatgaagagtcttgaaggacaaagttcttcccctggcgcatgttcaaaaagctggtgagtccttataaggttggcgaggcaattgaagccatccaaattaagatctaggacatctcaaagagtcgggaaacttatggaatcaaaagcattggagaagcaactagcagtaaagcaagttgaggctccagagactaagatatgcctctcctcgtgtcatagaagaggttgttgtgggcctaaaggaagagacagagaatgtagtgatgcagcttgtggaaggggatgaaaggagccgtgccgtttctatagtaggaatgggcagcataggcaaaacaactcttgccaaaaaagtctataatgatagcagagttgttcatcgttttcaagataatagagcatgagtttatgcaccgctagactgcaaaccgagagacatatttcagcggattataaaccaagtttctaaactaactaaagaagaagcagagaggatagagggattgcaagaaaatgagttgggggatttcctttatgaccaattgaaggaaagatgttagaatttgagaattttatagatactttaagaaatattttgtatcttttgttaacagtaggattagttgtaaaggtgtgaagatccgtattttgttgaatttgtttttgaaaaagctagatgttagttcggtttggtattgactcaacagtaatgtgcctaaaattgtaatatttatatatcagcatatgaatgaaattgtgtgttcgcatggtatcagagcaccaaaaagatcttaataggacctatgagtggaaaaaaaaaaaccaccagcaaggctttctctaaaaaccctcatggcttccaacaatacgtctgctctttcaaccccagttttcaatggtgaaaactatcaagtttgggctgttaagatgaaagcttacctgagaggtcttggtttgtggcagtgggttgaaactgaaagacaaatagagcctttgggaaacaatccaaccctcaatcaaatcggggctcatgaagaagaagaagctaaaactccaagagctttatcttacatccatgctgctgtctcagaaccaattttcacaaggattatggcttgcgaaacaccaaaagaggcatgggacaagctcaaggagatgtatttggggagtgacagaactaggcaaatgcagattctgaatctgaagaggcaatttgaagttttgaggatgaaagacaatgagttcatcaaagaatatgtagacaagctcatggaagttgttaacaaaatccggcttcttggtgaggaactaacaaaccaaagggttgtagagaaagttctagtgagcttgcctgaaagatttgagtccaagatctcttcacttgaaaactcaaaggatttaaccaaaatttccttggctgagcttgttcatgcttttcaagctcaagaacagaggagatcaatgagacaggaagaaagcaatgaagaagcttttcttgcactgcaaaaaagaaaagcttctcaaggcagagataaaaagcaatctggtgagaaaaaaagataaagagaagaatgagggccaaggaaggaaaagtggtggcaagaagagatatcctccatgtcctcactgcaagaaatagagtcattcagagaatttttgttggtataagcctagtgtacaatgtagatcatgcaagcaatttggtcatgtagagaaggtatgcaagaataaaaatgatcagcaaggggagcaaggacaacaagcacaaatggctgaaaatcaacaacaacaagagcaattgtttattattacaagtcatgcaacgagtagctatacagaaacttagcttattgacaatggttgtacaaaccaaatgactcctgaattgagttatttcaaggagttggatcagtcatataagtcgaaagtgaagattggaaatggagatttggttgatgtcaagggcaagggagttgttgctgttgagactccaacagatattaaatatatctcatatgtgctgtttgtgcctgaaattagtcaaagcttattaagtgtgggtcaaatgctagagaagaattattctttgcattttcaaaaaatgtcctgcaccgttgttgataatgttggttgtaagttgatgactgtgaaaatgagagacaaaagctttccaattaagtggaaagagactaatttgcatgcctataccactgttgttgatgagtctgtgttgtggcacaagagatttggccattttcattatgctgcacttaaacacttgcatcagaaaggcttaacacaaggcctacctgtcatttgtgatgaaaaaaatgtgtgtcaagtctgtcaatttgggaagcaaagtagattgtcatttcctgtaaacaaggcctagagagcttcagaaaggttgcaattgatccatactgatgtgtgtagaccaatgaagacaccctcgctgaatggaaacaggtatttcatcctgttcatagatgataaaacaaggatgtgttaggttttctttatgaagcaaaaatcaaaagtggctagtgtgtttcagaatttcaaggccttggtagaaaatcaagcaaattgcagcattaaggtaataagatcagataatgggactgaatatacatcagacaagtttgacaggttttgtgttgaagttggaattgtacattagttgactgtcacttactcccctcaacaaaatggagtgagtgagaggaagaatagaaccattatggagatgacaaggtgtctgctatttgaaaagaaaatgcccaagtgtttctagacagaagctgttaacacagctgtgtatttgttgaacagacttccaaccaaagctatgaagaataaaacttcatttgaggcttggtatggagttaaaccagctgtggagcacttgaaagtatttgggagtttgtgttacactcatgtgccagatgtgaaaagagagaagttggactacaaagctgaaatgggaatcttcctgggatatagctcaacctccaagggctatagagttttcaatttgaaaacaaaaaaaataatggttagcagggacatcaaagttgatgaagcggcagtatggaactgggagaaaaatgagatagaagtagaagatgttgatcaaatcggagtaaccattccccaaattccagaagaaactgaagatgaagttggtgctgataacttagatgatgttccagtaagaggaacaaggttacttgatgaaatatatgagtgatgtgatgtagcattacaggagcctacatgttatgatgaagctgctaaacaaaatgggtggagagttgcaatggaggatgagctaaaaatgataaagaaaaatggaacttgggagctggttgatagacccaaaaatcaaaagataattggagttaagtgggttttcagaatcaaatataactcaaatcattctgtaaacaaacttaaggccaaattggttgtaaagggctattctcaagagtatggtgttgatttttcaaatacttttgctccagtggctaggcatgatactataaggcttctggtggctttagctgcaaagatgggctggaaaattcatcatcttgatgtgaagtctgcctttctaaatggtgtgcttgaagaagatatttatgttgagcaaccagaaggatttcaagtttcaggttgtgaagacaaagtttacaagctccgcaaagctctctatggcttgaaacaagcaccaagagcttggtatagtagaattgatgcctatctactgcagcaaggatttaaaagaagtgaaagtgaagccactctatatgtgttgaaggttcaagaagaagttcagcttattgtctctttgtatgtagatgacttgctggttacaggttgtaattcaaaaatcttgaagcaattcatgatgcagatggaaagtgagtttgaaatgtccaatttgggtgagatgaaatatttgttgggcatcaaaattcaccaatgtgaagctggaatcttcatctcacaacagaagtatgctatgaaggttttgaagaagtttcatatggaaagatccaaatctgtagcaactcctttggttgtgaatgagaaattatcaaataatgaagttaacatcaaagcagatgcctctgtttacagaagcctaataggtagtctgctctacttatctgctacaaggccaagtttaatgttctcagcaagcctactctcaaggtttatgcactcacctagtaaaattcattttggggtagctaagagagttctaaggtgcattagaggtacttttgactatggtttgtggtttgttaagaaagaaagtaaagaactccaaggatatgcagacagtgactgggtaggaagtttagatgattccaaaagcacttctggttatgctttctcgtttggtagtggagttttttcatagaattcaaaaaaacaagaggtcgtggctcaatcctcagcagaagctgagtatatttctacagcagcaactgcaaaccaagctatttagctaaggaaactgctgagtgatttggggcaaagccaagtagatgctactgtaatttgggttgacaacaagtcaaccattgctattacaaaaaaccctgtgcagcatggaagaaccaaacacataaatgtgaagtttcatgcaattagagaagctgagaagaatggtgaagtcaatatggtgcattgttgctcagaaaatcagattgctgacatattaactaaggcactttccaaagccaagttcgaagagctaagatcaaggcttggagtctctaagaaaattctcaaggagaagtgttagaatttgagaattttatagatactttaagaaatcttttgtatcttttgttaacagtaggattagttgtaaaggtgtgaaaatccgtattttgtggaatttgtttttgaaaaagctagatgtgttagttgggtttggtattgactcaatagtaatgtgcctaaaattgtaatatttatatatcagcatatgaatgaaatcgtgtgttcacaaaagaacatacttggtagttttggatgacctatggaacgttgaagattggaaatttctcacaaacgtcttcccaaaggaaagcaatggcagtagattacttcttacaacttgaaatagggatgttgctttgcaagcaaatattcagagtgttccctatgaaatgcatgccacttctctgtgaagcagagtgttggaagttgttttgtagaactgcaatccctgacaatgatactgggagttgtcctccagagttaaaggaatatggggagaagatggtgaagaaatgtgttggtttaccattggccattgttgtattgggaggcttgttatcgtccaaaaatcaatcaccgactgaatgggaaaatgtgctcaacaacttacaggcacacttctccagagacaaaggagtagatgcaatattgagtttaagctacattgagctgccccacaactagagatcatgctttctttatctaggcctcctcccagaagaccaggtgatccccacaaggaaattactcctatggatggcagagggttttgttccacaaaagatagacaaagaattggaggacatggctgatgattaccttaagagttaattgatagaaacttggttcaagttgtaacggtcagtaccattgagaaaattaaaaaattcaggattcatgatatagtacgggatttgtccataaaaaaggcgaatgaggaaaacttttttgatattaacatagtttctcctccctcaactagttaatttcttctttcaaccaaaccctgtcaacaaggtatttatttcgacttgaagaggtacgcttccatggaacattcaactccatacattcgcactttcctcttttcaaattaaaatatgaatactctagtataatacaactagattttgtttacaagtatttcaaattgcttagagtgtgagacttgaaagcacaaaaagagataggcctgccaagttcaattgggaaattgattcatttaagatacttaagattacatccgaggtccttcctttatcttccaagctccttgggcaatttaagaagtttgcagacattggatatcgattgggttgtggaagtaccaacaatgatactgaaaatggaaaatctacaacaccttttcctcctatatgaaagacaagatggaatgcctttgtgaattaacactcttaagtaatctccaaactctgtccagcatatggtttagtgattggcaccaaaatgatacaagtaagctaactagccttcaaaaattaaaactacagggggaatttgccttagaagtgcctgagttctcaaactccattgctaagctagagaatcttcgctccttgtatcttttggcaattgatttctccaatatttcattatgtgtcatgaactcttggctcaaggtatccaagctaaacataaacacgcccataaggcaattatgcaatccacatgaatttctgccaaatctaacacaattgaccttggaaaggacccgggttggaacatgacctatggtgattttggagaagctgccaaaattgaggactctaaaattaagggaggactcatatcttggaaagaaaatgcaagtatctacaagtggctttcctcaactcgaagttctccaactttctagtttaggcaactggaagaggttgattatagagaagggtggcatgtcaaagctaactcacttgcagatttttgaaagtgtcttggacatgatggacttgttgagctcttccatctgcagaaggcagatttcattgattcacatccatatcatcctagctggatttcttccttgccttggtgcacccaattggcgttatgcagaaaggtacccaactcttttatgctcaatttcatttttcctcgctcatactgtcatacatcaacttctaaaaacgggtcctagaggatggttaattgctcttaacacttgctatttttttcatggcactttttccacatatgaccaattatattattggaaatcccttcataacgaaatccatattgaactcctatactgcatatcttttttattaattttgtaataaaactagagagtagcctttttcccacatgagattctatccaaacaaaatcaacaataaccctactcactgaccctctataaaaatcaaaattttaaggatctactcttttcttttttcttggcctaatactctagtatatgttgctcttgatttttatatccatttcaggacgcctgaatttggtctcaggagatggcacttgatgcgtgttggggttacaagcaacagtacaagaagatcatataatgaatatacagactctgttttctattatatttggaagtgaaaatgcatgccttatcaagaccttgtcaggtcagcgactgtctgaacttgttattagaataattatttgtgacagagattgtattcgatgcagattgtcatcaactcaattataattgtttttacagcatgtgacagtgtatgatttgtttattgtttattgttcttgtattttggtgtgatttagatccagccctgtaattcatctcccttcacttctagttctgatacataatggaaaagctgttctaatgcgtttgacagtgaaatttataacatgaattgctaatctgcagagaattctgttatattcatggaacagattaattgaataactttccgaacccaactcacttacatcatacatgttctgaattcacgaaaatgaactatgccatactatgccattcacacagactagtcaagcatgatcaattagtagaattagtcactccacaaaagaagacaaaaacaactgtacctccaatgtgaattggaattgagttgataacaacaaagagatgcataaagtcttaatcacaattaatctgatgagaggcttggatggtcaagtgagttggccaagttctcagactccaatgccgagctcaagaatctcataccgttgacattagaaggatatggcctgcactgcaacaccatagcaattttggtgaagctatcaaaattgttaactctcaaaaattaagaaaagactcgtatgttagagaagacatgcaaaattgagccagctgtattgcgatttttatcattcttccagtatttttttagcctcccaggagaggattcatgagttatatttttcggggtggaaactaaaccaatacagggcagtttgatggcatgatgcttgctagagccaaggaatctgcattaaagagacaagtgaaaattaatggactagtcctagattctttccttccaagggccaaaaattagatgttcttaaactcaagctgaggctcctttttcttttttaaagagacgaagcacacctttaggttttagttttgatactagcagaaggaaagcacaaagagatgagaaacaactgaaggattggtatcaatcttacggacgaggaaagcaattggctccctaacaacaaatcgaggaggctaaattgcagtgtaaggggaaagtgtaatctggggtttggcaccaaaactttgacaaaacataagctactgttcctttgagagtatcaaatctattttc

SEQ ID NO: 10992 - DNA, 4436 bp, Vitis vinifera
  Intron number 2 from transcript GSVIVT01001793001 (locus G SVIVG01001793001) derived from phytozome v7.0 (chr-ID chr1 8_random; pos 3269100 to 3273535 reverse strand)
ggaaccaccaaaagcgattcccatgtacaatgatgttacatcaagaaatcactgtacatacctttgtacagtgatgttacaacttacctctcatatttgaacatatctcttgatgttctctaggttgtagcaagaaaattgatgttacatgtacagtgaaaaggtaaaatgatattaatcttatccttgacaaaaactgatggcttgtatgtagttatacatacctttgaaggggatccttgatattaggaccccatttatccacgtcacatacattggtctcatttttctcgtaggtattcttaaattcaaatttagcaagtaatcatcaacgatattccattcagaataaataaatacaactcagagagtacaagcgacctttcaaaccaaaatctctgaaccaagtcttaaacaacagtttccttttgctgatatagctaattggctggaggttttttcagacaatcaccactattgtctcaagtttgcctaatccacgacaacaagcatgcaaaaatgctcctcaatcttcaattgctcttgagagatctgatgcaatatctcctcctttctcaagttgttcatcatctctaaagactagcggtccataggcaaccaaagttgtatagagatgatctgtgaaattctttcgagtatctttacctctaaaactcaagaatacatgataactactatggatgcaagtaaaagtaaaagaagaggctctttgagtggtagatgaagtcatttgtgaattgatggtgcgaaaattacaggagtttggagaacaagagagggtctttggatgctcattgagtactgctcttggcctttagcaattttgaagttttccgtgcaacttcaaagaagaaagggcgaaacctcaaaagtgaaaacaggttagctggctgaaatgctttattgcgtttgtgtagctagcattgctgccaatattctcaattctttttcttttatgagtctttttgacatcaaatggtagttggaatgtcctatttgtggggctagcattgctgcccctattagtaattgtatctttcttttataattcctatagtattcaatgatttttttttttttataaaatatatatatatttaatacttatttttacctattattatctatcacaacaatttttttttttaagaaaaattaaaatatgacactttaaaaaatatttttttataataactatatgccacaaataggatgaatgtggaaaacatttgttcaagaccttttttttttaaaaaaaagagtaaaataattaatttggctaaaaaataaatctaaaaacatctttgtaaaagccattttccaagggaaaaaaaccctgattaacatttatatttataaataataaaataagaaataattcatttaaaatcaaatttatattcataaatttgaattttagtgggacattatttatgaatacctttcctaaaatacccatttcactttaatcttacttcttaattatttattttgagaataaataaaattctagttttcttaggaggattgattgcaatgtcataagtttgaaaaaaaatgaaatcattatagattttatttgatttgagttttaaaattttatttgaatgaaaaaacattttaaaaaaaatactttgtgttaatttttgagtgtattaccatgtagcaaccttatctagaaaataggtcacatcagttcttggctatataaaaattttatatgatattaaattatatatttacatgaattattttcataataaatttgaataatttttttttataaaataatgcttcaattaattttagattttatcttaaaaatcaattaattaattaattttttaattttttttataacaatactaaaaataaatggtaaggggaaaacccttaaaattcatgcatgaattaggcacaaaacatctcataaaaagatgtataagagtcagcacattgtcaaaattccagcatcaagaaagatgaaattttaaagagaagtatctttatagaaaacaattttaatattaaaaatataaatctaaatataaaagacgattcctcacgtgaccaaaacgattgtatttttggaccaaccgtatttttgaaatattttttaatgtacgtatacaattgtcaaaattctttatcgcccattgactggttcatattgagattagaaaaagataatataagtttcatgagaggggtaaaggaaatctgaatccagcagagagaaggaaaagagtactcgatttccaagaactctatggcaaggaaagatgctatgcaaagtttgaattcttaaaatcctttcacattttgcggttgcatcgtgactctcgttctcgatgatattagactgaacagctatcattgatttgtctctttctccacttttttattttgcaaattattttgttttccccttttcttagtcaccaactaaacacttttgccattggtggtgtcattttagttctttttttcccccctgttgttgttctttaccttgtctatgattttgttttctttcaaagaagctaataaagtaaataatgtttgaaatgcaatcttttatataacaataaataatcgaaaaaaaaaagatataaaaaaataatatatatatattctaaaaagtaatgtagagagaagaggaggagaattgagatagtgagaaagaacttttctctcattgacgtgtgattttattttcaccaaaagctttttataaactcataaaagtttaaaattaatatcttcatttaatcattttaacatgagtattaatgaaggactgatgggtctcccctcccatttgtttttaatataaaacaaattctcttgtagaaaaaatgagagaaaataagaggggaaataaatgaacagaagttgagcattgaaagggaattaaataatgatagagaaagggaaaagaaaatgagaaaaaaagaagaaaaagaataatcaaaggatggagcacttggaaaactcacctcacagtaatgtcgttgattctctttttgttctattctaccttggcttcacgagagtcaaagaattgtgatgcatatgccaaagatagaaaccattaaaaaaaaaccctaaaatattcttctcatgaaagatgaaacaatcttgttttgacactcactacaatgttgttttattgggttaaagaacatctatttttgggttgctttgtatcatcataacgtatggtatggaaaatatcaaaacaacacaactagtatctcgaacgatataatatattttttaatacactatatggtatgtattgattccactcccagatgataggtatcacatcataaatatcatgtatcttataatactaataacaatgcttatagtgtttcttggaaaacaatttgtgatttctcctaaaaacacttccactaccaaatgcacatttaagcacttaaattagacaaacagttattgaagcacattaagcacttagaacccatttgataatgattctaccttttaatatttttaatacttgaaaattttcgttattcaaatgttaaaaatattaaaaatgttttttagaattactctcaaacgcactcttaaaagtgtatttggtagtgattttaagaaacatttctaacttttttaatacttgaattataaaaattttcatgttagaaaagttaaaatcatcttctataattactaccaaatgggctctaaattagataaacagttattttaaattattaacatttaaaaaaaaaatctttgcacaaaccgaagtactaatatataacattgaagtttagaaaaatctaacacttttatacatccttacaaagaagctccactgctctttactgagaaaaatacatttcaaatgttgcagtgtcagtcctggccaagaggcaatactgagctgctctagtttgttgaacttgattttactagaacttgaggtcctcagaatttaggttgtttgtcatcaccgaatggcccaagttggtgatgtttcttgagagggtgtccagcatctgtggagactagagattgagtacagttggcctggcagctctgattagtttcccatctgagctggaatgtttaacccgtaagcaccattgaagctgttcatgccagggtggatagaagggtcccgatgaatccgcaagagaggtctgggccttacaaggccaacattgctgttgatctgttgaactcagtcagacggccaggacggagcagcagatggaaagaaagactggctcaaatggccagccaagagctgaatgagttgaaagcacatgcttctccagtaaacaaattgctcccacctttaatttgtcgcagtttatcctcttgggaatccatattgcaaggtatagcaacaggagcagaatcttgagggagag

SEQ ID NO: 10993 - DNA, 16440 bp, Vitis vinifera
  Intron number 4 from transcript GSVIVT01010513001 (locus G SVIVG01010513001) derived from phytozome v7.0 (chr-ID chr1 ; pos 21243531 to 21259970 reverse strand)
ctgccctgcttcaaaccaaatctagaaaggtaacttctaagtttctaacaaactcttcctagtgaagatcttaaaattttacctcaatagctaagatcaaagatgtagtgccatgggctaacctgatttccactagacaatgatgggtgctggaacctgtttgatcttactacagaactcttaaaattctgcttcagtagttatcctatgcattttagtggacattgtaacgtaaaagctgatgctattcttaacattgtaaaataaattaggggccaatttggacttcaatttaagaacaacagaaggcagtagtcctacactaccatgaatctcagaaatttgcctttagttaatagttgtactgtttaagctctcaacttgacactttatgatataggtttttcacatcattttttcttccctttctgtcctcagaacataaaaacaaatgtaacatttttaattagtatatcatacatctaatttttaaaatgtgagtggatgtttctcaaaatcaagagaatcaaaaactgcccagtaattgattgttggctcactcctttttaatgacttaactctcagtgctcaacaaggctttacctgggagtgactttgaaggtttaggatagagtgtgataaacttgtggaggagagtcattcaaggtaaatttcaaggaggatcaagttaggcttctaatgaggaaagtgagtggtgtagagtttgcctttggaaagcaatcagaaaaaggtgacaagaatcactatcatgagagatcgtccccagacaaaactgttggctggatgactgatgtgggaagtgtttgttgagactctttttcaatgcttttgattatacttcttgcagaactgcttgggtgtcacacctgtgaaaaggttggggggtttagggtcattgatccccttgagtaggagaagtttccatgatatgaaacttagcatggcgtgtgctttctttcactacattcattatgtcagtaagtgagaattactttgataagttagtgtgggcttggtgacttatctattaaatcaaatcccaactattaagcctgaaagctatttgttcttttctggctaaagagattcacacctgggacaacattttaagtttgttaatttatcaagaaggttgttaggggagattttaccaatgaatcagcttgggaatggggactggtctcctgctagtaaatgctaccttggcaagcaagataaggaataataacattcttattctttggtggttccctatccttaaaggagttgttgataggttggcatgagagttttgttggaataagccaaagatcttaaagacccacctctctttgctggattagacacaattggagtctacgggcaaaggcaagtccgactgtggtaataaagaatttattcttacagtttgttctcttttcctagcatcttagcatctctttggactttttcggttcttccccacttgattttattgaatttctaagaaaaggataggcacttgcttttcttgtctttttttatccttttttcccacttttggtttgctttatacacaccctgtgtaccagggtcaggcccctttctgttaggtgccttgtaatatacttttctcatttgcctataagaaaagatgatcttcctatatttaaaaggttgagctgcctaatcacagtttttagaatacaacctaggccattcatttgacacactgctagttttgggcctaccattacgagtaacttttatgcaaccacacacatgtttgacgaaaactatcgactttatgacaatttcatgtttgagaactgaaaacgtgaaatttgattgagttacaacttatttatataagttgtatactaaggggaagaaaaaggaaataggcttaggaaataaaaacaaatttctagtgttactttaacttgtctatcttattatcagtatatggatctaatttgattttcagttcaaatcccatggttttaatccataatcaaatcagaaaaaatattccatgttttccaatactccccccatcaaagctggtgcatagatattatgtgttcccagcttgtttattatagaattaaacatggtgtttgtgacttattttagtgaagacattttctagtcattctgtaggcatatgtgagaacaattgttaattgatttgagaagaaattggacatcttataggaaacaatgaaaaaatgaaacaaattaatttctagaaattagtcccaaaaatcatgggaattctaattctaacttcctaatttaaattactatatacaactatcaacttgtctattaagaggttgaataccaaccattatttccttattaaaaggttgattaatcaacactccccctcaagttggtgaatagatgttttccatttcaagcttgctagtaatcatctaaaaattttgacttgaaagtcacttgggatatttatcaactatctttttgttgaaacacaggaagaacaaatgaggccactatccctctttgatgaagtgtccatgaatctttgcatgctttgtccaatcatgttggataggattataggcaatgttaatggccaacctttgatcacagtataacttcattgttccttcctatttaatcttgagaaaatcgagaatgatttttaaccaaagaagttcacatattccttgtgccataaccctgaattctgcctttgtgcttgacttgcccataacacctagctttttgcttctccaagtaactaggctttctcctaggaatgtgtggtaacctaggatagatcttcagtctaaaactgaccctatccagtctacatcaatgtatgcttccaaatttatgtccatattcctcttaatcaaaattcattttctagaattgagtttcaaatatcttataattttatagattgcctctagatggctattctttggtgaatgtatgaattgactaaccacactcacaacataggctaaattaggcctaatatttgacaagtaaatcaattttcccactagcccttagtccataccttggtccactactgcatcatccttgtcatccacaagcctatgattctgttcaatgggagtattggttggcttacaccccaacatctcgattttctttaggagatcaagaacatatttttgttgtgaaataaaaatgcccttattcgaatgagagacctcaatacccaagaagtacctcagcctccttagatctttaatgtcaaattctgcagcaagatgttttttaagctattcaatcttctaaatcatccccagtcacaactatatcatccacataaacaattagagttgtgacctttctagatgttaagtacttgttaaagagagtttgatctccttgactttatcggtacttcatcctcatcatgactttagcaaatctcctaaacaatgccctaggagattgcttaagcacatatagcaccttctttagtctacacacaaaatcactaccaaagttgtcatcaaatcctagtggagcctccatatagacttcctcttccatatcactatgtcagaaggcatttttaacatcaaattgttgcaaataccaagcaagattagtagctaaagataataagacttgaaatgtgttcatatttgccattagtgcaaaagtttcttggtaattcactccataagtctaagtataccctctacctacgaatctacttttgtatcattctaaagtcccatcagttttgtacttaatagtgaatacccacttacatttaattggtcttttccctttaggaagttttacaacatcccatgtttgatttttttcaagtgctctcacttactcactcatggcatttctctctcgtgaaccatttttgggatttctaagggacttaggtgactatggaaggctttgtgtgagggtgacaatttgtcaaatgagacaaagttggaaatatggtgtttggtgcatgtttgggtgccttttctaatggaaatagacaaatttagatcattaaagacaagttcatccgcatgctgctttacaagctagttaacgtgcatgtcttttctaatggcaataggcaaatttagatccttgaagacaggttcatccacatgcttttatatgggttggtcaatgtgtggtgaagaaggtaaattaagagaagtaaaaagttcagtaccaagtgggtgagacttctttcttgaatagacttgtaatagtgtagtgatagtattgacgggtattttttcttctaattgtgtctcagagataccaagtgggtgaaagggcaaaaaaaggtcacagggtaagtcaagatctggtggattcattagaatgggagacttatcttctaacaaaggctcccactgaagatcaggtctaaggcaaaagggttgcttttccacaaaacatccatgtatgtgaagaatgttttggaagatgggtgataacgtttgcaccttttctttgttggagagtagtcaataaagatacacttgaagagttctaggatctagcttagttgtggttttggtcatggatatgcatatatgagatacacctaaacactttaaggaggagttagttgaaaccattgaagtcgagaaaattttatgagaggatagcccttggggatcgatgatccaagaccttagaaggcattctatgtatcaaaaagactagttttcccctaataggacttaaggcatattattttggaatagtagggctttttttaacttctaatcaatgcctattttttctttctgcaacctcattttgttatgggatatttatgcaagaggattaatggataatactttaaaaaaaaaaaataaaataaaatgatagaacctaattaaagtattccctcgcattgtctaacttgacaacttttattaactttaaactagttttcaatcattttgtgaaatacatggaacacattactcacatcattcttatttttcagcaaataaagccaagtaactctagtgcaatcatcaatgaatgataaaaaccatttagaacataaaatatttagaattcttgaaggacctcatacatcagtatgaatcaaagtgaatggatgaaaagattttttattgtttaataaaaacaaggttcgatggtatttagccaactcacaaactttacaatggaatgcactgagatctaacttttcaaataggggggaaacattttttcagcaaaagaaaaggtggatgtcccaatctttggtgacagccaaatctagtccttattagatgaaaattttttagagaggtgggaagaaaagtggtaacctatcacttttttcacaacaagctttaagaaagtaaagtctctcctattctttagcatgcctaatcatcttacctgtagcttgattctaaaacgcacaatgagttgggaaggatgttatatgacattttaaatctttagtgatttgatggaccaataaaaggttaatagataatcttagataatcttggcacatgtattactgattttaatgatagagtggataacaaatttattgtgccctaaccaaccacaatggccaatgcaccatcaacaactttaatcttcctatttccaggacatggactatatgaagacaaccgatgggaagagtttgtcatatggtcaataacacttgaatcaatgacttaagcacttgaaaaatagttttctaaggcactaagagcatgagaatccaaaaatctagttgagtgtgcaaggaagcatgaggcactaggactatcggaaggcttccaagctaatctatctcttctttcttgaatatgccaatctcagagttgtttgatctatttttctataggtgatttcttcagagtgagcaacatgtgcatgtttgcatcattgcctattcttaggttttaccacatactcactggaattattttgcaccacttaccttgaagctttctaactagttgaatacaaaagaatttagggttgtttttcaaatcaggatggtgcttcattgctggtagaaaaacaccagcaatcgtagaacttcttaaacttaaacaattgttaaaaaaaatgcctaaagctcttataccatgtaggcatatgtgtactctcatagattgatatgaggaaaatttgtacatcttataggcatctatataatgaaaaaaggaaacaaaataactcttagaaatttgtcccaaaaatcaggggaattctaattctaacttcagaatttaaatttcaatatacaactattgattttactattaagaggttgaaaagtaaccattatttccctattaaataagggtcataaaggctggttagtcaacatattgtctagtagacacaaaaggggttacaatttgcaaatctcaattttctcctttatgaagtgcttatccacatttacatgcttgattgtgttagaccaaactatgagcaatactaatagtagccttactgtcttaatggatagttgttggtcttttaagttccaatactgatatgagaataaggctagctttaggcattcctaacctaagtcctaagagaaggaatgtgtataggtgcaaaatccatgatcgttatagtaaggtgcttaatgcactcttgacctaggtttaagttggtacctcagagtgggaacaatctctagggtaatacacagttatcaaaatcttattttaggatcttataaagattcttgtatctttttctccaatttgtttaaagagatagggaaactttttgaagcctccatcttgttcaatcttcaaagccaagacttcttatgagattggacccatcataatactttttcggtcttttcctagcattcacataagaaaacatatcactaagacaaggaataggctttttaccaaggactctaccccttacctcatcaaatttggtttgaagccaaccaaaaaatcaaacacttcattgcattccagaatttctgccaaagtcattgcatcttcaagggttgtcattttaaaatgttgaaggagattgagttcttgtaaccaataatgaaaatatcggtaattacggatatatcgatacttcaattttatagatatatcggcggatattttgaaaaaaatattcatagatctaaaattgatcaaaattcatggaaatgtaagaaaaatctcgtagaaatgtaattagaagtataatagacattttaaagttattttgttgaagaatttgatatatgcatgatataatttatcatatttaataataatatcgtatacatcgataaaaaatatgaattttataagggtacatttattattaaattacattaaatattatttcataataatattttgatattcgactataatatatctaatttaaaaatatatttaatttcaaaattatgatctatttaattcaatttaattatatgatataaaataaatgatgatatatgtatagttgtgatatttaataataatgtttataacttgaaaacacattttatgcatattcatctaatttggatgtatttaatgacatagaaaaataatgataatttgtataagtattttttattttaaaattttgataatttttttaaaaaattaatacaaattaaaaaaaaaaatcatttattttatatcattgaatacatttgaattaaaatggatcataattttaatattaaatattttttaaaattagacatgttatcataacattattataaaataatatataaaaagtattaaatatattttaaaattagacatgatatcttaatattattataaaataatataaaatgcaacttaataataaatgtacacttataaatttatatgatattattatcaaatatggcaaattatatatatcatttttttcaaaaaaataactttaaaatgtttatttttactttttataaattttttaaaagtttttcataatatttttagagttttcagtaattttacatcattgatattttatgtcaaaatattcatcgatatttctcaatatatcccgatatatctgtaaaataaagttaccaatatatccatcaaaaccgataatttcatccttggtcatagtaaatcatcacatagtgatcatgctgttttgtattatgaatggtcgtcttcaattcatagatgtgagtagcatttcacttcttcaaataagcccacgacacaacatcgaacaccttcttagccattaagagataaagaaaagatttcccaatctctagttgcatagagctcagtcaccatgacatgaccattgaattttttgcatcctagatcttgaattcaaattttgattcttttctctttgatggttctaagcatatatttcgtctccctttctactattcgggaaagcagcttaaccatggttacattaattgttctactccacatttagtatgcaccttcagctcaagaactttctttttacaccaaaattgatgtaagatgactagtgttttaatcttttaggatttaaggaaaagagtgacaaataaaatcatggtggcaaggaaaaaaaaagttaaaaaataaataggaaagaaaaaaatgatagaaaagaaaaggataggataaagccttcaatcatactaatattttctaggcctcttgccaaaaggaaaaacaatggagtctcgttattgaaaattgcaaagtgtgcaaaaaaaataaatcatattattcatcatttattcacttcattaatctagttttaaagctattagccttattttacaagctttaaaaataccccagaaattcaataggaccattaaaatagaaacctaactaatgtattgacttgttaaactcttatttttttcctaaaactcctaaatcttccaaataatagaattttaaaaaatgttaatttcattcacctcccctaaggttctagctaaatatacatagccctcataggttcaaaatttcatcaaatgtcttccttattttgattgagaagggaggttggtaaaaataacaaatgaaaatgataggggaaatatttaatgaaatttcaaatctataagagcttagccaaagccttagagaagacaaataaaatcaacccttatttttagaattaaaactaaatatgaatatacatactattgtatctcgaataatgaatctatataatcttataagcatttacatacaatagaaagagagacaactaacttgctaaattatctaccctaaaatcaaggtatcaaaattacatagaaaaaatagaaaaaaattatatagattcttaaatttgaaaacatgctaacaatttgccttttactcccgtattctgtaaggactcttaactaatccaccaacactcccctcaagctagtgaatagatattgtccattactagcttatttgtatacttccatattttataagaattcttaactaattcatcaaacactcatttcaagctagtgcatagatattgtttatcaccagcttgttcgtactcatgtcagatgcttgacttagaagtcctttagttagatatctatcaattaggagtagaaatcaagccaccatccaacttctctttgatttagtgtttgtcaacttccatatgctttgtacaatcatgttgaacaggattatgtacaataataatgactaacttttatcatgatacacatatgctttgtacaatcatgttgaacagaattatgtgcaataataatatcttacttgttatcatgatataacttcgtagtttcttctcatttaactttaagataatcaagaataatccttaaccaaagaagctcacatattatttatatcatggccttgaactctgcttctacgtttgatctagtcacaactccttgcttcttacttctctaagtaaccaagtttcctcccatgattgtacaatatcttgatgttaaccttcgatctatcactaaccttgcccagaccttgcccaatctccttcaatgtatgcttccaaaatcgattacatacttttttaaacaaaataccctttccaagagtgaatttcaagtgtcaatgaattgtgtagattgcttaaagaggattgaactctttagattgattcaagaggactttctcttcatgaatgcataaactaatttatgacttatgaggacttcctctttgtgaaagcataaactaatttatgacgcttatgatataagccatatatctagtctagtgtgggataagttcattagctttccaactaacctttgattcatgccttggtttacaccttaacatcaccaagtttgtaattttgttcaagaaaactataaacctacttatatcctagcatcctgatttcccttagcaattaaaaatttcatttttgttgtgatacaaaagtattattctttgaataagccacctctatggctaagaaatacttcagtttcccaaggtcttttatttcaaactctataattaggtattttttaagtcattctacttccttcaaataatctctaataataattatattatccacatagacaattaaggtagtaacacttccaataattaagttcttaattaagaaagtgtgatctcccttactctttctatacttcatcactaccattgccttactgaatccacatcgaagcatgctctaagagattgctttaagtctatacaaagcctttttttagcctacacacacaagtgtccctaaaattttgtaacttccatatggactttcaattccaattgaccatgtaaaaacacattcttaacactaaattgttgcgatgaccaactaagatttgtagtgtcctatttccattgtatttcatggtgaatacccatttacacctaactaacctttttcccttaggaagttatacaatttcccatatttgactcttctcaagtgctctcatttcctcattcataacttttctccaattcgcacttctaagtgtcttagactgttttcaaatttttaaatttgacaaaggaaggctttgcgtgaagatgataatttattaaatgagacaaaattggaaatagggtgttgagtgcactttcaagttccttttctcatggcaataggttcattatgaaaatcaacatcattttccaacctattttcaatatatggagaagaaagcaattcaaaaaaagaaaacaattcgatacccctatcatgggatcaaattcttagacttgctttagttcatgttgtggttatcttcttcttaaatattgcttgtagtggctcgaaactagggttactaggtctctcgcagtaagtaggacaaagtgagacacaaatagctcaagatcaaaaaaagacttatcttctactaaaggctccccctacagataaatcttgggataaagcgaatgatttttccacaagggtgacatccatggttgtgaaaaactttttggaagatgggtgataacatttataacctttttttgttggaaaatgtcccacaaaaacacacttaagggctttaaggtcaagttttctacgattttgaacatggatatgaacataggagacacaaccaagcacttgggagagaattaaaggctttgcataaaggtgaaagtttatcttaggaaataaaattgtatatggaatgttaggtacactttccatcctctttctaagggctatgggcaagtataggtcatcaaagggactagattcaagtgaagtatgggaaacgactctccacaaacttgttgattacacataattattttgagaactatcaattattgaagtcaaattaggaatagctaattaggtgatagtagaattagaattacagtcataatagcttattggaatcctaatagactttggattccttaaagaaacctataaataaagctaattaatgtaaaccaaagtaatggattgatgattaataatatcatattttcttgcatactttacaatagactctaaagtttctatctcttattctttgtatcatcttactctaccataaactttttcctttgttcctctccttaaaccataaaaaataaaaaccctagtccacctatttgattgtaggcaacaatcctagagttatcctacattaccattaatgcgggttcattcatgaaaattagggagaagacatttgaattattagacaagtttgtggagcatattcaaaagaagaatgttgtctaagtaatatacctaataatggatctaactatgtattaacaggtaggatttcattctactaggttctttaagtttcatttgtgtcatttaaattggaatagtatattataacttattatttatcatttattatgttttttatgttaaaattttaaataaaaaagtttagagaaaaagtgaccacatttgtatgacacaaatgataaataatacataaaaaaatttgatgcacaattttcttctaaatgtctagacaaatgtatgatcgcattggacgccttgtacagcttattgcataacattttaaaacataggaaacttcttacaattaagaggaccttgacaagagccatttcgttgaatgggttcatctataatcatgtcggtgtgctaaatatgatgagacagttcaccaagcaagagaattggttagaagctagggataacttgatttacaacatgttttcttaccctacaaagtatccacatgcaaaatgcaatttgagattgatgttcatctttgaaaagtagttagatagtaaatgggtgaaaaaagcaaagggaaaacacatgttagaaattgttttgatactttcattttgtctaaaggtgatgggttcttgttaaagttctttgacttgttgacaataaaggaaaatatggggtatatatatgaagctatggatagatgtaaagagactattagaaattcattaacgagaatgaagataagtacaagaaaattttctctatcattaacaaaagattgtaatgtcaattccacaatcctttgcatgccgcgcgggtcactttttaaacatttttctatgacaacccttgtatagagtttgatgaagaagtgacatcaggattatattcttgcatagatagattagtttctaacattgatgtgcaagataagatcatttacgaattgtcaacttataagaatgtagagggtacttttgacattccaatagtcattatgtcaaggaagatgctagctccaagtactttaagagagtttatattcctaaataaaacattagattacttcttttttcagctattaaatcgaatatttcttgctaatttacttcttttttttgtttaaatttgaaacattgagctgaacattggatactatatggaaacataaccccaaatttgcaaaagctaaccaaaacttgacttatagtgcatcaagttgtgaaagcaactggagtttatttgagcacataaatatttagtaccttgttgattttttaatgtataaaattaaaaactttattagttaatttgttatataggttgcagtaaacatttatttgataaatgtttatagattccaaccaagaagaagcaacaactaaatgacttggtgtttgtaaaatacaaccaagcacattatgatagatacaatgtcattaaccccatcttgttggtagatatggatgaaagtaatgagtgattggtgggagaaaagggtgaaaacgacacctctataaatgtggagaataacttggtttttgaggacgatgacttgacatggggtgtagtggtaagtacagcagttgttggaaatgtgcagacttgcactagacttcaagcaagatcaatgacgagtttaaagggagttttagtagatactacttcataacctgatcttgaagagaaaaagagcaattttggggacattgaagagggtgataataagattggggaccaccaatctaatctagataaaagttatggcaattctaatttcaatgatcattatagtgatgatacctaaagcttctttaggatgttcattctcttattttgtttcttatttagatttttagatgtttaaaaaattagaatatacatttgtacatgatgaatttctctaaacaatataatttttcttatgtttaaggtttacataattattactattttattcattttataaggcatcataatggatgaaaatttaattgtattgattgttgaaaactacatttatattggttagatataaaataggtatatatatatatatatatatatatatatgtatcactttatcaccttattatataggctaccgtcttattttcaccatttgcccgaggataaaaggagtccgatcagcttgacatagtcttttgcttttgaaaacactataccaaacaattcatatcttttatgcttttgtgtagggacaagaagttgacaattaatttagacatgtgaaatagatttagtgacatacatgtggctataggtatagttcctttggccagcaatagcagctaacaatccatcaacaactagctaacattccatcaacaactttgattttctagttctagagacaatgaccgtaaatagtgaaaaaacaaggtgaatttctcatatcttttttgtggcacttgagagagtgacccaaggactagtaaaatcctttgaagcaccaagggcaaaagaatactttcttgattgtgctaaatagcaagatgcaccaccttttcctagtttagcaatgaaattcttaagcttatctatctcctctctattcaatccttttatctcttgattggtgaatgtagacatgtattgacacttgttctccgaattgaagtagacttgaccacctttttctccaagcttgccacctcttccatctcctcttctaaaatatgatggttttcaatggaattgtgcaaagtctcctatgtatacttcagtttattacaataattgcaccgaagttcatcgttaaactcgatttccactcctatgaccaacaagaatggctctgccattattcaacttacaagttacaagagttgaacttccttaggaattattttccaacataacattcctttgactttcttcttcttttgcaattgagaaaacttctccaaatgatggcaaaggactcttctccaaaaacctgaattttcacttgaccaaattctatgctaagtctagccaaaaatttaaatatccattttgggatttatagtcatgtgacttaagccaaaggttcttcatagagttatagtacccaatcactgatgaggtaccttgctttgtggaattaatcttcccctttatctaaaaatctaggcaacaacttaaagcttggagtacgtttgatgagcagcatctcaaattcctctaatagcagcgagaaatatgtgagtcctacttatctcctgttgcatgaagttcccaatcatcgagtcttctacatcctaatgaatttgggatcatctttgcttggttctagtccaaggagatggctcagcttcatctccgcctcaagatagttgtttgtcatttaatttaaaggcagcttgaaggttctgaatttgggatcatctttgcttggttctagtccaaggagatggctcagcttcgtctccgcctcaagatagttgtttgccatttaatttaaaggcagcttgaaggttctgttagtcgcctaatgaggagtttggtgttgtgattacagtttggtaaacaacaaggagttgaccatggtttcagacagagcttcagtagaaacttacttttatgggtttttctctattaggcgatgaaggcaaaactcttttaagtttttctcgacaccgaaggctggaaattttttttttcatagaattatagttgtggctttgataccattaaaaaaaaatctcttattcataatctgtggaattacaacactatatacaacttgaaaaaggaaagaaaatgatatacaattcggaaaagtaactaagatcaagcaaccctagaaaatcaagaagaaaataaaggattaactaccagaggaaagcaaataaatattctacaaataatatacatagaaattctcacatatttgtgagattttgtcaactttccccatagaatacattccatgattactagaagatatccaccagattcttcaacaacgtgcatatattttcttattatcagtgcatgatatgttatgtttggaatttcaatacatggttgcatgctccaccatcattagctgattgcatcgtgagaatgaacaaatacaatatctgatgtacttttattttttatgcctacctctagaagattactaatttgcataacctgaactcacagcttatatggtagaattttattgtgcttctgactcaatagtgatttatacagaatcaacta

SEQ ID NO: 10994 - DNA, 1937 bp, Vitis vinifera
  Intron number 4 from transcript GSVIVT01023264001 (locus G SVIVG01023264001) derived from phytozome v7.0 (chr-ID chr1 2; pos 20437161 to 20439097 reverse strand)
tgattcctggcctaacaagtgattcggcttctgctgtaagtttccttttttgtttgtcttttttccactccttttatgtttccattgtaattagttgtccaatttcatcgcggactaccactggtgtctctaggagtattaaagttcactaaagatcatgtgaaaactttaactgatcacgcaaagaactaaaggtgatatgggataagcactcaaaaagcacaattgaagttcatccacattgaactttacagaacttaaaaactagatgaaataattttcttttcctagctagacagccacagaatcttggtctcatttgggctaactagataaacaattcttcttcaccattcagctcaatctaggaccatggccttcattaaattaaaaattatcatgtctttctgactacctttgaggacattttgactcaatcaacttcttttttattttatttttcccttaccttctatgattaatgttgacattatattgtaatttgtagatatttctctagtttcattatgaaataaatctactgccgttaggaatattcagttgaataatagtatatcaggccttgagatgagttcaagtggttacacaaagacctaaaggtgttagggataagctttacatcttgattggaagctgtagaaccttgattgattgatcacttaaagacagttaaatgcaatccacattgacaagaaaaaactcaaaactaaaggaaataaggttttgtagcttttgttattcaacaacaatgataaacaatgaagtttcaaagctcaattatttttgggtcgattagttgaatccttgtagcaataagctccatccaggtccatgtacttcatattggctattatgtatttccaacctaaagaacaaaaaatcactcctctgtacacggacaggggacaaaagattgctaatattagtagaatattgccaagattgttggatatcaagggttgccaataaagtagtagggtgccttctttgcttctctctctctttctctcttcttgttcttttccttcttcttttatttttttttcttttaaaatatataggagatatcttgaaatttcagtgagatatctatgttgcaatttctccaaaattagttccttcatggccatttctagggagggattggggaatcgccgtcatttctgttaaaaatcttggagaagttgattatggttaacccttatagataagttgaaattatcaaaccttccacacaatctaggttgttggaatttttggcttcttgcaattttattattttttaacatgtacttaaaaaaaaaaaaaaaaaatccccttcccatatcaattcttcttgaagtcatggatcccatggcttccaagtaggccatttcttctctaagcaattaagaaatacaccctttaattttcttagtaaatattcaaatttatatggaatgtgcaagtaattttatcccttccagatttcaaactatttttacatgattgcctttggtaagatttgtttcacttttttcttttttattatgttgtctggactaatatgtgggggtaaggcttactaattctggttctgatccaaattaaatgatacatggatgtaaattctaaaaaatgcattcattttaatgaaaatgacttaacaatttgttgtttctgatcaaaagtcagtgaacaattgttgcatgttctctccttcattttctgctcatcaaagactcttttttgttgttcttcatgaggcatttcttcaatctggcatgttggagctagttgaattccttttttatagtcatcgttttattaaaggtttatctaggactgccagttatttgtgctgctagattctcttttccttttcttttttaacagtgtggtttgtgccatagtatataaagcatcttgcattcaag

SEQ ID NO: 10995 - DNA, 6786 bp, Vitis vinifera
  Intron number 5 from transcript GSVIVT01021569001 (locus G SVIVG01021569001) derived from phytozome v7.0 (chr-ID chr1 0; pos 7181667 to 7188452)
tttcttgagattgccacagcgaatccacatccgccgtcgcaaacatccttccatgaatcctcggtgagagtcgaagccggcagcgcaaccagtaccggagaaagcaacagcgagccttacggcgaagctccgggaagatagccccacatatacactacagattcctccatcttcaaagctccacccatcgtcccagaaacatcaccacctccatagaaggtggcgtgagcattaatccaaccaccataatacccattcatagtagagaccattaagtgaacgcccaccaagagagatccgagaagagccattttccttgttgaggggagcttatgaggaaacggagagggggtttcgacgggaataaatatatatcagtcagcatcatagatggctgatcacctaacgtctttgaagctgttgggatgaatcaattatattggcctgaactgggaggttggtggcgcgtgcactattgctctctaaactgaaacacgttcttgactatgctgcctcaaagaggcaatctcttgctctgactcgttcctcatcttagccctgtactggtataagctctaaaactgatacacaaaaacgtcaactacgtctcggaacctctggctcagcagctgcatgttgacgactccctataacaccaccatctgaagccttggaacctatctcggcaaacccaacctcgactacactggaccgccggccttcacctgaggcgtctccgcaaactagtaagaaatcagatgtcggaactacccgggaagaatcgttgatgagagaggggtgatcacaatcatcttctgccatgtcaaaagcttatcttgcaacatatacactcggaaatggtcaccactatcagttactcgacgtgaggctgctaagtgtttgggacaccggggtggaaaataaacttgtaggcaagctgcaggtgtatgaagagagggtgaggaagatggatgtaaggatgaagcaacatgcatgaagggagtgcggcataggggaacaaatgggtgatgataaagcggttagatgggtaggcttgacggatgagcttcagggatatacaaggtggaaaaaatgaaggcggcagctgtgagatgtaagaaacaggtatgaataggcttagagagagaaatgggtttatgtgcagggtgaaatgggtatgaggatgtaatgagagagacggatatggagatgaacgtggagggtggaatgataaaggatgtgtttaatgggtattttgaaaaccaaaagtgaaggcatgtaggcaggtgtgatggagccatggtatatatgaagagaagagattgagggtggtggccaaatacgagaaggaaagtagctgcatgctcctgggtaagcataggtacaagcagactgcaagtgttgtgtttgagaaattttgagcgaactgattcaaactctttaaaaccccgttctgactctccaaccatcgggaccttcagattgcaccggatgctctaagatggaagagaactgatccatccatggtttaagcattgacatcatcaaatcacgagtttctgtcttatatacaccagtcatcacgcccaacatggaagtgcaagcataaactgttaaaggtgcttttatgcgtgaagatttgtcataaatctgaggagatgaaacaattgcatgtaggcatgggaacaaaacaggcactaattttgacaccattgtgtcaacccaaatccccagaaggaatgtgccaagcatattagagccccatgcatccggacgttctccaattgaatcttcttctcaagttgtctgcaattcttcatgtctcgggtttttcttccctctctgacaaagcctattctccaaaacctttctcagctcaagcgagttttctctctggatgtcttcagcttgtttacttcttcggtcaaaacaaactctgtaaaatatctcttaaaacccaatacgctcctttcaaccctactagatctctgtgagagtgttcagcctgacttggatataccttctcacagccgttgtattgagcaagatccagaaacgaataggagccataacaaagcagaatccacagaaaacagaacacaagagaaaacgagtaaaagtgatcatcagaagcttcacttcatgagttatccgtggatcctctgattaggtgaaaagaatgaaaaaaagaaaaagatatcgaatgcagatattgacatgattcttgggcgtttcacaacggtgacaagacaagctcagattaataataccaaacatgaatgcagggttatatctcaacaagcaacaagtggccttcattatccactccaaacaaaccaaccaatattcaatcatcaacaagatacatagaggagtgataaacagccaaaaaaaccatcaataagcctgtagtaatcatacctgaggaagtttttctccagcaaaaaccaacaggactccaagttttactccagaaaaccagtctgctacctccagaaaagcaaagatatctcctcctattctcaccagcaagttcctcaggttttctccttattctctctgaatccccttattctcaccagcaagctcccccaaagaatactctcccgctcctttctcaaaagtagccaagcctcctcactctgcaaccagtaacctctcacagaaagaatactctcaagctcctctcacctcctccaaaaaatctcctaacctcctctgttttttcctccttccgcgccctcctccagtcactccaatatccctctgctcatatctcctttttctctaccggatttgcccctccaacaacatctgcagaaacagccaccccaaaagcaccactactctgcagcctcctctctttctctctcatccgcgccccctaacggcctgcagcaaccttctagaatgctcctccatgtgtcaccctcgtcgtctcctaaaaaacaaggctgattcacttatggccaaggatgtgacacgtggctcactgggataatgacacctgactaaaaaaaaagtgattgacagaaacaacaagaaaaagtgacccatgccgggtcaatacatgtatatttatgtttttcattataaatatttatattttttcacatttctcaatttaatattaaaacattaatttgtttcaaggtttgtttataaagattcaaattcatttttcaaatttcatttacattatcactatcttcatttgcatatggtaaaatagagcttttataagaagtaaaaacaaatttgataaaaaaaattaactggaattaatcttggtctggatttaagttgagatgttagacaatccaaacctaacttaagtatttaatagttttaatattttacatataaaataaataattaaattttatgttatattatttaattagtgatgtttaaattttaattaatacttatataattagttttatttatgtttaaatctaattaacaatacaatttgtataatattaattaattaaatttaattgaagtcttattcaaaatgaaaataatttgtaattataaataaattaaaaaataaatagttttttataaaacataaatagtaatattataataaaatcataaattatatttttagtaaaaaatatacttgtggaccacgcatttcggctcatgcgttttccactagatggccagctcgattttaatttgaaaaatgatttttattaattaagaaaatgacttggagtcgtcacttatttttgttttatttttaaaagggcaaacaaaataagaaagaaaaccctaagtgcgactccttattttggaaaaggtgatctacgaaaaactagatcgggctcggggtcaggttacttatcgggaaggtacggtaaagaccataacacccctctaagtccctaaagtcgggtctctactaataaaatgaagctgacgtgacaattgacgagtaaatcaatgaataccctgaatgatcatgcacacataaaaatcgagacatgcatagacaacgattagagggaaaatggatacatacctgggcaacaagtcaccatgcgctatcaatagagagggttagtgcacaatttaggaataatcgcatgcatgtcagagagtagggtaaatcaatcatgtatgataatcaaagcaaacaatcaatcactcaatcataaagtcgcccatgtaaggcctccaccacaacccgtttattttgcatgaattaatatcacagattttattattccggaattatgaaaaattcattcatgcttattggaatcaagaggaatagaagattgttcgaaagatggaattaaaaccattggagaggaaatcggatttttgaaattcatttgaaaaattggagtctcgaaggttacttaaaagttggagttttacagtttatttgaagatcagactttcagaaattaaatgcgagaatgagaatttttggaaattaaatttgaacgagattggaaactggaaaatgatttgagagttcgggatttttaaatgagaggataagtggatgagtgaataagtaaagggatggaataataaagatggtgaaataataaagattaggtaaataattgcgaaaaatggaattttagagatttgttgatgtgaacttagagtttgagaacttgagaatttatttagagatgagatcttttggtatatgaataactgaataagtaagtggatggggataacattaataacgagaataatcatcgaacggcgatatttggacggtggagcttttgaggttgaaaattagatttggaagtcgggttctaatgaattaaactttaacgattaaattaaatagataatatggaataataatgctacttaacggaaacaatattttaaacgaatataaagtgagtagtgggatttttaagataaaaaattaaattaggacattgaattttttaagagttggaccttaaataaataaatagataggggataaaaattctaattactgaaaataacatttaggcaaacaatggaatttctgaaagttaaattaggacatggggttttcgaaagattggactttaaacagatatgggataatgattctaattgatgaggataaaatttaaacgaattgtagaatttttaggattgaaaaattaaattaaaacatgagatttttgaagaattagattttaaataaatagatgaatatgggataataattctaattgatgaaagtaagatttaaacgaattactgaaaaattaaattaagacaggggatctttgaaggattagactttgaataaataaataaatatgaaataataattctaattgatgaaaataagatttaaacaaatatttaaagaattaaattaaaacatgagatttttgaaggattagactagatagatagatgaatataggataataattctaattgatgaacataagatttaaacgaatatttgaagaattaaattaagacatgagatttttttgatggattagactttgaataactaataaatatggaataatgatgttaattaacggaaacaatatttacgcgagtaaaaatgaatagtggaatttttgaaattgaaaatgaaattaggacgttggatttttgaagaattggactttaatgatcgaaataaataaataaatatgggataataatgttaattaatggaaataatatttaaacgataaaaaatgaatagtggaatttttgagattgtaaattaaattagaacgccggattcttgaagaattggactttaaaagaatgagatttttaaaaaatgataaataaatatatacgaaataataataataattaacaaacataacatttaaacgagtgaaattgaatagtggaatttttgagattgtaaattaaattagaacaccggattttttaaaaattggagtttaaaagaatgagatttttaaaaaatgataaataaatatatacgaaataataataataataattaacaaacataatatttaaatgagtgaaatcaaatagtggaatttttgagattgtaaattaaattaggacgttggatttagagtttaaaagaaaactctacggtgaaaagaatcgtgaacttgaattatttagatgccgaattttccataatcaatttttaaaatttgtgggcttggaagatgggccaagaagggtggccatgcaaactagaccgggcctaaggcagcatatcaaaacgaaaaggccgccattaatgtaagatccgcgacttgtccgcatcagttttccttcatttggagtggcccatggctgaaggcccattgcctgcccgagaagctcaacgtggcccacgctacctcaatattcaaacattcaaatgatgcactcccctctgcaagcccagtacaatgtctagaaactcaagctcaaatattcagattttttttaaaaaaaacccatctaacacaccctacagtccatgctcgcatgcccattcctacctcaaacttcccacttcctaatccctttgagccttccctaaagcccactgaacatggctctcaccctttgagtcttcccctccctcacaaccaccgttcagtgactctccacaatgtcaccctcctcaaaaagcgcgcatgccgacttcgcactcgccgacttcttcatcttcttcgatagcctcgccggaggttcaccggacgtcggctcctgattctacttggtcctctcaaagggccgcccctgaatctgaccgtaaatctcatctaaggttttcaggctttccccttc

SEQ ID NO: 10996 - DNA, 12418 bp, Vitis vinifera
  Intron number 7 from transcript GSVIVT01010189001 (locus G SVIVG01010189001) derived from phytozome v7.0 (chr-ID chr1 ; pos 17041887 to 17054304)
ctgagaaaggtcattgaagtaagtcagaccagtctcgtagtccctataaaattgttaaatgtgcaaccatggtggcatttgttgagatctatggaaaaacatgtgtactgtaagttgataatcctgtttctggatatgaaggttgagtcactatttattcttttggttgagatatacaaactggttttatatgaattgtttgttgaaaagatctgcatctcaatatatttatgggttacatgactagtagacatactagaactttttttctagctgtatgtagatttgtttatttgactgattatctcattcacctttgtttgctatgcttaaattctgttgattaagataccggtgcatgattagatattttcaacttccaaaaatttgaacagatggctgtgaataattgtctattgatgtcctttctaagtgattctgattgctttataacttaccataaattatgctacggatttaaaaggtccggcatcaagtttactagagtgttcatggatttgtcatgcagaagtttggtattagagcttcagggtttgccatgatgttttcacaatgtgataggtcctatgccttataattaatggatagacacagattattttcttctcctggtcatagcagagatggatgatttaattgattgagatacttgacatagtacagcctcaatctcaactacttggggttgattaaaagagttgttttttctattcagctagtctaagtcacgtcctctgttagattcctggcaatcagaccatttctcccttactctatccatgtcttctattggggccaatccctttctttaggtgccttctacttaaatttgatggtaaaaagaacacccttattagttgcttttcagaattcttattcataagtgaccaatgttttaaaaaccagaccggtccaaccgtctccgggttgcacattgagctagggatgccatcaaaccaccgttgaactagtcagttcggaaatcaacctgctaacttgacaaactaggccgccggttcgggcttggatccctttttaccttattgggccaaaatgggcttaggcattgttgtggggctgggctattagaagggccatttgatgttgcttataagaggggttgatgagcaatataaagccattttattttcctatctccttttgatgtgggattggtgggagggaggaatgagaaattttttttgaaacataacaccttgaagttttgaattgaagacctctagtttaaggggcatggatagcaccactgtactacttgagtttttttgcacatattcacacaacaacaaattatgtaacaataatgttttcaaaatttttataataataaagttgtaaataatataaataaaatgtgtagagcaacgcctttgtgtcttttctggatcatttggaaagagagaaatagaagatcttttgagaatatggagctttctattcaaagactgaagtttttgtttttgtgcagcttattatcttggacaaacttgtttatataacatacctctatgtccttagttgattttattgattggttggggttggattgagggaaggagtatttttgttttccctatactttttggtgctatttgacgatcgttgtatacactgtgtgtactttggtacaccccttttggcatttttatataatttacacttacctatcaaaaagaaaaaataaataaaataatgtaataattttaataactgtaaataataagatatataactcttaagatatatatatatatgggcggcctactgtgaaggtagagagagaagattttttgagtgagttgggggccattagaggtttgtggaatgagccgtggtgtgtagcaagagacttcaataggataagattcccttctgagcggagtagaggaggtcgtatgtccccgacaatgaggagattcttagaggtggttgaggagttaaaactaagggacttgcctctttagggagggctgttcacatggagtggatgtcttaatattcggttaaagtcgagaattgatcggttcctcatttctgaggattgggaagctcattttcagggggccattcaagttgtattggctaggtcgatttctgatcactctccgattcttcttgatggggaagggatgaggagagggcccacgccctttagatttgagaatatgtggctaaaggaggagggctttaaagaggtgttgagaaagtggtgggaggggattcaagttagttggtcaaccatcttcattttgactgaaaaattgaaggctttaaaaccgattgagaatttggaataaagaggtttttggtcagattgattctaagaagcagaatgcgtggaatttaatggattattgggataaggaagagagggttcactctttgtcgttggaagaagaagaggctaggaaggaagcaagagggatgaataagaagtgggttcttttagaagaagtgtcatggaggcagaagtctagggaaatttggctgaaggagggggatagaaacccaaggttttttcatcagatggctaatgctcatagaagaaggaattagctgtttagagtaaaagtgaatgggaggtggttaactgaggaaagtgaaatcaaagaggaggtgagcagagctttccaaggtctgttggcagatcctggtgattggaagcccggtatagatgggttgatttttgagaggctggaagagttggatgtggaggggctggagaagcctttctcggaggagaaagtttttggtgcgctgttaggcttttgcggagagaaagcgccaggccctgacggtttctcaatgacatttttgtagttttcttgggattttgtaaaggaggaggtaatgaattttttcagatagttccatgagactgggagttttgttagaagtttgaatgcaacctttttagtgttgatttctaagaaagggggggttgaggacttgaaggattttagtccaattagcttggtgagagggctgtacaagtggttggctaaggtgttggctaatagaatgaaaggagtgttagctaaggtgatctcaatgtctcaaaatgcttttgtggaggggcgacagattatggatgcagtgttgattgctaatgaggaaatagattccattttgaaaagcaatagaggggcaattcttcgcaaattagacattgagaaagcctatgatcacgtggactggtagttttttttagcgatgttggagaagatggggtttggggaaaggtggtgtagatggataaagtggtgtttatccaccgttagattttcagtcttggtgaatggaagccctgctggttttttccagagctcaaggggcttaaggtaaggagaccccctctcgccttacttattcgtagtcgtgatggaggcttttagttgtttgctgaaaagagcagttgctggaggttatttgacgccttgttcggttcagggaagaaggggtccaaatctctcatttattgtttgctgatcacacgttgattttctgtgaggcaaaagaggagcagttgacatatttgtattggctgttaatgtggtttgaggcaatgtcaaggttaagagtgaatttggaaaaagtgaactgattccagttggtagagttgagaatgtggaagagttggctgatgagttcagttataaggtgggaaatttgccctccacctactcaggaatgcctttgggtgctttttttaaatctgccgttgcttgggatggaatagaagaaagattccgaaagagattggttatgtcgaagcggtagtacatctcaaaaggggggaggattaccttaattcgaagtaccttgtccaatttaccaatctattttatgtctattttccagctacctagggtggtcaagatgagattggaacatattcaaagggattttttgtgggatggtggggctcttgagcaaaaaccgcacttagtaaggtggccgattgtatgtgtagacaaaagtaaaggagggttggggattaagagtcttggatctttcaatagggctctccttggcaagtgggtttggcgctttgcaaacgaaagaaaggccctttggaaccaagtgattagaaggaaatacggggaggaaagaggagggagatcttgtgaggctagggaggcctatggagttgggttgtggaaagctataagtaagatgagacaactagtaacccctttttttggctattggtgggggatggtaagaatgtgagtttttggaaagataagtggtgtggaaccgcccctttatgctaggttttcccttcattatttgctttagcaacgtctaaagaggcttggataaatgatgtttggacagccgagggggaaagaaggagaagttggactccttgttttaatagaccttttaatgattgggagatggaagaagtgggaaggttgctttgttgcttggatgggaagatggttagggtggatgaggaggatagggtggatggactcaaaggatgaggttttttcggtaaaatctttgtatagggctttgcagccggtctcttgcttcattctcttcaaagattatttggaattcttgtgtgcagcctaagtttagcttcattgcgtgggaggcttcgtggggaagagttctaaccttggaccgtttgcaaaagaggggttgggctttggaaaataggtgctttttgtgtcaaacgtgtggggagtcgattgactacctcctccttcattgtgaaaaaacaagggaagtgtggatgatgctcctttctttgtttggagtttcttgggtctttccttattcggtaaaggaaacccttttaggatggaggggcctttttgtgggcaagaagaggaaggtggcgtggcaaccgggaccgttatgcttgctttgggtcatttggaaggctaggaatacaattgcttttgaggacggcgtgctgtccattcaaaagctgaaagcttcttttgtatatttactttggtcggaaaccaaattgtgtataaaagatggtccttcgaccttaatagattttatagattaggtgtgtttgtgataagggagaaggtttttttgtactttccttgttgtttgggtccttttgtaagggggtgagtttatctatactgtatttctgtgggtcgctactttagcgcctctttgctatacaattttctgcttattgatcaaatatatatatatatatataggtaaattaaataattttcaataaatatcttcacatttaaatattatatacattttatttaacacaattttaaaatattaatacatttatatatatatatatatatatatatatatatatatatatatatatatattaacttgataatattaaagatgaaaaaaataaaaattattaatttttaatgttttatatatttaaatttttttacaaataattttaattttaataatatataaaatacatatttatgatgtcaccggttcgaccgtggtttgactattggtttgaccaatgaaccgtgaactagtaacttttccggttcaatgaccggactggttttaaaaacattggctgtgactatatcattattattgcctataaaaaggaagtcaaatgaatttattgatatggaggattcatgacttatttgcggaatttgggtgctctttctcgtggagtccatgactgaaaccagtcaacactggcttttggctaaacatttgctagcttagaggtttttgtgagggactttacacctccttagttttttccctctttgatcggtgtgtttatctttgaggcccattgtggatgctttttttgttttccattattttatcccttgctacttttttgttgccccagttggtgcttgttggaggttcagttctctttgagatcagattttgtattttcctgaagaatatatatatatatatatatatatattgtccttctttgtacattttatttttcatttaatgataaaataaataaattcataaacaaggtaaatttgtattaagcctaaacgtccatattcgaagctacgtttcagaattttgaaactccaggtcatatatttaccaactggtgttagaatgtttgcaaatttggaggccaagcaagggtaaatatagattgaaattggaattatgaaaagtggtttaaattgttagtttcaaagtgaaagcccaaaggttatgtcatgtgctatgtatgttttagtgataggctacttacattatttttgtaagagaactcaacctggaatttatccatccccaccaactcttgtcacttaagccaggcccaagttttattttcatatttataaaatggcataattcaaactttgtagtagttaaaggctacatggaaagttagctattttatcttctatttttcgttagtctttgggttttctatctttgattatcttattcatttggttatggctgatggtgtgcttagttgggcttattttgtgggccacttaattagtttgcattgtttgagtttcacaagactgccatatttacttgtttcccacttgttccaattactggtagcctatgagtgatttaatggaaaaattgtgaagtaaggatagagcttatctgtctttttttatagataaaaagtaaattagattaatatgttaaaagggggtcaatccaattacatgtggagaccacccaaacgggataggggaaaaaacagtgtagtaaaaagcttcaaaacagtaatcagccttccctgaagaattcaatgaagagaaaaccattcaggaggacattgttaaatttcaaatcagagatctccacattaaaaaaggttaggatttctctcctagatgcaccaaaaaagcacaataggaatgttctaaaaaacttcttttcttccccatcaggctacctctccactgatagcaagctctttaaaaacaaggctgaacccaataaattccaggcattaacaccaaagcctagatatgatcacaatggaggagaatgttacttgatgactcctcatcccacttgtatagacaacagcaattcatgagaaaaaatgtatttgactcaattagtcaaaggtgaggatttttttcttttttgtatagaaacaaccaccttcatttatcttaaaaagataagtacaggaaggacgaacaatccttcaaggatttacaaaaaaggttataaagtaaccaagtgctggatcttcaaggatgtactaaaacaactcacccttatttctcttcgaaggtaaggattttctgaggctgctttccatgtataaatagaaggtaaaaatctgagatgttggacaagaaccctaagcaacaagagctggaaacccaaggactatcttggaaaaagcaccatagagaaagaagaccctgaaaaattaccattcttggacattttccagtaggtgcatcttcctcagtcactcttatcagtgcactggtgaatactaatgaaagctcccacctattccaaattctaattgtgggaactccaaaaaaacaaaaaaacattgagttccagtggccttgaccttgcacctcattccaataatcagcaactcatgcatccctgtgtttctctctttttggttatttactcttctcctttaatcaagttgtcaaccttcttccaaggccaagtgctggtacttggtacatatactttcacctatagcctatatttcacctatagcctatatttcacaaccttgttgccaatccaatacatccctttgggagctaatgcttggagacctgaagtttcaagatcatattttagaaatagttaaaggtgtgtttgaatgttaaggcacttgtggtcagtgtatcttatcagattggggtaattcaaaaagacttcttcaacctggtataaatcaattggtcagatgagacattctgttgtttaaaaagagaaggtgatttaggcctttggtgatgtaatccaggggaacattgtgttgattggtaccgacctgggagatttcctaaagagtgcagttcaacatgatctgatattacaaaaagtaaatttgacgttctaaactatgattgggacatgggctttgctaatagagtcaaacttctaaattgattgggatagctaagattcctaattaagtcaaggcattggcttggttagtgggaaagttccaatttgcatatgctgcatatctagaagaaactatgatcatgtacaagttcagctaaacacatgaaccatccatattgatgtgattgctatgttaaaagttcctacttaagttaagcatcattcttgtaaaagaaaaggggaaaaaaaaatattaaaatgaagaactaatatgtcaaataaaattttcattctttagtcgttatcatatctcaaggttgacattcagatcattcaataactttgtttcatttgtataatgcctctttgatattcattgggttattggaataacagttatgcttaatcatcactcttcaaatggattccatcaaataactattgtacagtgcttgcatgttgggtcatctttctttcttttttcctatctattttaatcctaaaagtagctcttaaacaatgatataataattttttaaagaaaaataattcaaatttgttttttaaaaggtattaaagaaatgccaaatatgcatatattgcatgtattaccatacatcatgtaaactgtgtattgtaacatatgattaagatatatgtgtccgagacatgtattgtttcacctaaaagtgttttgtatcatatgtgtcagtaggaatgtaggatattgcaactatagatatatccttgttacatattaagaaataaaatgactagctaaatcctataaataaataaatattatagtggttgataaatttataaattagagcactttatattaaatatactaacagaacatattttaaagcaattatgaaaatattgatggtttgattttacggaaatattgatgaaaatgtcaatattgatggaaatttgtgaaaaataaaaaaaacgaaaattgatgaaaaaacatgaaaaatttgataaataataaaacaatcaataatgcacttattaaacctttttttttaaagaataaaatatttgtatgataaaattagttacattggtcaataatagagcatgcacttataataaatctgattttgcaagtaaatattgaacattcatgtggagattttaaaaaaagtgattctattgaatttgaatatttaaaaatacattacattatatttaatactggaatgatgatatatgcagtttgaaagtacttgaggcatgtgctttattgtttttttcttttattattatttttttttatatggtaatttttaaaaatgcttgtaattttgtttacaagttaaggcctcatttgaacttaattcttgtacaaaaaatataaaaaagatctattgaagatattattgtagtgatttttatgtctaccatgctaaactggatgaaactggaccacatttagatagagaaaattaagatttgtttatttgtttttttcttgtggtctaaaaatttttacctttaaaatgaaaagtaaaatttgattttctacatgtatctaaatttagcagtaaaatgatataaaatttgatcataaaactgagtcagaatgatttgcatagataaatgaaaaatggggttttcattcagttgtttgatttttgaaattagaaagttattatagggggggaaaatatgatggatgtatttaagcgaggaaatctaaaattagtaaaagcttcagcataagggtaaacctactttccctatctaaggcagacttggcttcaagtacacatgacgcagttttgtttcaacattttatggctacttttggctgattttcttctatgtaataaaaaaaaaaaagcaaaatattatgagatacattgtgatattccatgagtaataacccttatatttttgcaatattttgctgattttagttgatcaaatgatgatttattattaccccatacttttcatttcagtggctgtcacaaatcttaagaaaattcaaaccttgtgttcaagaaggtaaaagcgtttttctgtaaccattttcttttgaaagtaaaaggctaaaatgaagtattaccaaacaaaaatggacaaagtttgacttgtgtgggtggtagtactttctccatgttttacatcacaaaacaatatcccatggagtgttgagttgaagcttgtcctagttatcataaagaatgtttttccaaaagttgtttagccctatgtttgtggttgaaaatcaggttcttttgtactacttatgatctacatctaatcattaagtggacatcacagcagcatctgacagtacagatcatagatcaaactttcctcagtgataatgagtaattttttgttttgtttttttttataggtatacctatttgtttttgttgttgttttgtttgtttgtttggttttttttctctctcctgtttttggtggagggaggggagaggaggtgtggtcctcaatgggacttgaacctacaacttcccatgaactcaccccaaccctttaccacttgggccagacctcaagggcgttaaatcctcaactaatctgctttcatcatcttctaattgaacatgtatattgaattttatttgaaacaaacatttcattaccatgaaattggtaatcacaaagaagttcaagaaatctttccctataggctgttaaataaatgtgatcaaaagcatgaaagactactattctgaaaagtaaaagtaactgcacaactgaaagtggtacaactacaaaattaattcccgggtaggtagaaaatgcactacaaaggacatttcatatgcttggctctgtgtttgctaacatatctgccatgtgattagctaagcaagcaactcaacaaaaggaacatcctaactttgaagcaatatataaatggggcaaaacttcctgttgaaccttcgatgaggcctttttttttttttttcttattccaaaattggacaatcacaaagtctccctctctttgaagactttatagatccaaggggttgggccaacttgaggctgtttgacaaggcttgaatctctgcctcaatggctagaccttcttcaatatatttcgaatatgtttgcaccgatcaaaatttaatttgagcaacccactggaggagtccatataggaagtgctagccaacctagtagatctgcaaaatggtgctctctgtctgtctgtctgtctctctttctgtgtctctttctctctctctctctctctgcctctttgtctgtctctctgtcactctctgtttctaatcatgtttcatcccatagtataacacaattgatgaagatgaacctataattttgtcaactgtgatgaaaaacattcattatgtaattttatcatatcatattgcttgtagggtctgaccaggaatcactgtatcaaggagaaaagaattttcggcacatacttaatttgtttgtgatgggtgggtagtgtagaaggtagtataacattcaaagcaatagaacaacaaaagttacagaaccaccagaatcctgctaaacaacaaaatgggagaaccaacctgtcatctacaagattctggtaaggcctggaaatccagatgaatttaactgcattttgtctcatggtccacctagcatttttgcctatttggtgaaaaaaaaattgaagacacagaagacggttggatttatgagtgaatataagctaaatattattaagttcccttggtggaagccaacagaacatgtttccagattccttttgcttgatgttattttagtaggagcaacctcctcattgtcatcaattgtgtttgtgcctacatttttgcttagtttaacatttgtgaaatatagaaagttccatatgctatgatgaccggcatcctatttttcatcctgaatgattaaaaattacaaagaatgccaggatggtagtctggttaggtgtctgcaaaactgccctatctgccaacttctgtatattttattaaaacatgaagatgggttgaaatatgagttgacgataagaacatgtgaatacaatatgaaagtgctaagttgacaatatagcatcttataggttggactatatgtagctgtatttccatgagtttcaatatatgtgcatatgctatacagcttaatctgatgactggactttgagcaccctgaaaagttgctttctggtttatcattattgtatttaccatctcctcttctacttcatacattggatttattaccttgggatgggaagagaaatttaacgatttattgtttgcatccagtcaag

SEQ ID NO: 10997 - DNA, 17625 bp, Vitis vinifera
  Intron number 16 from transcript GSVIVT01024809001 (locus GSVIVG01024809001) derived from phytozome v7.0 (chr-ID chr 6; pos 6727553 to 6745177 reverse strand)
cgaaagcttgctcagcctacaaaaactatagagtatgtcatggacaaaatcttgtgcatcagtcactggttttttcctttttttttttttttttcattttttttgtataagtaatgaaattgtattagaagtgcaaaatgaagtaaagcatgaacgcatgaaacatacaagacaaactctaatggaaggagctatatatggaaaaaactgcatcactcacatgacaccactcatcaacaaatgctgaattcttcaataaaaccccataaagatatattaggattgacattatattgacaatcacatgaaaaggtagtcattttggaatgtggtctactatcttactgttctttggtacaagtttttaaataatttttcggacacttcaatgagtataatcatgacaggctagagagtaatttgttgttccagcggaagggatgaggaagttagtggtagagtgaaaacctctgtttggttgccttgagctaaactttgataggtgctcgttgggaaacctgggacggatgggattggtggcatttgtaaagatcattggggtggagaagtcagaattttctccaagccttctatgggcagttgggcattgaggtagagattctaccattattaagtggcttgcttcagctaatattttgagtatcaatgttcacaggagaaattagggtctcagatactggattaatggttgtgcaatttcattgatttgttagaggtttggttgttctctcacattggattacccagagagtgaatcagttggctaactggggcacctcactgctggagagtagggaatttttcgccatgttgagatgtaactccttttgggatctttttttggtccatcatggctactgatttttactgttttcacttcctgtgctatactgttctgagttaatgaatattatgtcttgtagctagatataactctattgcatattttgtaagtccaatcctgtatagatgttaggaaattggaaacactggaattgctattccactaatgctgttgaaaaagagagagtgaaaaccttaattctcattcatatgatttaacttcttacaatagaaaaatatatatacaaggctaggttgaattaactaccatatatgtgacctatattaagaaaggaaagaaagattgaacactataaatacattatattcaacactccccctcaagctggagcatatatgtcatatgcaccaagcttgttacaaatgtatttgatcctaagacctctgagagatttagtgaagatgtctattagttgatcatttgaattaacgaaacttgtatcaacttcaatatgcttggtcctttcatgaaagactggattggatgcaatatgtaatgcagcctgattgactagctttatttgttcatattttccaaatctcaattcctgaaggagttgcctcaaccatatgagttcacatattgccaaagccatagcttgaaactcagctttagcgcttgatctgaccactacatcttgtttcttactctttcaggatattaagttacctctaataagaatgcttatctgagggtgaaccagcccagtctgcatctgtgtaaccaacaatttgggtatgacctctgtcttcatacaacataccttggcctagtgttcctttaatatatcgaagaatgtggatcacaacatcccaatggttgtcacatggtaactgtagaaattgactaaccacactcacaggaaaagatatgtctggccaagtgatagtgaggtagttcagtttgcctacaagtcgtcgatatcttccaagatctcttagaggctccccctgtcctggtacaagtttgacatttggatctataggagtgtcaacaggtttacattctaacatacctgtttcttccaagatgtctaaggcatacttcctttgtgacataaccacacctgaactggattgagctatttcaagtcccaaaaagtacttgagtttgcccaagtctttggtttgaaagtggttgaaaaggtgttgctttagtctttgaataccctcctgatcactgcctgtaatgacaatgtcatccacataaactaccaaatagatgcattggatcgaagagttatgatgatagaaaactgaataatctgcttcactccgaagcattccaaactcttgaacaactaaacttaaacgcccaaaccatgcctgaggagactgtttcaagccatatagagagcggcgtaacttgcacactaaaccagactcctcctgagcaacaaaatcaggtggttgctccatatacacttcctcgaaaagttcaccatgaagaaaaacattcttaatatccaactgataaagagcccaatgacacatagttgccatggagagaaataagcgaacagaagcaatcttggcaacaagagagaaggtgtcaccatagtcacaactataaatctgagtataacctttagcaaccaagcaggccttaaggcgatcaacctgaccatcaggaccaactttaatagtgtagacccacatccaaccgtagatttaccaggaggtaaagaaacaagatcccatgtgccattggagtgcagaacagccatttcatcaaccattgcttgtcgccattcaggatgagaaagtgccgcactagtgttcttaggaagagaaacagaggataaagtagagacaaaggcagaataggatgaagataatcgatggtagcttaaaaaattataaataggatgaggattacgagtagatcgattacctttcccaagagcaataggcaaatggtaagcagatgacagggccggggtaggagaaatcggtgggacaggaggtgagtcatcaggtacctcagttgaagagagaggaggagcaacaacacgatgtcgacgatgataaacctgaagagaacgagagagcgcatctaaagggggagatatatagggaagtgacaatacttcagaaatgggaagagattcagagaatgagaagaatggagagtcctcaaagaaggtgacatcaacggagagaaaataacgatgagtgtcaggtgaataacaacgatagcccttctgaagtcgagagtatcccaagaagatgcatttcgtagccttggcggagagcttgtcctgtccaggtgtgagagtatgaagaaaacaagtacagccaaagacacgaggaggaaggaaataaagaggttgggtaggaaaaaggagggaatgagggatttggtcatgtaatatagatgagggcatacgattaatcaagtgacaggctgtaagaacagcattcccccaaaaacgaaaaggaacatgactatggagaaggagggtacgaattgtctcaacaagatgtcaatttttacgttcagcaaccccattttgttgaggagtatgagcacaagatgattgatggaggatcccatgttgggacataaaagaagtaaagggtgtagaaaaatattcctgagcattgtcactgcgtaacactcgaataaaaacattgaattgtgtttggatttcagcataaaatttctggaaaatagagaataactcagtttgatttttcattaaaaataaccaagtacatcttgaatagtcatcaatgaaagtgacaaaatactgaaatcttaaagtagacgcggtccgacatgaaccctaaacatcagtgtggacaatttcaaaaggagactttgcccgattattcaaacgctttgggaatgagatatgagtatgtttcccaagctaacacgactcacacgcaagcggtgacaaagtggaaaaacgagggaccatcttctggaacttggagagactaggatgacctagacgactgtgaatgagaagaggagcatcggtggaaatgcaagttgtaggaaatgaaggtgatgtgaagtgatagaggccttgagactcacgccctatgccaatcgtcttccccgtactccggtcctgtaagatcacagatttatcagaaaaagtgatagaacagttaagagtgcgagttattttgctgatggaaataagattaaaaggacactcaggggcataaaagacaaaatggagaggtagggaagggagaggatgagccatagtttggaaaccattagctaaagtaatagtaggtaaggcagaggtagttgtaatagaggagaaaatgtgtttattaccaaagatatgatcagatgctccaaaatctagaatccattggccaagagaaggagtttgagtagagcaaacagaaacattaccggtctgggcaacagaagcaacagaaactgatgtggctgccttatatcggagataagcatcataatcactactagtaagggtgatactctgagatgtggagctcgcagcggaggcaagtcgagatagcagaggatcagttgattgagcaatgtgggcagtgcgaggaagccgtccatgtaactgatagcaacgatcttgagtgtgaccaagcttattacaataggtgcactgaggacgttgtcctcgaccccgattgccactacgtcctcctcgagagttagtttgagaggctaacacagatgaatctgaaggaccatcagtcgacaaggtttgagtagaggagaggcgtaagagacgagcgaacacatcatccaatgatggtactgatggactaacaagaatctgatcttggacagactcaagatctggatgaaggccaatgaaacaccataaagaacttgttagtctatatttgttgagcttcagcaccattagtgaagggcatcaaagttaagaactcctccttaagagacgcaatccggccaatataagtagacagatctatatcctactatctcacatgaacaatatcagaaaccaccttataaaatcgttgaatatcattcgtgtataatcctttagcttgagtcaaaatttaaagtaggttttgtaggcacgaagatgatgtacaattttgggatcaacagattgccataatacgctgcataattgtgcatcaattttcttccattgcactttgtcaacatcaggtatagcattgtcaggtgtaacaagatgatcctcataaccttgtcccataaaccagagttccatggacgctgaccaggagagataattctcactaccaatcaatttttccgatgtgatagtaggagatccagagatgacggatgtaaaaataggataatcacgtttggatcgaagagagccctaaagggaggtcggataatagctgtggaagaagaacctggtatgtcgggacccaaacaaaggagaaaagtgactagagatgaagaagaggccttcccaaggcacacacaggtctcgaccaaggaagggagctgccgtcggaggttggaggaggctgaaatgccaaaaaaatggagaaacagggttcggagaggactgacggaggcttagaagtgcaagacggcgccagacaagcctgctggtaaaagctcggcaccagaaagtgggccacgtgccctcacacgacaacgcatgggattcaagccgccggagaaaaacggcgcgtgggaggtgcgtggatcagtttttggctccggtgctttgagaaaagttgcagatctcctctttgcactcctgatgatgtggttggtgtcggaagatatcgctggaaaagtctcgggaaaatatcgccggaaaaatggaaaaatgttgactctgatgagggttttctgaccatgatatgactgaccggaaagctttgggagatggaaaaggtgaccggaatgaaacacggtcactgaacggattcccgaaatgaattacacgggtaaaccagaaagaataaagttttctcccttggctttgataccatcttgaaagagagagagagaaaaccttaattctcattcatatgattaacttcttacaatagagaaatatatatacaaggctaggttgaactaactaccgtatatgtgacctatattaagaaaggaaagaaagattgtacactataaatacattatattcaacaaatgcaaataggggttaaacagattatagacctaaactaaggagctaaatagacaactattagtaagaattgattattgaccactgatacactggtctgcatattcactcattctgtaatattcaccaaatattacactgatctgctacactgatagtacaccatggcaccatatatggactcattattacctttatcttccacactcctcaaattgatgcggtgacaacccgaggaatgcagtgaaatcattattcaatcttttttttttcaatagattgggaatcatgcaaccagacactccctattgagtccttttgtcaggaactacacacatgcagttgacttggtggaaggcggggtgcagggtgtgggctgttgttaacaccctacatagatagagagaacaattcaagtttactagtcacttatgcctctaagaaaaatagatggcatcatgtgcttctcgcaagatgacatgtttcttaaatacaaaatttcagattttcatgggcttgacctgaaagtggcatcatgtagtatatcacaaagttaggcctcatcacattttgggccataaaacatgctttcctttgttaattcaagtattcaactttcccttgcctccttgagccttagtggtctctctgttaggggcttcctgggttttgccatcttcaattggcagtgccctgttttctttacatggcagctttatgagaaagaggagggaagtttggagaaatgctccactttgcatattttggtgtgattggaaggaaagaaacaggtctgtgcttaaggggctggacctgtcaagtttgaaattgaaattcttgtctgaaatttttgttttcatggtccagggcctgcctaaggaaaagaagttttgtatttatttatttatgttactttattgatagtttggtaactgtttgaggagttggcctttgtttcttcttgttttatgttttttttctccttttcttgtgagagttccttgtatacttcctgttgtactagggttcacccctccattggtgctgtgatatattatctatttatctgtttacatgaaagaatattgaaaccagcccttgcttcaaccagacatataagtagaggtaacacaaagactttgttaaaacccttaacttttttgtggttttctactgtgcaccttctaattttggtgtattttttctcttctactgtatgaactaaactggaaagagtagcaatgaattgaaacaacctctaactacaagatagaggttgtttcaattgcaaggcataaaaaaagaaacaatgattgggctaatcagcaatatgaaaaaaaaaaaaatctggatgttgactggtggtggtgattacatgtgaaagaaaacacaatgagagcttcaccttagggggaccactcaccttttaactcaaagcttatattttgatacacagaattgattaaagagtgcctggcaaaagagggtgcaactcatgtacacaagaagtatacataaaacaccaaagagatgagaataaaagaaaacaagagagatagagctgagaagaagctccctaatccaagtccaagccatccaaaaatctatcaaggagagatttacaagcctcgagagaaccctagtccattcccttagggatctaagaaaagacttttttagtttctaattaggaagctccccttcataaaaaattgtgcaatccctctatctccaaatactctagaacatgcaaaaataaccatcctccacaccttccttcattgttttcttagaccatgcccataccagtctaaaagaggtccttaatggagtacaggaatacccattacatctcaatcaagcgagcaagtgatctcataaagcctaagttctatcacaataaataaggatgtagtttgttgtctcctccttgacctttgcacaaagtgcacctatttaccgagttccatcctctttgcataagttgatcaattgtaaagatcttttcacaagtagcttcccaagcaaagaaatagaccgtagaatcttctcccgagtaaagacataccctggaaggtgcataaaacccctaaacatctttggtagcaaatgcattctctttgtagaaaggaaagtatagcaaggtttcgttgaaagctgcccatcttttgctcccttccaaatggcctatcctccatatttccctatagagacattgaatggatctgccttaaaaaactccccactacctctatctactaattgtgcgtcatctttttgaaacaaggactccaatgctcttggtgccctttttcccccaaacatttgccattcttacatatctattagaaacaagaagaaagaggataggaaaggaagggaagcttccctccaccaacaatgtagccaaaatttcatcttgacaccagtaccaacaaggattaggttcttgatttgatctcctcccaaccttgtcttatagctatccaaagacctacaccataagccccctctacctctttagagcaccatacatcatttatctaaccatgcttgcctctaataaaccttctctaaagactattcctttttgtggcaaacctttgtaatcgtttttccttagcaaagctatattcacagtaggaaggcttttgatctccaaaccatcatttcttttatctgggcatacaaaaggccacctcaccacatgaagatttgttcccttctgttgattccattaaagaaagttcctcatgatcttttccaatggatccttatttccttgggcatgatacatagggtcacaaagtaaatcaacaaattgaatagtgtacttttttaataaaaattaatattcccccctttgataaatgcaacttcttctaagttgataaccttttcttaaagcattcctctgccaaatcccacattgtacaatagttaaaagcaagccccaatagccatccttacaaagtacttgttggaaagtgtcccaaattcctaattagtatagattcctttttttgtaaggaatatttcctatattctatgtcattggaatattagatttccttatagaataagaaaaattattaggaatatctctataaatattttggattacaaaaggaattttaattgaaagtgaggtcgattgttctctcatggggatatgatacaaaaagcccttgttatgaagaaatggaagattgacttgatgaaatttgatccaaggtgcagattgttggaaagtgttccaaattcctaattagtataagttcctttttgtaaagaatatcacatagaatatttcctaagttgatatattattgtaatattagatttccttataaaataaagaaagttgttgaaaatatctctataaatattctaggtcatgagggaaaaaagtcatgagatgaatatgtgcttgcaaaaactaatacgaagtggatagagatgtgaggaagaatgggagacactcggtggaacccaatagttgtatctgattctatcccctgtaatattctctgtggtataattaaatgattttctctcatccgtgaatataaacatgattgatcgaaccacgttaaaacctcgtgtaccatgtgtgtgattattttatctttgtgttcttaaaataacattgtttgtattaaagttttcattgcacaatagtactagtgagactttccttttgcatccaaatgtcaaatcccaagttttcacatccgtcactttgcctacaagatgagctcaccagtttggagtttaattttcagaccttacattaactcacaactaagaatgatcaatctcatatacatcaattactccatgctcacatcacaaaaggggatagtatcattagtgaaaagaatgtgagagatctccaatacacctccccttctccatgccttgaatccattcttgcaccacctttgaaataaaatagttgaaaacttccatcaccatagataaacaaacaagacaagagaggatcaccttaccttaaaaccttaaagctctaataaaccatgggggatccatttaccaaaattgagaatcttagtatatagatacaaattacaaaaccttaaccacccgatctgcttctacccaagacccacttttttttttccccattagagataacaaaaagtttcactaacatgatcataagctttctcgatatctagcttatatgttaacctctcctctaaacaccttttcctcaaatcaatatccccattgatgattagagctgcatctaagatttatctgccctccacaaatgcattccaagaattacatagtaccttgctcattacctttatattatttttgctaaaatttaacttacatgctaaccccacctctgatctccttttcctcaaatcaatagcctcatcaacaattagagttgcatctaatatttgtctgccatctacaaatgcattttgagaatcagatagcacttagctaattaccttttttagtatgtttaacaaactttttgctaaaagattatagaggcccctaaccaaacttatgaaccaaaaatcctttatatcttccaccttgccttttctcgaaactagcattagaaaaatagtatttttttgataggaaacgacaacgggatatattgataaaaagaagttacaactagaaggatgagaaatcctcccaccaaagaaaaacaagactacaagatcaaataaaagaaatacaactagagaataagcaaacggtctatttacacaccgctaaccaatcaagttgtaacatgttaagaggaatccctttaaaaaccttagaacaaaaagcccatagagaagccaaaaaacgaatagaatcccaaagacaccctgaattccttgctttatcctcaaaaatccttgcatttctttcccgccacaccacccacattaacgcgatgcacgcgtcttgccataacacaacccctctcttagaagaaccgaaaccattaaaattagtaaagaacatgtcagagatgctccttggggaaacccaatccatctttgctaactgaaataatctgtgccacaaccccttggtcaacgagcaatggaggaaaaggtgatctactgtttctccatgcttcatgcacaacttacatatgttgggactaagtgctttgtggggtcttctcaattgtagcaagtcattagtattaagcttcttgtgcgccaccaaccagacaaaggacttgactttgaaagggacttgagaattccagacaaacttagtagggaacactggaggcgactcggaatgttgggataaggccagaaagaaagatttgactgtgaagagacctgaaggagatatggaccatgatctcttatctggaaccgaaggagatatgtgaagacgatcaagagatcgcatgaggctttctaaatcttctatctcagaatcagtaagatttcggcgaaaattgaaattccaagagaaaggacgggaatacccgagaattgatgaaataagagcatttttatccgtgactacgctaagtaatcttggatattgggttcccaaaggttgatccccccaccacaagtcatcccagaaccgaattctatccccgtcccctaccacaaaccgagtaaacttggaaaactcttggaagacaagtgcaatggccttccaaggacaacgatgagaccatctaacattattgttgacatcccagccattggagtgtgatccataaatgcttaagataacctgatgccatagagctgaaccctccctaggatacctccacaaccacttccctaaaagagcgacattcctcatagaaatctttccaaaacccaaaccccctctcgacttcggcttgcacacaacgtcccaattaaccaaatggtctctttttccttcccctactcctgaccataaaaattctctttgcattctctcaatttttgctgccactgaggcgggaatcctaaacagggagagaaagtaacatggcatatgggttagacaagattgaatgagagttatcctacctccaaaagataaatacgccttctgccacccatctaatctccttgatatcctctcaatcacaggatcccaaaagccacttgccttaggattccctcctaaaggaagacctagatatagtataggccacccagaagccttgcagtcaagcatcacggccagtctagaaaggtgattctgttcaatattaatgccatagatgttgcttttgtcaagattaacctttaacccggaaatatgtccaaacacaagcagaacactcttaagcgtcatcaaatcctcttctcgagtactggaaaagaaaatggtatcatctgcaaattgtaaatgggatacccttgtcctgttcctgcccaccctgaagccctccaagacgtttctctcctcagctttcaataacatcctactcaatacatctgccactatagtgaacaaaaaaggtgataatgggtcgccttgccttaaacctctagatgccttaacccaccctttcgcattaccgttcactaggactgcataagaaaccgaggacaagcaacctctcatccatttcctccatctaagactaaaccctttcatctccaacacatgatccaaaaaatcccaactcaagtgatcataggccttttcaaagtcaattttgaatacaactccttcctcccctgttcttcttttctcatccactatctcgttggctatgagaactgcatccaaaatttgtctcccttgcacgaaggctccttgagtggaatgaatggtctcgtgaagtacccctcttagacgccctgctaacactttggctattatcttgtaaagactagtgatcaagcttatgggtctaaagtctgagattctccttgatatgctttttttgggtaacaagactataaaggaagcgttggtactctgattgattattccgctcctatggaattctgcaaacactctcactagatcctcctttatcacatcccaacaatcttgaaacacagcaatggtaaagccatctggcccaggagccttatccctatccatctgaaaaatggccttataaatctcttcttcagtaaagggggattccaacctggacgcactctcaccatcaataggggaccaatctaagccttccactctccacgattctctagaaggacacgcataaagcttttcgaaatactttaagatctcctcttttatactctctggattattcaacattaggccactttcattctccaactccttgataaatttcctatttcgcctaccattggccaccttatgaaaaaattttgagttgcaatccccttcttttacccatttcaccctagctttttgtctccaatgtatttcttctctcaaaatcaactcctctagctcccctttactaaaagctctttggactaaaagttcttgggatagtcccccttcttgctccaaggaatcaaagttagctaaaacagctaaaatatcctttttctttttacttagctctccaaaagaagtcttattccactctttcaatttggctttaacgaactgtaatttcctcatgaacttgtgcccttcccacccatttccttgaaactcactccaccatcttccaaaattctccttaaaactagaatgttgcaaccacatattctcaaacctaaaaggcgttggtccccacttgaatggattagtttccaaaacaatcggccaatgatctgaagtccatcttggcagtactccttgaagactttgaggaaatacttgttcccactcatttgagtacaagaagcgatctaatctcttgcatactggattctcttgcatgtttgaccaagtatatgatacgctccttaaaggtgaatctatcaattcacaatctcttatgaattcatcaaaatccttcatgcatggggttaatctagaaccacccaatttttctgaacttctccttataacattaaagtcgccgcctacacaccaacgcggatgagagagcccagcaatgtctgaaagctccacccaaaaatccttcctaagagctgagttatttgggccataaactgcagatagccacaaagattcgcatccgtccatcgcgaacttgattgagaccgaaaaagagcctaacactacctcctccctacgcatctttatagagtcccaaatgatcaaaatcccacccgaagccccactcgccggaagggctgcccaatccttatttctgactgaccaaacactgcccactagccttctgtcgcactcctcctttttagtttcttgaatcatcactacatccggcttttctgaactcagaaaattcttgaccacccttctctttttcttagaacccaaacccctggtattccaactgattatcttcatgtgaaacaatctgaccctgatcccgatccaaatccaattggtctcacaatcctgtagagcctctgctcttcctcctggaatacaccttgatatccagagactttaaaacctcacatacttttgccattctcctgggggaaagtccttctatttggaactctcccttaggagagcccgcaatgccacccaggttaactgcagcctcactggaagctgagagagggttgacactctcacacacctggttaggacaagcaggctggatcacctccaattctgaattagggataacaacagtaatttgaccattaaaagcatcgttggcttttttgaaaaaaaattcggaatttactctgttttccgtaggggccaaggattgagaagctgaaacgggaagcaagggagtagaaggactcggaatggagacagaagggttcaagagagaattagtgaggccactagaagaaggaatatgttgctgggtagactgaaaaagataaggcgttacctccagagattccgcaaccatcgaaccacaattccccaacaagttaggccctttacctctggttactggcgaagaaggcatacccatgactgctgagcctcgaggatcagactccactcggcccaaaaatccttccatatcttcgtcagatgaagcattgttcgaaatcttttcctttctcggctccgaagccctttcccctaatttcttcttgcgtggccttggaaatcgaggagaaaaaagagagcttgcacttaagcctcttttcgcctgagattcggcacctgaatcttctgcccttgagtccccttcgctatccaccttggtctttccgcgcgacaagggctcactgctacaccggattccccgtcgttgctctgagcttgggggaaagaaggttgaccacatcttccttgaactgtgcagcaccttcttcttcgctagcctgctcgactggatctcgaggggaccgggatctggtttctccttttcgattgcagaagaagaatcttcttccttgcttaacgacgttccagtcgcaaatggagtgagcccttctggacttaggcccaaccccattgggcctttaagcttgcagcccgatataactgcacttagcccaggccttgccagcgactgggccttcctctcacaggcccgacagcccacatcgggaatagcttcgtcttctccggctcctcctgttgcttcgatcccgtccatcccatctgttttcaaactagactgtgatgggagttggtggcccttgtcacacttgccggctgaggtaatcatagccttacccttttcttcctccttcctttgtctgttgtcttccccgacacgacatctccctcccgccgttgatcttccactcttcccttgttttcctccatctgtccccgagtgagaagcgccagccacccgagtcgactcacctttttcgccacctctccttccttcttcgtctccgaccactactacaacgaccgtaaacacccactccccatcagacacttctaacaaagctggaaggattgccttatccctcattgcgatctttaacctcgccctgctgagatcgaacagcttcaacgtgcgccaatcaatatcctttactgtcccccattgctccacaatcttctttaggtgtacctccgaccataggtgaaatggcagcccccgtaactcgatccagccttctctaaacttcccgtctatttccgcattctccttcggcgaccatcttcgcaactggatgatgttcctttccccaacctttatcttcctcaaatcatggagaaatatggcttcctcaattgtttcaacgaagaatactccatttctagctgaaatgggtacaaccgttaccacacctttcttccctaagcttcttgccactgatcttccaacctcagcccaattctccctgtcaaacttgctttcacacaccacagcacgcgcccatctcccaattggaactagaccacctcctcttggtccttcatcactgactaccttcgcatatgatctgtgcatcgatccctcataattgtgagaccagctttcccctcttatattccttcctttttctaatacattcggataatgggccaccaacaaagaagatagcgcatgttttatattctcccatcctctgcccttgtcgccctcaggaatgatcagaacggaaggctttctgttggtagcatactccgagatcctaatgaaccttccatggatgttgaagcccacttccatcagatgcaccctgcattttcctctgaattttttgttgaaacccatatgactcttcagtgctaaggctttcgtcaaataatcaaccaaccactcaactgcatccttttcaaaacctaatgcaaaaacagagcctctacttatctctgttatcgagcaccattcgcctccttgcttgccttccaacctaatcaagaatgtcttcctctcaaccaataccttcaccatcttctttatacagataacctcttggaagaggcttttcactgaggaggtttatgcagcgttgcattagaaaaatagtattaagactttccttaagaaacccagtcagtaataactcctcactatgggctttgccaaaaagctaacaagccccccttccaacagatcaacaagtgctatcaacacctacacctggccttgtttcttgagaattcttgtactgacccttaaacccccaaattttattttccttccttaacaaattctcttcattaactcacatactactaattagatttgttggaagaaacttcttggagacaaaaattaaggatactatgacttaaggaagggatggaatgtgaaaattttctacaaaatggctgctgtacacttgtttttggatattattaaattgatcattacttcactgtttcttctgttacccatcagttccaaaatgtccaaggtgagttcatacttcatccttcaccatcatactttgatgtattcttgttttcctataaaaaaaaaaaaaaaagaaagagaagaaaaatccacaatcatcttctaattttctgtgtcacataacatatgagccgatggaagactactcaattttttggttatgagattctactttattgtgctgcattgaatcttccttcatgtatgtactcatggtgaagagctgtttgcatgtag

SEQ ID NO: 10998 - DNA, 11408 bp, Vitis vinifera
  Intron number 7 from transcript GSVIVT01029258001 (locus G SVIVG01029258001) derived from phytozome v7.0 (chr-ID chr1 1; pos 17906878 to 17918285 reverse strand)
gaagcaagctactccaagccaacggaatcgttacaacccttcctaaagacatggatcaatgacatttcagtacaacggtcaagggagagatcaaaaggagggatctcaatcctgactgtgaacccatttattcatctttatctaaactttgctgtgaatgggtattggaaaatcagagaagttaaaaaaattggatgcttagagccctccaagtgctctattgcacttgtaactagcaaatgaagaatctatatccagcactgattttgtccattgtagatatatttaaaggatgacacccataattaattttaatttaatgattatgaatttattacttaaattatattgttacttagtaggacaattgatcaagttgaatagtatactggtatctagaacctgttttgttaatatgtcataaggtggctaatatgggaactttggagatactttacaataaatgataacttctgttccatgaaggtagaatcgaagctttgaggaggaagatgaagatgatagagtggcctcctggactgtgttcaccaattattctcaaaatcagctggtattggtaaggactctaaacttgtctttaatttcaattttataaagtttgtgttctgattctctgaggtttatattgtcagtagcatgatttgttgattggatgaataaaagggaattctgattctctgaagatttataatgcttgacctgaaaacctaagcttgctgaattgtttggctcacctcttgcaacatttttcagataacgagcttttggatcagaactggttctgtgtagaggcttgactcggagcctcagccatatagaatgctgactataccctagtttcatttatatctttggtcctttcaatataacaacctttgtttgtcatggacttggacctctcctaagttcccattcgacaattactcaactcaagcataccttatttctttttgtaggatgtgctaatgactatatcctagtttcatttgtatctttggttcattgggtgtaacaatacctgtttgtcatggatttagacctctcttaagcacccgttctgcacttgacaactcaggcttactttttccttgtactggatgtgacctaggaggcttgacttggagcctcaactatactgaatgctaactatatcctagtttcatttgaatctttggttcttttagtgttacatttgccacagaattagacctctcctaagtacctatacaacaattacacaactcaaacttacttttttccttttttgcaggatgtgacataggaggcttgacttgaagcctcaaccctatagaatggtgaccacacctagtttcatttgtatctttggttcttttggtgtaacaataccttttttttcagacttaaatctttcctaggcacctgtacaacagttataaaactcaagcttactttttccatgtgacataggaggctcaacatggagcctcaactgtagagaatgatgactatacactaattccgtttgtatctttggttctttccatgtaacaacacttatgtctgacggaaatagacctctgctaagcacccatatggcaattagacaactcaagtttacactattcttgatgcaggatatgacatagcttgacttggagcctcgaccttatagaatgctgactatatcctaatttcatttgtattgttggttcttttggtctaacagacctctcctaagcagctgtatgataattagtaattacacaactcaagcttacatttttcatttggcaggttgtgacctaagaggcctctcctgacttggagcctcattcattcatccttattgttggttcttttggtgtgacaacacttatttgtcccaaaattaggcctctcctaaccaggtccaacaattagacaattcaagcttacttttttccttgtagaggctatcatacatcaattcttcagttacacccaatgtacttgtgcaggcatggcatgacatgattgtggatatgggttcctccttatacattcttgttttactttggatgtgaatgtttgatttttttggttgatatttttctattttttcaactttctttgtaataattatataagagaaaaagaagagtttatgaaaagtgaattttcctaagaatatttatggataagaagaaaaaaataaatcagagggaaaaaatggaaacttctaaaaaggttatcttttgaattgattttgtttattattattattattatgtcatatcctaacactcatctgttttttttggatcctttctagtcaaatccttgtatcctaaaattttgagttatgaagggtctaatatttagacacatttgcccctgacactcatacctgacaaaccatgcaacatagtttacaggatataaccttcccattaggaacatcaaacttgtcgattatcttcccatcagttgcaactttcacaacagttgctttcttatgggagcctttaactagctggaacagtttagaaaatgttgtcagcaagtgctttaatgccttagaagtgtgcataatgtcacggacttagtcgttcactaagctcgtgtgacacttaggtaagtcaaggcgcttgatcttgctaagtcagccttgcttcccaatgcttagcttgctcggctaagacactcgcgactcaaaagcttaagaagcttagtaggcaactctttaaagaatggaagctttcactaacttaaggaaacctttacaagtgcttggatgctcacttgtttggtgccttggccaaatgaggccctcacctatttataggcgccaatagaactctctggaaccttggagggttccttacaactcaagactattctagaatgtcctacatcattctaggtacaagcctatgtacaagtatatacaagagacttctggaattctctagaaagccctagactcctctcatgccttccaccatagtgtagaattgtgtggattcctccaagcttctctagaaccttccacactcttcccactctaggagtctccagaagcttcctggctctatataagcccatggggaggctcatttgaatcagcttgtgacaataagctcaaacccatcagaagtcacttgcaccacaacaaaatttgttagctttctcaattcatactctccttccctcttaggtctcgtttggaatagcttttgttttaactttagtaggaagctgaattgaaagttataaatttaaaaaaataatattggtattataaaaaatttattaaatatgaaagaacttcttgagctcttgtatgagtctaaatagcggttttataaaaagtaatatttcattgactttcatattaggtcgtactgctccagccatattgaatctgctaaggaccttcttcatatactcttcctatgatagtttaaggaccttcctgtccctagtaattctcatctcaaggatttgttttgtagcacctaaatccttcattgcgaactcctttaataacttcttttcagtttgtcaatctcatgtatgctagtccccgcaatccacatatcatcaacataagcagtaaaataatgtaggagccatcaaacctcttgatacaacaacaattatatgcctaacacatcaaataaccattattgctcatgaagttgttgaacttcttataccattgtcttggagtctgtttcaagtcatatagacttttttgtagcttacacactattttctttttttcctgaacttgaaagccttgtgtctaatgcatgtaaatttcttccttcagatcaccatgaagaaatgttgtttttatgtccatcaattgtaaatgcaaattatttatttatttatttattttttgccactaacccaagtactattctgattgttgtcaatttgaccattggggagaaaatctctatgtaatcaatgcttttattttgctaaaagccttttactatgagccttgctttgtacctcttgctactatcatgttctacctttatttgatatacccatttattctacaaagcttttttcccttttggtagttctaccaattgccatgtttgattggacatcaacaaatccatgtcatccttcatgactaactcccacttgattgattcatcaacttgcattgcttcttcataactctttggttcacctctatcaataagcaaaatgtagttaagtaaaggagaatatctctatgatggcttaatagttctagaagatcttctaagttcaatcataggagtagattgatttacttatggggttacattttcttaatcttctaggggtgtggtttcttaaacttcacagacattcacttgtaaattgttattcaaaaaatcttttaagtgaactacctcatgcatcttcacttcagaatctgcattgtttgaaactttgcctaacctatctttataaattacatacttgttaaagatcacatccttgtttataatgattttgcgattttgatcatcccaaaaacgataaccaaactcggtgccaccataaccaataaagaaacatttcttagatttggaatcaagtttacttcttatagcaacatcaatatgaacataagaaaaacaatcaaacactttcaaaaaagaaaagtctacatttttgccactctaaatctcttcaggtattccacaatccaaaggaaccgaatgacctttattgatcaagtaagctgcagtgttaactggatttgcccaaaatgtcttgggcaatcctacatgaatcctcatacacctcacacgctcatttaaggtcttgttcatcattttagccacaccatgttgttgaggttttctaggaatagcttttgttatcttgatcccattttcagcgtgataccacttaaaatcatcatcaatgtactccccctcattatcagacttcaaacacttcacttttaagtttgtctcattttcaaccttagctttccacttgcatcaaacatatcatatttattctttagaaaataaactcataccttcttagttaagttatcaatgaatgtcacataatagttggatcctccaagagaggctatagtcaaaggtctcatacatttgtatgaaccaacttcaaattttcttattttaactccttatcgactttggagaagcttaccattttctgttttccaaaaatgcaactctcacacaatttgtgctcaatagatttcaaccctgacaatttatcatttgatatgagtaattttattcatttttcactcatgtgtttgagcctgcaatgttatgaatttgaattgcattactgtcaacaataaaaaccatatctctacaactggatgtcatgtatagtgttccagttttgttcccttgtgcaataaccatgacgcatttcgtaaccttacatgcaccatcggtgaaggtcacattatgtccatcatcaagctaccctaccaaaataagattacacatcaattttaatatatgtctcaccttatgaatattccacacaaaattgtttgacatttttagacgaatgtctccaacacccacaatatccaatggtttaccatctaccaaatacaccttccaataattcccagaaacatagggcttgcttggttgctgtttcagaaaactgttttttgtctttcaagacaaaaaaacactcaaaaacacatttggcaattgttctccgtgttttcaaatttgttcttcgtgttctcaatttgatggttttggagaacaatctcaagttgttttccctgttttttacattgtgaactaaacaaaaaaaacacacaaaaaatcacgaagaacaaaaaaaaaaaaaaaaacacaggtagagaacaaatcacaaactttcaaaccctcaaaaaatgcatcatacagtaaattaaattaaatcccaaatccatacacaaataacaaaccctaacatttgtgttctcaattttttttttttcccaatttccttctccaaatgagaaaattgatggcggtaatgttggtgatggtggctattgcaatatgagcttcatatggaagaattgatggtgacaatgttggtgtaacgacccactcccaaccgtgtggatatggggtcaacccccacatcgaggtcagaaatcgactctaataccatttgtaacgactcgctcctaaccgtgtagatattgtcctctttagacttaaatgggttctcacgactttaaaacgtatctatagagttacgaagagtccatacttatatagcgccaggaattttcctccctattcgatgtgagatgtcacaaacaccccccatgtaaacacaaggtcctcgttatgtcccataggattgtggggtcaaacagacaaacacccttacgggaccaaacaaaccccacactgaggtcagtgatcgactttggtaccatttataatgatctgttcccaaccgtgtagatattatccgctttaaacccaaaggggccttcacagctttaaaacgagtctacttggttaagatgaacctctacatatatagcgtcaggaacattcttccctatccgatgtgggacatcacacccacccccttcctcatcctcccctccatgtagacacaacatcctcgttgtgtcccacgggattgtggggtcaaacaaatacacccttacaggaccaaacaaaccccacaccgaggtcggggatcgacgctaataccgtttgtaacgaatcactcccaaccgtgtagatattgtccgttttggatccaaggaggccctcacggctttaaaacgcgtctacagggttaagaaaagtccatacttatatagtgttaagaattttcccctttatccgatgtggaatgtcacaaacaccccccatgcagatacaatgtccttgttatgtcccatgggattgtggggtcaaacagacaaacacccttatgaggccaaataaaccccacaccgagataagggatcgactctaatactatttgtaacgacctgctcccaaccgtgcagatattgttcactttgaacccaaatgggtcctcacggatttaaaacgcgtctacttggttaagaggagcctctacatatatagcaccaagaactttctcccctatccgatgtgagacatcacaaacacccccctatgtagacacaacgtcctcgttgtatcccatgggattgcggggtcaaacagacaaacacttcttacggggccaaacaaaccccacaccggggtcgaggatcgacttcgatactatttgtaacaactcgttcccaaccgtgtaaatattgtctgctttggacccaaatgggttttcacgggttacgaggagtccatactaatatagcgctaggaactttcccccctatccgatgtgggatgtcacaaactccccttcccctcccatgcagacacaaagtcctcgttgtgtcccataggattgtggggtcaaacaaacaaacacccatacgggaccaaacaaaccccacaccgaggtcggggattgactctgattccatttgtaacgacttgctcccaaccgtgtagatattgttcgttttggacccaaaggggcccttacagctttaaaatgcgtctacaaggttaagagaagtccatacttatataacattagaaactttccctcctatccgatgtgggatgccacaaacaccccccatgtagacacaatgtccttattgtgttccacaggattgtgagaccaaatagacaaacacccttacgggccaaataaaccccacactaaggtcagagatcgactctaataccatttgtaacgacccgttcccaactgtgtagatattgtctgctttgaacccaaaggggccctcacggctttaaaacacgtctacttggttaagagaagcctctacatatatagcgtcaggaacattctctcatattcgatgtgagatgtcacaaaatttgtaacgacccgctcccaactgtgtaaatattgtccactttgaacctaaaggagtcttcacggctttaaaacgcgtctacttggttaagaaaagtctctacatatatagcgtccgaaactttcccccatatccaatgtgagatgtcacaaataccccccatgcagacacaacttcctcgttgtgtcgcatgagattgtgggaccaaacagaaaaacacccttatggggccaaacaaaccccacattgaggtcgggaacctaactctgataccatttgtaacgacccgctcccaatcgtgtagatgttgtctgctttggacccaaaggggccttcatagctttaaaatgcatctacagggttaagagaagtccatacgtatatagcgccagaaactttccccctatctgatgtgagatgtcacagttggtgatagtggctactataatatgagcttcatatggaaaaattgatggtgacaatgttggtgatggtggctattgcaatttgagtttcatatggaatgacaaaggtgggtaaatatgtgtgtttgtgagagagatgagaaaaggagtaagggaatgaaggtgatgagatgaaataggaagaaaggagcgtggattttgtagaaatagcaaccatgagaagcaaaagggagagattgtgagagagacgcgggagagatcttagaggacgatgaagaagaaagtggagaaataatttggggttagggtcggtatgcaggaggtttaaaagataaaaaataaaaaaaataaaaactattaaaaaaaaccatttttatattaaaaattgatacattttttttttaattttaaaattacaaaaattaattaaaaaatggatgcaataaattttttaatatatttaaaatattaagttgataaaaaattattttacaaaaaaaaattaacatatgaaaaaggctttgcattaatttaattgtcaaattatttttatgtttaaaacacatctattatttttattttaaaaatgaaaacaattagaaagtttggaaggataaggtttggtagaaagtaggaaaaaaaatgacagatagttaagaaaatttcaactaaatatattattataaattataaatctttgaattaataatatttgtctctaatatttaaaataataaaatatatcttattttatataattatcaatattttctttaaatatttgcatgcaatatttctaccattaatttatagcgctaacaaaagttttaaatttgtattataaccttttatttatttatttttatctttttattaaaaaatctaatcatttattgaagaggattaccttattgtcaatcctcctttattatgatatttaacaacttattattaaaatatttcatcttcttatttattataattaaaataaaagaaaagaaaaatcaaattttaaaataaaataaaaaactaaaaatgtaatttgatttcccattcaaatccatcaacctcttattattatcttttgttgattttttttatccatattttttcataaattgagaggagttatgaaaaaaacattcaattaaaaaaaaaactaacttccaaacatattttttattttatttgttctaaaacactttttttttaactcaaccaaacatgtttttttttttgtttttgagaacaaaaactatttttcagaattcaattcccaaaaacaattttgtttatgaaaacactaaaaattgttcttaaaaactattttctagaacaattttcaaaaacaccaacaaaataggcccatagttctccataaattcttgatgtacagtttgtgtggaaagatgtccctgagtcgaacacatcatgtatctcctcagtgactacatttgcagcatcacctttgttttatttcttatttttcggtgctctataatgctctttatgtgacctatttgcccacagttccaacattccatattccgcccagatctggaattacttctttcattcctcgacttcaatctacttttattcctattagaacttttgtcattcctcctacggttacttttgagatttagggttgaacttgatgttgaggcttcacccaaatcaattctatgaacctcctcagcaagaatctgatccctaatatcattaaacgtcaacttggcactgcatacaaagttactaattgttgccctcatgagctttcaactatttgatagagatgccaaaagaattggagctcgaacctcatcattgaaatcaatttcaatagatgacgatggattaagaatggtgtcgaactcattgagatgtgttgctaccaaagcactttctttcatctttaaatgaaacaattttttcatgagaaatatcttgttatttacagacgacttctcatacatatcagacaataccttcattaatccctttggtcgatttctcctttgtcacattatgggcaacgttctttgataatgtcaaccgaataactctcaacacttgtccatcaaggagaccctaatcattgtccaacatcttttttggtttctttcccaaatgaggtaaatgaagtttcttgccgtatagataatcttcaatttgcattctctagaaaacaaaatctataccatcaaacttcccgattctaggggtcaaaccattttcgctagccatcactcttaattaaaaccaaaagctttgatactaattgctaggattaaaacaccctaaacttattttccaaaagcaattataaactaatgcgaaaaataaataacaaaagtacatgagatttatagtggctcactctcaatatgagagttacgttcacttgtaggtactataaattttcactataatgaaatgatcgtacaagaaaatatcaaaacatctcaccatctagatttttctctatgcgtttttctatctttctcaataccccaaaaaataaaactctctcaaagttgactaccctaaacatgatataaaaaagacaaccagagtataaaatccccaaaataccccaacttaaaatattcttactattaggataatgattaggctctataggtcttaacaaaaaactagcaagatatgcaagaaaaatctctttgccaactttaagaaaatgagaggctacataaagaattaaatagcaagtaagaaaagtttgaaaaaaataaagaagatatttcgacaaatagtgattaaatggaattaattttcttggataaccacaagaaaactcattatccattttaattacaaatcccccctccctttttttgccttcgtcagattcccctgcaaagcaatatggaaatcattcacatttcccaaattacccctagggttttccaccgtgcctttcaacacacacactcccgcaaaccctagatcccaaaaccctagcgtctccccagtccccacaa

SEQ ID NO: 10999 - DNA, 8472 bp, Vitis vinifera
  Intron number 45 from transcript GSVIVT01018178001 (locus GSVIVG01018178001) derived from phytozome v7.0 (chr-ID chr 15; pos 13586525 to 13594996)
ctttgcaacccctcaaaattcctgcattcaggttagcataaaaaacttgctttattaactgctctaattatgcaattcttgttaatgatgaagcctagggttggtttaaggcttagagggaaatttacgatgtggtccctcatcttactttattttgtactttgtttgagtagatgctaattggggtcattatcaaggcaaagaaatagaacactgaaggctgtttataggacagagatatagttcagattttatatttatttgcttttttctggtgatgcaattttcttttctacatccaaccatgaacaaatgagaaacctgtaatttttttttttttttttttttttgaaagtcatattgtcccttgaaataagtttttctgagaacttctttgctgccattaattggagatcaaagtttaattcttagggggcaaaagtagatctttgtaggtgtatattttttttattttattaagttggcccttgcctgcttggttgtgaacacatctttgtcttaagatggtatttgaggtgtagatttgaaaagtttcagagagatccatggctcagatttgaagaggagaagactgtaacttagtgtatttgtatacttttcctcttcaaatgtatgattttatgtgctattcggtattaataatgtggtataggcacactaatgatgtaaagggtttccctgggacggaaagcttttatcatacagtgacaattagcatataggaactcgttctaaggattaggctccagtacccctaggattaacatagttcactttagtttgtggtcaggatgtaagacaaatcaattgctcagaacacattgtttttcttcttttcaagaccctaatataattgagatgcaaccaaattccctttagaatcttcaatttcaacttccaatgtgatattagtgaatgggaaatgcgtttcaattcattactcaacttgctgaatgatttcctcttctcctctgcatttcatgatgctagagctcaggaagtgcagtcccttctcttagatttgttataccaagtggccccaaaagttaggcacttgcatggctggtgtccattaagagacttaaagttatattagaaaaggagaggaaccaacaaggctatctgtcatcatagaaaccttgggtcaatttttttgatatcaaggatgaaactatctatatcgacaaaaatattggcggtttgattttatagaaatatcaatggaaatattgatattgataacaatataagtgagagaaatcgcaaaaagacctccaaacatgaaatttttggattaaactatttttttaataaagtacgatatatatgataaaattagtataattagttaatatggagtgtatgctggtaacaagtaagcttttgaaagtgtatgctaatcactaatgcagggataaatataaaaatttcattgaatggcaatatttaagaacacattacatttaatattaaaaaatgacctatatgattcaaaggtagttgataataatgggatacatgagagaaggaaataagagagggaagccaaatgagagaaaaatgagagacaagtgttcaatgagagaaagataagaaagtttattgaaatttggagtccaaccaacagcttattaatggaaatgttgatattttcctgaaatatcactaaaatatgggaaattgtcatcaatattttgacatattttgttttatatttttctcattttggctgtattgatattttgaggaaattttggtgataccttgaggaaatttttccaatttccatttacctccaccttttactttgttacccccaaattatgcatattcctgcagaaatattagtggagatattggtttttcctctttattggatataacattgttgttttagtgtcaaggccaattttcaagtttatctcatgatgctcaagacattctcaattggtgtaagtgcttgctccttcccaactctagccatagcaacatatatagatgggaaaagcccaaaaggttccctgagttcatgacataggcctaggccaaaaaagtctttcatgtttgacccatatggcttaaagggcctgagttttgatttgaccataatgggcctgatctgtgatggaattttgtactttcaggtgctacttgtctcggtgatctcctcgagtctaggccagcatccctaggttttctatgatctgacttggtatctactaggcttgaatggattaatcttgcatgacatgtccaattgcttgcttcagttctcatctgtatcttcattgtgatatggtctattccatttggaaggactttgttctggccatggatgcctctttttggtcttccttcctttgttgtctattaatctctaagttttgcagggtaggaatatggttgaataagtgcgtaggaatgtcaaccacctgagtttggaacaaagtggccatatcttgtcttgatcattctcttggaggggtgatgccctttcatatatgtcataaacctggtccagggcatgacaagataaatattggagttcacgatcaaacttaatagtctcaatcatgtagacataagagtgaataatgattgcctcacctatttaaggaacactctagctataaaaaatataagatcttcatgtttgtctcaatattggttgtagaggggtacactttacctactcattgattaccacatataattcatgtctttaataagataaggacatgtatcacatgaggcccgcacaaaggaagattgatattctcatcaaataaaaaagaaattaattaagtttgataattataaaactataattatcaattaattaaatttggataattttcatgaatatgattatcataataataattattatcattaaaaattaagagataatttcaaagatgatttctcaatgcctataaataaggggcctcctccttggttctcaaaagacacttgtagactttcatgcttgacaacagttggagagaactcaccttaaggattcaagaagctcttcaaaccttctaagattcaagaacaagtttaatccgcttcaacgattcaagaacctcctcaagcctcaaggattcaagaagctcttcaagacttcaaagaacaattttgaaggtctaatgaacaagactgaagcatcttcaatccaagatcagacattcatgctctcgatcaatgttattcaagtctaactaaggtccaagtctagacctaagacaagtcaagatacaagcctaggtcaaggcccaagtcaagttcctccttagccattaattataaatgaagaatcataggttaacatagaggtttcactctcaattacaatcaataaaaaagaattaatttgtttcccaattttctatttaagaggaatttgtgtttacaaatttcttgtatatccagttagataatctctatctttcatatcttctttgcaaaagatttatgcttcatcaattctaagaaaaactcatccaacaagcaaggagttagatttgcatggtctagtcctattgaagttgctacctctaaggtaaactctagtttcattaggctaagcaaagtgaaaggtgcttctcaacatcaaatcaagaagattcctttttggattcaattgcaaaatttggagtaacttcacccaagaatctaatcttactatttttaaaaagtattacatacccattcatgtctcaagagacatttttaagccataagtccttgcttacccaagaaaacaagtatgatactagatctattgttgcatcttcacatggatctcgataaaggattcttgcaacatcaattaatataatcatggtagttatggtgtttgaagtatattctattgaagagcaagttataaaaatagctagggctattgaagaacttacggtaaaaattcaagaacaagatgtcaaaatcaatcataagctaggacttgtaacaggaccagcaaataatgctacacatttaaatcaaaatacatctcaagataaccttaaaaactactcaaaaggaaaagattcttccgaagaaattaaagtttcttcaaataggtttatccctacaaatcaactgagaaacctcataatagagatgatgaacaaatatctaatgtgcttctcttatatacacaagatcatatacaaaacgaattgagttaatacttaacactaatgccactaggctaccaattgctaaaaaatgaatattttgatgggaaggaatagttgtttctgaacttctacactcaatcatactccagaaaccaaaaaaaaaaaaaaaaaaagtttattctccaagcaagacttgatgcaaggcaacttagtatattcatattgaacaacaaatggatcttgcatatttaacatgtggtagacaactcataagaactcatgtgttctatttttttttttttgataaataaaaggaagtatattaatcaaaaagaggaaacaccaaaaactagtgccctcaaagtatacaggtagtatacacaccgtcttcccttacttagagcctatcaagtctaaaaaatttacaagagaagaaggactcaaaactaaggaaaccctgacccaagaccaaggattacatacaaagaatatttcaatctttgtagtgaaagctcctcattcccaaaagctaatctattcttctctttccaaactgaccaaaatatacataagggagccatttgccaagccttcttgcgacctttccccacaaacactccattctatctaagaagagtttcctttactgtacatgaaagagtccaagacacaccaaaaagggagaaaagaagattccacaagacccgcgtcttagcacaatgaagtaagaggtgatccaccgtttctactttagataggcaaagaaagcacctgtttgccaaagagaaccccctcctttgaagttgctccaaagttaagactttaccccaggaagcctcctaagcaaagaaagctaccttcagaggcactcttactctccaaatactttcgctagggaacatagaagaacccccgagctccaaaatagaataaagagacttgattgagaaagcaccaccatttgaagctgtccagatctctctatcttcctcctctctttgcacccggaaagcttggatcttacgcaaaaaaaactccaccaactcaattttccaatcattaaacgcccttgcaaaaagaggagtctagccatccccatcaccaatggggttccaaacctccgaaacccaagcattctcagacaaggagatggaaaataaagaggaaaaggactcacaaagtggttcatcaccacaccacttgttcgtccagaatctcactctctgcccactacccacacggtaggctaacccaccatctaaaagcaaccactccttcctaattgctttccaaagcccaacatcgtatctcccatttactttccgagtacgccatcccccctcctcttcaccatacttgtgacttatgacttgcctccaaaacgcctctctttcattagcataccgccaattccacttagagcactaattatcagagctaaatttctcacacctaacccacatttctttttatccaagcaaatcaagttccacctgacaaggtgtggcttttggacgagagctcctccactccacagaaaatccctctgaatcttctccaatctcaacctcacttttcttggcaagtagaagagagacataagtataaaggcatgctagaaagagtattttggattagggtgagtctccgtcctttagatatatactgcctcttccacatagcaagccttctacgaaaacgctcttcaaccccatcccacacagccattgatttgaaaggtgcccctaaaggcaaacccagataacaggaagggagcccacccattttacaacccaactccatggctaaaccctctatatcatgcaccttacccactgggatcaacttactcttctctaagttgatcttcaaccctgaacatgcctcaaaccacatgagaagccaacttagataagtcatctgatctaaagactcctcacaaaaaaccaacgtgtcatccgcgagtaacaaagtgacatatatttaaacttcttaaatcaaataaaaaaaatcaaacttagactaaatatcaaaacaaaatggaaaaaatttcaaattaaggagacaaagtccttgagaaaaatatatttttttaaaataaaagaaacaaattccttgaaccacgagagtcaaatttggagatttgaaattaaaattttccaatatatcccgtaaatatgtgcctttcttcaacattgggattccccgaaaaaaagaagaaaatgcaacctcaaaatctgatgtgaaaaaaaagaaaagaaaagaaaaagctttaaaagctatgatcaaacttgaaacaatcttcaacaaacaagtccaagaatattgggcatgataaaaaagtgttatttgtctacctttaagattgaagaagacaaagtcagaatctttttttttttttttttttttgttcaaaatgttaagaaagttcttcactagtttatttggaaataactcatggtttcaacttcattccaagaacacatgtctatcactgttggatcaaaatcaagactatgttgtaagcatcttcaacaggccaatggaaaaatattaaacaaaatataaaagtgtcatcaatgcaccttcaaggccaaagttgaagacaaagtcaaattttttcttcaaaacactctaggaaagttcattacaagttaactcaagaataagtcatagctagcccttgattaagctcagttctaagaatacaaagtcactgttcatggatcaaaattagcacatgtcatgctccttaaagcatgagcctaaattgcttaaaactcctagctttcactagtttaacaaaaaaaaaaaaaagctagaaaacctaaaaagacaatctaggcaaaaaattatcacatgctctcaataatgaaaaccaaaaaacaaaaaaaattcttggcaaaaattagaggacagaaatcagaatgctttgaaaagaaaaagattatcatgaaaacaaattattgtaataatagtaattatcattgaaaattaagggaaaaacattgaatagaatttctcaactattctgactttcaaaagagcccgcctcgaggattcaagaagctcttcaagccttgaaagattcaagaaaaagttcagcctgccttgaagattcaagaacctctttaagcctcgaggattcaagaagttcttcaatccttactagattcaaaacgctcttcaagtctttgaagatttgaagatcttaagaacatgtttgaagtatcttcaatttgagatcaagcattcacgcttttggtcaatgttactcaagtccaaccaatgtccaagcccaagctcaagatacaccaaggtctaagcctaggtcaaggcccgagtcaagtccctacttagttattaattataaaagaagaatcagacaatagcactctcaattttacatattaaaaaaattagtttgtttcaccatttttcttttttagaaaaatttgtgtacacactggcttcagcctccttagttatggaacctctatcattgtgtcatgaaatcagaaaaggctttcttcttttgcaatgcctaatttctggttgttcttagaatcatcctaaagaaatgattgtgctcaacctagatggttattcccttgcaaattagggttaataaaatgtctaggtaaatatcatgaggttcttccctcatcatataattaacttttcctagcctcttggagttgactggttgaagaagttgattctgtgtgcagaaaggatgcaataaactgaactcatgctggtatcctgactgaagtttaattctgtaaaacacaatatgaacaagtggattaaaaattatgagcatatcttttggattatccagaatcgttagaagtggtgattgatgtttgtaaaatttgggttgtccatttttggattcttagattgtctacagaggtgtattgtagcagagtgtgctgcttgttaggggaagatatgtctcctttgtgtgctttgtggagttttctttttcttatttgacaagaaattgaatgtagaaaggataagttttaggttttcttactttggaggaactctcttactcccttttctattcttttccatcttataaactctcatgtttagagagagagagagagagagagagagagttcttaggagattgcaactaactgaggagaaaatggctgcgagtgactgggtgttggccatcattattggatacaagccctagatcttagaaattttattcatgaataaatgctaaagttggttcttctttaccctgtgcataacttgggcaatatgctttcagctttgc

SEQ ID NO: 11000 - DNA, 9585 bp, Vitis vinifera
  Intron number 4 from transcript GSVIVT01020549001 (locus G SVIVG01020549001) derived from phytozome v7.0 (chr-ID chr1 2; pos 4577827 to 4587411 reverse strand)
agatatactggaaaaaccctcttaatagattgaaggtgctcatttccaaattcttacttgtagagttattttctgaattctttcataagaagcttctttctttttgtattgatgatgttttttgtcagcgattctgcatgccttcctgttgtaattttgataaataataaaaaagctttgtcaaaaagtatttgttcctatgccatggttgttcagttccatgtaatggacaattggagaaatatgataccatgaaagctaatatgtctaagtagcacttccttaaccacaatgctgaaaggacagacagcatttttgccctcagacctgatattatgtagcataacagagaaatggttcaggtcaatatgtcctagcctcctatggaaagtggaattgcatatgtgcagtcccaatcagcagtccctgttacctgtctgcccaatgttggatgatcttatccaaatggaatttgaacaacctggcaatctgtgattaaaaaccaagaagtacctgagttggggaactgaacatggtgtggacctgactgtatagggaaatgaaaatgagacagcaatcacaaaggagaaagaaaaaactcctttggtttactcaaaaaggaagcgggataatattacaatccttatctctccttcaatcgaccaaccttcatctccagagacaggcattgaaaactctcctccttcaaatcctatatctgaaactgatttagatattcctactgctagtaggaaaggttagaacttataccaaacacccattgtccaaccatatgtcatatcaccgtctatgcctcacctacagatctacaaagcctttacaactaacctatctctaaagtctatacccaacaacatacaagaagctctagcaatttgtaagtggagggaagctatgtttgaggaaatgagagccttgcataaaaatgagacttgggaagtggtaaagctgccttatggaaaaaaactagtgggatgtaaatgagttttctctatcaaatataaaatagatggttccatagaaaggcataaagccaagttagtggtgagggatacattcaagaccttggtattgattactaagaaacatttgctccaattttcaaaatgaactcaatcagaatcttgtagtccctagccgttaacataaacaggattcaacatcaatttgatgtgaaaaatgcctttttttttgcatggaaacctagaagaagtctatatgggtgctccacttggttatgaaaatttctccagtaaaaggagagtttgtagattaaaaatgttcctctatggtcaatctcgtagagcttggtttgagagattcggtaagtctttgaggagatatggttttactcaaagctaaggagatcacacattgttttctaaaccatcctcactaatgaaactgattgggcttattgtttatatagatgacataattgtaatggatgatgatgtagaggaaataaaaaatttgaagacccttttgaaatcaaggacttgggaactctaagattctttataggcatggaagtggctagatcaaaacaaggtatatctatttcccaatgaaagtatgtcttggatcttctacaaaagattaggatgactggctataaaccaataaagacttcgattgatcctaaccataaattaaaaccagtcaaagagagctggttgtccgagtagttcagactgcagcaactttctctgaggttttcgagaatttagctcgcttgctttctgaacttgatgtcttacttagttttgccgatttggcaactagttctcctactgcctacacaagacctgaaatctctccatcagtaattatttactaactatttgctgcttctgattcctctgatgggtgaatggtgatttcccctgtcaatttgcctctgtcaaaaagatgaagtgcaaagttgaaaggattattgtggagaaaaagtattttcaggtagagtttgaaggtttgaatggtggaacttgggtatcggtaacagagaggagccgaggtttcgtagtttcaataggatttgacatggaggagctggattggttgatggagcatttgaagaaagctgtggaggtggaggcttccaggggttttgtaagaaagatcaggggcaagactaagaccctcttgatggagatatgcttcaataacagagggaggttcatgaaaattacagaatttgttacaaaaaggaaacctttatttcttgtcgtccccgagggcgtcaaagggaaaggatgggaagatcttaggaaggcgatcctatcagtgcaagagtactctgaacgagacggaggagcttcgaaagagaagaatagtgatatccggatgaatagggacactttcagaggaggaaggtcatatgcagaagtggtggcagaggatggtttgaggactggaggtacgctgtcagctggaaaatgggccagagctgtaatatgcgaaagccaagaaaaagtccaagactggactcacgaaggaagagccattgcgaggatgatggggatgaaaggaatggtgtccataaaccccatttccgctttcaaagaatgcttctttgtgagttcaacaaggagagcggaaagagttcatgatcagggaagactttcagtgaaaggaaggacgattctgctaaggaaatggtcgcctaaggaaaatatggtggttcaaggaaagttcaggagaggctggctaatattgaaaggtctccctttccatttgtgggatgaagttcaattaaatttcattttgaagaaatgggggagggtaacgaaggtggcaaaggaaactttgaagttggtggacttgacgagggcgaagctgtgggtagagatgcttccaaacgtcgtgttactagcgttgcttgaggtggaagatggggaatggtcctatatagtagcagtttcagtcaccggagaagacgaagatgccgacgctgtcacgtctgagataaaccgtagcaggaacgagtgggtgagagtgggtggttgcgtctctcagccgtcaaaagccgcagaagggctacgaggtagcgttagggacattgagtgctacagaaagaggcgtcttccccgggcacgttatcggcaatcaaggacgtgtttggcggataaaggggagacaagagggggagggagcagatcgggccaaactgaagcagattttattgggctcgagcatgagtcctcttctaaagcccacaaggttagggcccaaagtgggatgaggcatcgtgggcttcatgatggcccagatgcccctcaagcccaccagtctgcatcggcttcgtccctttctccccagcgagctgcttcttctacaaaggcgatcgcgacgctctgtccagacggtgcaagggccggtgccgaggttttctttggtgaagaaggtcgggccgttgagctaaaggcccagttccttcccaaccctaggccattgtcagacaacaccgtgggctataagtttaaaggcccgtcggggttgggccaaaacgtaggaggaacgaagccctctggtatggaagtctggtcgcgaagggaagaaatcgaagcgaggaaggggaaagcccccgaggttcacatgagagatgctacgcaggaggaagagacgacaatttcaaagaagacgtggtctaccctcttccctccaagcgccgatcgacgacaggggcatcgatgctgcagtgagcctattttcacacgggcctcatcgtcgtcaagtgaagaccgcaacttggaagaggagtttgggatgggctttcagatggagcgaggaaacagagtgaatcctctctccagatgtcctctgtctggtattctttcgaaggaggacacctcggcgagccgcgttgaagtcaaaggagggctaacgagacgagtggggtttgatcctcgtggctattcagtcatgggttcaccttctaattcaataatcagaggtaaaggactcatctttgaggggttttgcgaaattccgggagccaaaaacttggaggtatgtcagccctcttcttctcagcctcccgagtcaccttcttttccttcctgtagtccggattctcctttgacgaatccctctggtccaattcttcccaatttagtccctcttcctcagtctcctacggaaaaccaaggcatctcaaaaaaattttatgaaaaaggtggtgttgactatttaaatcatggtgacatacctgaccatgttgaggaggagaaccagtgtgctttatctaaccagatgacagagagctgtaaccctaaggattctattgtcaggtcgcataaggaggtttcgggtgatttccttattgatggtctatcccccgggaaaatggccaaagtgcgagaggtattatgctctcttgacattaaggtgtattctaggaggaagagcagaggccccacagggcattgagacatgttggttctggctcggaaggttagggtctttgtgttctcccatgaaaattattagctggaacgttaggggtttgggttcaaggaataagcgtaggatggttaaagattttcttaggtcagagaatccggatgttgtgatgattcaggaaacaaaaaaggagaattgtgatagaaggtttgtgggtagtgtctgaacggtcagaaataaggattgggttgcttttccggcgtttagggcttcaggtgggattttgatcatctgggattcaaaaaatctgcgtagagaggaggtggtaataggatctttctcggtctcagtcaagttctctctggacggttgtggacctctttggatttctgctgtttatggtccaaacagtccctcacttaggaaggatttttgggtggaactttttgacatttatggattaacctatccgctatggtgtgtgggcggtgattttaatgtcataaggagaagtttagaaaaaatggggggttctagcctaactccaagcatgagggactttgatagttttattaaagaatgtgaattacttgacccacctcttcggaatgcttcattcacttggtcaaatatgcaagagtctccaatgtgtaagagattggaccgttttctctactcaaatgagtgggggctgctctttccccaaggccttcaagaagccttaatcagaaggacatcggatcactggccaattgttatggataccaacccgtttatgtgggggccaacaccttttaggtttgagaatatgtggttataacacactaatttcaaggagaactttagagattggtggagtgggtttcaaggaaacggatgggaaggtcataagttcatgaggaggcttcaatatgttaaagctaaattgaaggagtggaataagttttcttttggagagcttaaagaaaagaaaaaaagtattctcaatgatttaactaactttgacgccattgagcaggaagggggtctcaatcctgatttgttaagccaaagagcctcaaggaaaggggagctagaggaattaatattgagggaggaaattcattggagacaaaaagccaaagtgaaatgggtcaagaaaggggattgcaactctaagttttatcataaagtggctaatggcaggcgaaataggaaatatatcaaggagttggagaatgagaggggattagtgctgaagaatgccgagagtatcacagaggagatcttacattactttgagaagctttacacaaatcctacaggagagtcttggggtgttgaaggattagattggtcccctatttcgtaagtgagcgtgttaaggttagactcccctttcaccgaagaagagatttctaaggtcatttttcagttggatagggacaaggctccggggccagatggctttactattgccgtattccaagagtgttgggatgtgattaaggaggatttggtgggagtgttcgctgaatttcataggagcggaattatcaatcaaagtactaatgcctctttcattgttctaatacccaaaaagagtttgtcaaagagaatatcagactttagacccattagtttgatcactagtctctacaagataatagccaaagtgctctctgggcgtttaagaggggttctacatgagaccatccactatactcaaggcgcttttgttcaagggagacaaatattggacgcggttcttatagtgaatgagatagtggacgagagaagaaggtcaggggaggaaggcgtcgtattcaaaatagactttgaaaaggcatacgatcacgtgaagtgggattttttggatcatgtgttagaaaagaaggggttcagtcctagatggaggaaatggatgagtggatgtttatcttcagtatcttatgcaatcttggtgaatggtagtgctaaagggtgggttaaggcatcaaggggactaagacaaggcgaccctttatccccttttttgtttactttagttgcagatgtactgagcaggatgcttatgagagctgaggaaagaaatatgatggagggtttcagggtgggtagaaataaaactagggtgtcccatttgcaatttgctgatgacaccatattcttttctaactcaagggaggaagagctgcagactttgaagagtcttttgttagtgtttgggcacatttctgggctcaaggtcaatcttaacaagagtagtatttatggcatcaatcttgatcaggctcatctttcaagattggctgagatgcttgattgtaaggcgtctggatgacctattctctatctggggctccctttgggcgggaatcctaaggcgtgtggattttgggatccagtggttgagagaatctcaagtagattagatgggtggcaaaaggcctacttatcctttggggggaggataactcttatccaatcttgtcttacccatttgccaagttacttcttatccttatttaaaattcccgcttcagtggctgcaaaaatagagaggatgcaaagggattttttatggtcaagggttggggaaggcaaaagggatcatttagtgaggtgggatgttgtgtgcaaaccgaagacaatagggggtttgggtttggggaatatttcttggaggagtctcgctcttctagggaaatggttatggaggtatcctagagagggatcagctctttggcatcaggtcattttaagcatttatggttcacactctaatggttgggatgctaacactttagtaagatggtcacatcgctgtccttggaaggctattgctcaagtctttcaggggttttctttgattactcggtatgtggtaggaaacggggaaagaattcggttctgggaagatttgtggtggggggaccaacctttgggaacccaatatccaagactatttagagtagtcgtggataaaaacatttctatttcttcagttctcggtccatctcggcctttcttgtagaatttgaatttccgccgtaacttgtcagattctgagatcgaggacttagaaggcctcatgcggtctcttgatgatttgtatctctctccttcggtcccatatgccagattatggtcattatcctcttcagggcttttttcagtcaaatccttttttttagcattatctcaatcttctggatctcctcagaactttccttcaaagtttgtgtggaattctcaagttcctttcaaagtgaagtcctttgtctggttagtggcacacaagaaggtgaatactaatgatatgttacaagtgagaagaccctacaaagcccttagtcctgatatttgtatcctgtgcatgaagcacggggaatcagcagatcatctttttcttcattgctccttgacgattgggttgtggcacaggttatttcagttagctaagatggattgggttcccccaaggagcatatatgacatgatgtccatcaaatttaaaggcttcggtaattctaagagagggatagttttgtggcaagctgcgagcatagctctaattcgggttgtgtggtgggaaagaaacgcaaggattttcgaggataaagcaaggaattcagagttcctttgggactctattgttttccttgcttccctttgggctttctgttccaaggcatttaaggggattccccttaatgtgattcaactggattggatagcggtgtgtactccatagggattggtccttagtgggaggtcgtttgttttatgtgtattttcctgtaatttagttgtctttggtgggaggatttctcatccttcttcttgtacttcttttttatattaatatatctttgtggcgtttccaatcaaaaaaaaaaaaaaaattaaaaccaagcttaaagagattccaattgataaagggaggtatcaatggttggtaagaagactaatttacttgtttcacactagaccagatatagcatatgtcgcaagccttgtcagccaagttatgcactcatcgttggtgtgtcacgtggaagttatattaaggatctcgagatatttgaaagttacacttggaaagggattgatgtttaagaagaattatcattttcttgtagaggcatatacaaatgcaaattgggtaggatctatcatggattgacgggtcactacaagttattgcacctttataggtgggaaccttgttatatggaggagtaagaaacaaggtgttgtagtcagatcaagtgtagaggtcaaatacagagccatgggtcaaaggatttgtgaagttttgtggataaaaaccctacataaagagctaagctttgaacctaaagaaccaatgaagatccattatgataacaaagccgtaattggtattgcttagaatccagttcaacattatcaaaccaaacatgttgaagtggatagacgctttattaaagaaaaaattgaaggtggacaggtcaccaaaggagtggtgaccactaaatggtatttggctgacattgtcacaaaggactttctaaaattatgtttgactttattgtgtgcaagttgggaatgcataacatcaaagcaccggcttaagggggagtgttggaaaactgggcctgctttcttgatacttgtttctcttttgagtctcattgattaaattagaatcaattaatatttctatatatattctagaataggttgttattttaagagtaattgtagcgattgtctttgtaatacttcccttgtccagtttatttaagttttactccagaagggtaggtgtgtatattaaattcttgtaacctagttgatcaatatacaaaagtatttaattcaattctttcagtctttggctttgctccaagtaagaggaggaagcttattttttgttcttctctcttcatttgttcacctgatggtgcctattttatacaccatatgtaccttggtgtgtcttttgcataggcactgctaatatatatattactgttttgcctatttcccggaccttgcttgataacgctgattgattgcttggaaatgaagagttatttcaatatgtagtttacttttcttgtttgttataatgctacattctattgttgattttcaggtcattttgctgtccatattggttgctgatttgtt

SEQ ID NO: 11001 - DNA, 3290 bp, Vitis vinifera
  Intron number 2 from transcript GSVIVT01011930001 (locus G SVIVG01011930001) derived from phytozome v7.0 (chr-ID chr1 ; pos 2931159 to 2934448 reverse strand)
gataggtaatgatacccacttctcttgcataattcaattgggatcatgttctatagaaatagcaatatgaccattgactttgtatagtttttgatggatctctgttgcatctcagatttcctataaaaatctgaaatatctcaatatagtagtgtatagtttattcttagtttacttttggaattagggaagaaaaggtgttcatatggtagttatcattgtgatccaagtgtcagaattgcatgtttctgaatcatatccaaaaacccactctccttcaaactctataaaacaatcaccttaaatagaagtgttctatgcctctaaggatcttgaattctaaatttccattagattataagaatctgtttttcagttaattgcaatttctctaatatgttgcagccctttgactttcagggttattttgcttcctttgctttgctggactaaactgattcttaacaaatttttacagagtttatggcgtatggattgggcaaactaatcagatttctgaattgtgttactttattattttatgtaattgattattgatcctgatgtggcatcttcttctgggtgttactagttcaatccctagtcatcataagacatctaatcagttcatgttttgaaattagaacttgaaacttataggtggaacatcaaagccaaaggatttgagcaacagctttcctacacgcaacctgcaacttgaaaattgaaaattgcaactggtaatgagcgctttatacccttttagatgcatctcaaaattcatctaggtgagaaggggccagggagattgtatgcttctagtgttctttccttatctaatgtgatttcttatctgtactagttttgtcttcatttttcataatttcaaatgcaagatacttaagaataggagaacttgaaaattgtagtgaggctttgatataagaattttcacagagttagaagcattcaaaaataggaaaactgtaaattagatggaacaaccataaagggtttccaacctgcctggttgggtggctccatacttcctatgttcagggttaacccctttttggcatgttagtttaaaatttctattactcattgaaagaaaaaaacaaacaaagaaagaaaagaaacggaaggaaaaggaaaaattctcaaaggggtcggtacttcaaggcttagaatgttaggcaatacataaagctggttatgattcatgctcaggatatcagttttattattcattctgtatttattgactaaggaaaaacaaaagattgctttcgtagagagaacagtgggtttagaaaaggaagttggagctattagatataccaacttgatttaggatggaagtatatcttacatgagaagggctggaggagacgaagagggaacttcccatagaattagcttgtgtcaaggatgagttttgtgccttatttatttattttttgcaccatctatggataaactagtatagcatgtttggtgtaaggacccatgatcaatctgttagtgatatagtttgattcaagtgattataatgcacagctatgcagagatgttttagaattaaaccttcaggttgagtaggactaatatattacattaggtatggcttttctaatgccagatatcaatagtgggacaatgatgagtgaagaatcattttctttatctgagatagatttatctttttatacatatacaaggagataaggaaatttgaatcctgtactctgctgacccacccatttgagttatgccctctgtgcaaattggatcaatctgttcttaaaagataaaaccgatggctgaagttgactggcttttcaataatgtggcctgatccaaaataccaatcaagatgaggaaaaatttttagagatgcttcatcaatcaagttgaccagttatactttttataaagtgttggcaattgagaaacttgttcaagaaaatggaaatgcccaaggacaatcagaaggatgagtgccagcacagcacacagaaagatggaatgaaggaacatagacgaattgtcagcagaaggggaaataatttcttttaagtttagagtgatacaaagagtatggatcaagattgagaagatgtgatggcatatggttttctagatgatactagatagaacaaaagggtataatatgtatttttgccttccattttgtggccttgcatggtaaacaccctaccaacagtggtggagtcaaattttttgagggaagggggatgggttggcccaattttttaaaatagtagaaataatttttttttcttgcattactgataattataaaaattaagcatttataaataatccttctgttcatgtatttataatcaaactttcaaattttgaattataagtacaaaaatatgatatacaaaattaaatcattttaataaaatattatttattgaaaaaatcaaagttgtcaaattatacacagttatatgcagactgaaaatttttaaaaatcgttttcatgaaagtcattttgacaagaaaagttatagatatagattttagtagtttcaataatttaaaaattgctgaaaaagctttaaaatgttttagaaaattcaaaagaattttttaaaaaaaattaaaaattttctaattagtttttggtaatttttttgcatcaagaaatcctattaaaattttgaaagatgattatttcactaaaaaaactaggacaggaaattttagaaacagtctttgtttgtaaaattctaaaagaacttataagttataaaagatttttaaaatatatatacaaaaatgcacaaataataagaaaaagttaaataattgacaacatttatcatggatgggtgatgggcatcatgacaacaaaaataaatcagtttggaacatttaaatacattgtgaggaactttagcttggtggtaacaaagtttggcatggtataatttttctcaggttcaggggaagggagagacctgccctctcaggccccagttgcatctgcccttgcctaatgaattctgaactgctgattctaactaattttatctgcacaggcatgcatgctggttgctggtgaatggttctatggttattttgcaatacaactagaactggatgcatttctgttttcttaattttttttgttcatgattatgtgttacttgccctctcaaacatatagacacacattctgaggatagtggaatgagaacaatcactcttctgattttctctttgtactcttcttctatagacttccatttagc

SEQ ID NO: 11002 - DNA, 3891 bp, Vitis vinifera
  Intron number 11 from transcript GSVIVT01035313001 (locus GSVIVG01035313001) derived from phytozome v7.0 (chr-ID chr 4; pos 369633 to 373523)
gcacttaccccgctacttacaagcatagcgagaaggaatcagacaatgaggatgacgataacttcatttgaaatttacaacttgtaaataagtgtaagaaatcttgtaaattaaaggtggtagtgatcctaggaagtgtgtttagcctttttataatacttaaaaaataaaaatttgcaagtgttaaaaaggttaaaaatgttgttggaggtaccaagtatctgcatatctttaatacaccacctcccaaataaggtaattggaaatgcacaaaatcacctcatcccaaaactaggaccataaaagaagacgacctctcggacctatgggatgacctgactgattgacctatgcctagaaaaacgaatccaactacccgtctcctcatgtgcccaaaattcaaccaggcctcctaatatgctgcaaaaagccactccttcatgatccttcacaaggaaaagtggttataaaaagggagcctcttcctcctcaaatgactctctctctcggcctctaaaagaaagctgtagaaaatgtagaaaatgcatttctatacccggaaaatagtagaatgaaatctccaatattttccttgaagaattttggattcttcattggcattgtatgtgggaaatctaaacaaaaagctataatggaggaccaagagtgaagtttaatcagtccaaagggattggatgtcaagtctatctttgttcaacatccaacatcttccactataagcaaaaacaactgtaagagcatcaacaacaaaatcttctaggggagttttcttttagttttttcttctccttttataaatcttcctttaatcactttttttgtgtaatattcaagaaaatgtaactctgtagctttaggaaaatgagcaacaaacctctcgattatctctttattttaggtttttctagtaccacttgtgattggttgttccttagaattgaaaacaagcaaatatggatcgaaatagcaactcacaagcctttgtttcatgctgagcaattcttgaatattatggagttctagggaaacatgtccacttgcaatctacagctcaaagtattctcctaatgaagtgtaaaaaaatggtcatcctcatcataatggactaaagtatggtatataccgctatcatcaaggagactttagcaaatgagtcatagcaagtacaagagggtcatactctttgctcttactagcaagcctagtcttgtttatattaaagctcttgatgcaaaggcatatcaaccccacacctgtaaatgaggtagaaatatttgtatcaccatttgattgttcgccttgacctaatcatccaacatggaagctgatcattgggatcctcaacgcttgtgaataaaaaaaaatgagtaagatgtgtcaacttcatcaacttcatcaacaaacatcatatccttggcaaaagtgggaatcaaacataaagagtttttcttcctcgccattcctagggaagatcaagacctaaacccactcatagacactcttatatcaaatactaagaggaatcatgtgatccttcgaagacccaacctcatcatgtgcagaattgggtcatcaccagctaagccctgatcaatgtttaacacttaagtgaaatagaagacaactaagtacaaacaaaaagaaagctagcgacaagcaaagaaaccacttaaaatgtcaaacctagacaagccaacgtcctcaacttaagctacatttagttggaactatttgattgaacgtatggcatgacttgagctcaaagcaaaagtttccacacgaactttcgatcaagctacttactccagtatgacgccttaaacaagactttgtaatacaaaaccatatctcataattgcaataccggctagaacaacagcaaaataagcatcaacaacaaatggaaaatatcccagcacgccaagacaacctcatagatcaactacaaaacaacctagccaattcacagccactaggctaaccaaattgacattgggagaaaagtgcaacgagttacatgcatgaagccccatcaacctgggttaaccaaaaaaagctagccatcattagcacattatttgagatcgttacaaagtcctaccctcttctagtcatagaagatgttgggacttgggagggactggaggtaccaaaaattaacatatctttaatacaccacctcctaaacaaggtacctgaaaaggcacaaaatcatctcatcccaaaaccaagaccataaaagaagacgacctctcatgcctataggatgacatgactacaatcttgaagttgtacttctatagttgggccctaaaagagaacccaatagggaggaaaggcagcatataaaccttgttcaatgggcatggtagcacctttaaggaggaaagccgtttgtgaaagcattggatgagaaaatcgtggcacaatgctacttcaaaaaaaaatgagcactatattcccaataatcaaacttaatcatgaaaactttgaaaatagtgagaattctcttacctacaagtatatacggaaagtaaataaatcattaatagaacttaaaataataaattgagcaaataaacatatggtaaaattggaactcatgatcctcctactaaataataccatattggataactaaattttttaagaacttaaacataagatttggatccttatgattgtgtatcatcctttctaataatatattaaatacttttctagattttgtgttgacttgtgattacttctctaaatcaattttagcatcctatatatatgtatttgttaggatgaatcaatttttcagaatcaattatcaaagaatgcaaaaatacaactcctcatagagtctttggtttttcctctacaacttaattagataaacttaaaagaagtccttagtgctttcacaaagaaataggataattttttttatcttcaaacctgcacaaagatatggaaaccatatcattgaaataattaaaacagaaaacaactagaatcaaagtgctattgccttatttaaaaaaaataaatcttgggttttatgcaaaactaaacattagttgcctaaatctccttaattggaatactagatgggtgtatcaattcaactcgacaccttcttccataaataccaaaaatgatatttgttttgggaacaagactagagttttgagcagatataatatatttatgaaaataaaataaaataaaatagattttaaactaaaataattcccaagctagtacatttcagctatgtgtgtatccgtatggcgtgagaatgttttttttatatgttcttttatatcacaactataattagtaactaggattttgattttttttaacataaaatcatagttagttattataattttaaatttatttttaaaatcacagtcatcaactatagttttaagtttaaatttaaaatcatagttagtaactattattttaactattttccaaaaaaaatcaaaattataattaataactacgattttatgatatggatacacatgtagatatgaaacactccaatttgaaaattattttgagaggggatctactttgtagatttttatttcactttctcccaagaatactatacttgtctttattgactaattagtttaattagagatcatccaagaaaaagaatatcacattttatatttaaaaaaaaagtattgaatatattagcaagatatcatcctcgaaaagttggaaatgtaatcttgtacaatgaaaggaaacaagtgagagtcttaaataaattgtttctaaaagagacctaatgaccaatgtctttaggggtgaatcctttatgtatataaataagtaagacaaggccttgctttc

SEQ ID NO: 11003 - DNA, 12545 bp, Vitis vinifera
  Intron number 1 from transcript GSVIVT01003151001 (locus G SVIVG01003151001) derived from phytozome v7.0 (chr-ID chr3 ; pos 6199269 to 6211813 reverse strand)
agaaattagcttcttctttttttttttcttcatttgtgagatttaagattacttttgagagcgagtctccaattcttagtacttaaaagtattttcatgacaaaaagagatatctaataaaaatttaagaaagtgggactaactagtaaaaagtattaatttctaaaagaaattaaggagtctttggtcgcgtttcttaaatttgtttttaaaaattgtttttaagttaaagaataagaaacaatttttaaaaacaagttcaagaaaatatgtttaaactggcttatgtttttattttatttttaaaaattaataaaaataattcttacttattctttaaaaattattctcaattttactttgttttttttaaaaaatttcaatagaacaaccaccaacaatttttaaaaatagtttttttatttttaaactgtttttaaaaacaaaaactgtttttaaattatatggtcaaacatgctttaacttttatataaataacttgtaatcaaaacactataaaattacatctgcaattaatacacttattcaggtattaacatgtaagaattcatatggaaaaaatatgctaaagtagaggtggtaaataactaaaattcattttattaaatcaaaagtgtatatttggaagtgattccaattaaaatgcttctatttatagtgtttttattagtaacacatctattaggaatgcctttaaaaatgattgcttaaacttttcatataaattgaaaagcctttcaaagaattatttatcaagtgattatccataaataatttttagtgattcttcgaatattgaaattttatattagaggaaaaaaaatcgtaatcctttttatggtcataagactcataacagactttaaaaacctcttttaaaaataatattgaaaagattcaaaatacttcttaatttgaaggatttttgtttgtttgtttgtttttttttttttttttttttttgaaaaaaaggcacttcaaaccctcattaagctttaacccttggcttgtggtaacccaacaaaagatggtcttggcctttggaatagtagtaaggtggggatggtgttttcaatgaattaaagttaaacatcatatgtttgtcttatcaggtgttgggtggtgagtggtgaaatgaaatctagattatagaatgccccaacatagaataaattccattttctttggattctcaataagatgctttggcctttgggaacattacaatattacactaatacatcatgttattaatctactttatttaaaaagaaaataactttggtatgaagcatcttttgtgtggcattttacatttaaaataattttaaaattttacagttatttctcaaggtggttgtgatgattttgaactcccttctatgattgtgcacatggagtgcaaaaagaaaaaaaaaaaaaaaattctttgctcataagcaactgcttgatgatatagagcacccaattcttcattccaagtaatgagaagttttcaagacgagggcaaagatctttattattattattattattattattataaaatattattaattacgaataaaatgttttatacccctgacaaaatgaataataatatcaaaaataaaatataaagaaaaaggggatagaaaaattgtaaactcaacatttttacagtggttcacgcaacttatttatatccattatccttcaacttcaatcaagaaaagagtttcaatatactaaggttatgtttttggttcctggaaaatactaaggaaagaaaaaaaatgaaaaggaaaattattttttcatgtttgattgtcatataaaaaatatcaaagaaaatcaaatataattaaaactaattaaaagcttatatatttttaaattatttaatctttatattaatgagttaaaataaataaaatgagtttgaagtaacaaaaaaaataatttatcaatttttaatctatttttttattttccttctacttttcctttgtattttctttcctttacattttccttcaaattttctaggaaccaaacatagcctaagggtttcaattgaagcatccaaactttataattaagttatgtttgcaatcaaccatattggattatggtctcatgaaccttttacaaaaccattaagagatcatacttataaactcgctgaataatgtatcattggaatccctaaagtattatcccacatttgagctcacttcacaccgtttacaaaaaaatgaattaataatgataaactcttagtatataagttaaagattaaataatacaagatcaactagaattaacgagcaataaatagatatgcaagtttatatataaatgaatgaaaattaatattaattattggaacttagtaaataatagttaatagacctttatatatgaataaaaaaggacttggtcaaccacctaacccatgcatgcctctaagttgagcttgtttggcaaaatttaatactcgtacttaaagttagttgattccatgcttttttaaaaacatttttcatcatgaaatacataaattaaagatggttttagtatagaaaatactccatccaacttttgaaaagatttaaaactaattggttgcaatgagatgagatttggagtaatggatgctttaaagaacataagcatgcaatcctaatttagtacatccaaagagtcatacataagattaagcttgataagtcttcttgaagtgcacttgatctccttttgtttccatttttagccttcatgcatctctttcttaattactccatagaaatcttcttactacaaatcatctccctcttcaatcatactttcttttatttctttgagatgggagagacacatgagctttggcaaatggaacgatgagatttttttgaacttatacatttaatacaatcatgagtgtctttaatttttgttttattatcattaaaactgagattaaacaaactttagtctaataaattttttttttataaataatgttggatggatagagttgaaaaaggacataaataattaacaaatgaagaattatttttaaaactatacatatcctctcattcatcaatcattatataatttcttatttataaatattcacacttaaaaatatagacttttaataaaaaaaatataaaaatattgtaggacttatgtgcttttatatataaattaaatcaactactcaaactacaaatatttgaaattgatattttttttcaaataaatcaaattctaattttttttttttaaacttccaaaacttaaatttacttttcaacttctcatatttagtaaattatttgacagctaaaacaccaaccaccctatgggtgtttacacccaagaggttactagtttgttttcactctatatatctgattttttttttctcttctacttgaaatctttttatttttaaagatattaaattttaacatcactctctttcttttatgagtctttctacttattataattaataatcatctatttttttcctaaagcagttaggtttccatgtatcaacttttgatcatatctattatttttagatttgtaagttatacatgtacaaatgatatagttaagtttttatataaaaatagaacatttttgtataaatttatcttatatttttaaattttaaaaatacctgaagaatttttttttcattcattttttatgaaatttccattaatatatagtttagaatcgaattcacttcaaatgaaaaattagttagagatgatgttcacaatatgcctaaaataaagaaaacaaaaacaaataaataaaaataaaaaagagtaaacaaaaacaaatggactcatggctgctaagcccttgcctatctaaaaaataatggaaaaagcatcttataaatttcttctagaatatttttttattgaattgaacaagttgtcttagttaagataaatttgaacaaacctataattaaccccaaaaataaaaatttctacgtgtatacattgggaggcggttcacaaactcctagggtcatgtctctaggaaaaaaagaagtaatttcttctttggaggtttcccatattgttgcaaactgggcggtaggttacctaataagtaataaccaagagtataagtcaaggtcgcaccctcccaagtcctctacacttacttccattcattcaaatgccattactaccaaagaataagtgtggtcaccactcaccaacccatgcccatgctgtagggccttttttaacttctatcggaaattgtaaaaaaattcttgggtaattgtaaaaatactgaggaatctctataacatagttttaccgcgtagaaagaaacaccttttataattttcatcaatcatacattaaaaaaaaaattaaatttattctaaagatttctcttgaaaaaatatttttcataatttttatatgaatcatatattaaaaaaaaaattaaatttatactaatgatgtctcttaaagatacacctttcatatttttcatatcaaccttacgagaaaaaataaattcatattacttttttgtcaaaggtatgattgatataaaaactatggaacatatcttttcaacagcaattttcaatgtgtcgattaaaaatatattttaatgtgttatattttaaaaaattaattttaaattaaccccatattgtggtcatcccccttttctttatcatatattttcaatggtggagataacatatatatatttcaacgggcaactttcaatatatcgattaaaaatattttttaatatgttgtattttaaaaaattaattttaaattaatcccatattgtggtgatcaccttcttctgaaaattctttaagaccgttaattgagtttcggaaaataagatgatatcatatatatattggtcttgttctttataccaaaatccaagtttgtagacctttatctttatcttttatcttatattttcaatggtggagatgacatatttgatcaaggtacaacttgggtaccctcgaaattttcatctaaaatattcaaagactttgctgggttgtcacccacctaatcaaattgaaaatggcgtctgctgtctgtgggatactccatatggcaagcaatgatagtgaaagattgagatgggtttggtggttaaatgtcacttgccaacacatcacctttggattaagcaaaagctgagtaaggcaaaagactttgtatttggctgagattccaacccctccagaagttaggtatcgatggataggtgtcgtttggccatgaagatcaagcctaattctttggttgaattattttcagatttggagaaaatgacaaccataaattactctccaattattgtggttgttgttaattacttcttaatagtgtggaagtttttgaaatgtcaaaaataggatttttttttttaaatttttattttctccaaaataatttattttcaaaaaatgtttttaagagaattaggtttaagagtttgaaaatgatataaaatggggaatactaattataaatttggctagaaaagtctatgaaaatatgaaatgtgagaagaccaaaagacttttctttttttctttttccatattttgtcttttcatttttttggattattctcttttatgtctctcaccaaccacacattttttttatttatttatcattatttttaatcaaataataatattaacagttgcattaatattatatatttaatactattattaaataaatactatattattattattattattattattattattaaatatttattattaattttcacaaaagcagttgacttgaaaacagagtggcctttgaccttaacggccttgtcttgaaactattgttcaaactacccttttttttttaatttgaaactgtatttcttccttcctccaccggcacacctatcaccacatatcactgcttgtttgacccagcgcccacaacgtcgccgttggttactcctttcgccacctcctccggccggctgcacccccttcctttcctatttctcattttctttttttctccctctccccctccaacatacccaccatactcatttttcctttcctccatctcctgctgccactcactgtcggccaacaactccatgcccgtcggtgccgctcatggcgcgacctgagctaacaatgcccgcagttgcccccaccgagacccacacctccatcttcaattttttttaaataataataataataataataaaagatgaaagatgagagagaaacagaccattttaaacaacagtttcaaagagttcaagatgcacatttgtttagttacaaaggttattgaagaatttgaagaaaaatatgaagaatttgaaaacaaaatatggaggaacacctcaattcattctatgatacctttctttacaatgaatgaaagcataaataaatagcctacggatatgagacaattccggaatggaatttcccttacatggaaagtgaataaactcttacatgggaagtgaataaaacatggaaagtgaataaactaccttgctagaattactcctaaatatataaactactcttacatggaaagtgaataaactaccttactagaattactcctaaatcaattataataaaggttgtacattacactaattagggaagtaaacagaggatgctggcttgatttccaacactccccctcaagtcgcgttgtagatgttgatcattccaagtttttctgtcagatcttcgaagttaacttgagcaagagcttttgtgagaatgtcagccgtttgacagtttgtcggagtgtagctgactttgaaaactccttcttcaattttttccttgataaagtgtcgatctatctccacgtgcttagttctatcatgatgaaccggattcttagcgatactgatggcagcttgattgtcgcagtataacaccatgggatgcttcaatggaacccgtaattcttctaacaacctgttcaaccagattccctcgtagataccttgtgccatagcacgaaattctgcctcagcactgctacgggctaccactgactgtttcttgcttcgccatgtaaccaagttcccccagacaaatgaacaatagcctgaagttgatctccgatcagtcactgaacctgcccaatctgcatctgaaaaaatctcaatctctttatttgttgttctttgaaagaagagaccctttcccggtgtcatcttgaggtatctcaatattctgatcacagcagtcatgtgtttttcggttggattattcatgaattgacttaccacactaacggagaagccgatgtctggccttgtatgagaaagatagatgagtttccccacaagacgttgatatcttcctttatcaactggcgcacttccatcactttctttcagtttgacagttgtatccataggtgtttctgccggcttgcatcctagcattcctgtttcattcaataagtccagaacgtatttgcgttgtgagactgctatacctttctttgacctagcaatctccattccgagaaagtacttgaggtttccaagatccttgatctcaaattcctttgtcagtaattttttaagtaagtcaattttctcttcatgatcacctgtcaaaattatgtcgtccacatatacaatgataattgccagtttcccttctgggaagtgtttcacaaataatgtgtgatcggattgacattgaacgaatccgtaccctttcactaccttagtgaaccgttcaaaccaggccttgggagattgtttgagaccatacaaggattttcggagtctgcaaaccttgttgaaatttgatgtcgtctcaagtccagcaggaatgtccatgtaaactttttcctctaagtcaccattgaggaaggcattcttcacatcaagttggtgaagcgaccaatcgagattagctgccaaggataaaagtacacgaacagtattgagcttggcaactggagcaaaagtttcttgatagtcaatgccataagattgggtgaatcctttggcaaccaaccgagccgtatacctgtccacattaccatctgccttgtactttactgtgaaaatccacttacacccaactggtttcttacctcttgggaggtcagtaatttcccacgtaccattcttttccagcgcccgaacttcctcatcgactgccgccttccacttaggatacttgaaagcttcctgaatattctgaggaacttgtatctctgtgatgctagaagtgaatgcacgaaacgtaggtgatagcttatcataagaaataaaattttcaatgggatgctgagtgcatgacctaactcctttcctccaagctatgggcatattaagaatatcattttctaactcggaatcaacagtaccatcaggagcgttgttacctggaagtttgcttggattaggacccggttctgcctcatgggtttgttgagaaagtgctctttcctccgtttcctcttggatgtgctccttatcccacaagtcaacaatggactcgggttgattaaatgactctggaggaatgtgattttcagtggtgatgggtgactcactgaatgactcaagatcccaaaattgatattcctgagttgaattctccccctgaatatcgtttttgggatagtaaggctgggtttcaaaaaaggtgacatccattgaattgtagaattttcttgtgaccggagagtaacacttataccctttttgatttgaagaatacccaagaaagatgcacttgagtgacctaggatcaagtttacttctatgttgttgattgatatgaacaaagacagagcacccgaaaattttgggtgggacggtggagatgagacgagtagtcggaaaggattttaggagtgtttgacaaggtgtttggaattttagtaccctagaaggcatcctattgatgaggtaggctgccgtaaggacagcttgcccccagaataattttggaacattcatggagaacattagtgatctagccacctctaacaaatgcctatttttcctttcagcgattccgttttgttgtggggtatcaacacatgaacttaagtgaactatcccttcttgtgctagaaattctcctagaatggagttgaaataatccctagcattatcaaactttagaatttgtatttttgactggaattgggtttgaatcatatttttaaaatttttgaaaatttgactcgtttcagatttttctttcatgaggaatacccaagttaatctagtgtgatcatctatgaatgagacaaaccacctagtaccagttacattttttattcttgacggaccccagatatcgctatgaatcattgagaatggactagactctttatagggttgaatgggaaaatgagatcggacttgctttgataattgacagatttcacactcaaaggattttggatttttattaaataatgaaggaaataaatgcttgagatacataacatttggatgacctaagcgatagtgccacaacctaattgcactatcgttattttgacatgaaaccgaaaaagaattactaccaactgtcatttgaggttgttcttgtggatcgtggcgctccttaaggatgtagagtccagagcattcctcagcattgccaatcgtcttccccgaatccaaatcctttgtgagccaaggttccggaaccaatgacctggttggaagatgagccagtttgtgactgtactgacaaaagaggagacagtagtttctgaagcatctccatctgatgagaggatgaagacaatgagatgatgatatcagaagtagaggatgatgagttggtagccattccaaaggctggatcgtatttaggcataaattagaagaatagaattgagtaaaaaaaaactgactaaagatgaagacgatgagataggattaaacctgctctgataccatgaagaatttgaagaaaaatatgaagaatttgaaaacaaaatatggaggaacacctcaattcattctgtgatacctttctttacaatgaatgaaagcataaataaatagcctacggatatgagacaattccggaatggaatttcctttacatggaaagtgaataaactcttacatgggaagtgaataaactactcttacatggaaagtgaataaactaccttgctagaattactcctaaatatataaactactcttacatggaaagtgaataaactaccttgctagaattactcctaaatcaattataataaaggttgtacattacactaattagggaagtaaacagaggatgctggcttgatttccaacagttatttttaacccaaactccaccatgatcccatgttgcgcatgtcagcaagaatacagaaagacacatgactttgtaccactctcatcttttggtccgctatctaaagacttggtaacctgttcacatcaattacaaagtgttttctacatcatcccaaacgaaggctaaagaagaaaaatagtcttttatcattcattatatatatatatataagcacatctaagtaaactacttccttcccatggcagcagtcagtttcaattttccaggaaaaaatgaaagcagaaaagaagggaggagggagtaatacagatagaaactgacaagaagaaggaaaatcattgcattcaacaagatctattgatcgatgctcctggctacaaaaaccttttctttttttttttcccgcgactccagttggttgcaatgttcatttgcagtgacacaaagcctacaaagaaagcaaagcagtaagaagctttttcgtgcggtgatcccgttttttttttctttaacatgtaagagaaccaatcaagcattcatcaaacccttctcatgttcatgaaacttctaaactagttccctctcaagtctcacctttctgttttataataaaaaatggtttaaaatttaaaattgtcatgaatatcgctctaaatacaaaaaataaaataacattatataaaaatattgaattttttaaaaccaacttgacatcaagtatgattaaatagtacaatattttgattgcactcactataagaaggtgggtttttggttgtggccaccaacctcgactaaaaggaagctttagtactgcaactataggatatgagtggataaaagaaaccacaagtagtcatgaccatagggcatgcggagaaatgttatggttgggttcatatgtaaaagcgtgactaaaaatattgaaattatggctgcgctcacatttattccacgactaacagtagtatacagctggggctttgttcttaccgtgactaaaggtgggctatagcggcggctaggagtggtcgcagccataaggttgtaaaatatataaataatttgaggtctagtgcttataggtgagagttatttgtagtcataatcatatgtgctaacacggagatggatatgctttggccgctaatttaagtcttgatatggatatgattttttacttggctattactataggctatcatgtggacaacgtaatggaggtaatggctaagtgaagaatgttacccaaagacagcctactaaccatgaaaatgatggttaaagaatcatataaaagaaataataccttcttttttttattaaatataagagtacatatgtttaggcctaacatagaagcttaatcttaattatgctgctgtgaatcaacttaatattgttccattacatacaaaaagttgaatcaatcactccattacatatgtagttcaaatcaaggcccacacaatgtttttttgcaactttaaggatactaagtgagcccacgcaatgtttttttgcagcttcaatgatactaagtgagcccacacaatgttaccccaaactgcaccaaaatcaagctcatatggcctacaaaccaatgccacttaattaggataccaccaaatacattgaaccacacatccatgacagtaaaggaaaggccatgcataacatcctattgcctaccactatgtatccaagagacataaactcgccagatgtatttatcaagatattagcatctataaagcacctaacccccatggagctgcacaagaagctagccaatagaaacagtgaggtagaaacatactttagatggaagattaggccagagtgcgacctgaaaaatctacgagagaaaaagctagcattttctcaatagagtagaaaatgctatcagaggagaattcttagaagaaacttggaatatcaatggacaaagagattagaaaaaggaaaaaatacaaataagtggaaactacaaattaaatctcgagatatgtatagtctatatgtataacaacataatacattgaaagaattaccgaataaggcaaataattaaaaataaaataaaagtggggtgaccaggcctcatgggttctgtttaaaaattcaaatggaacttgtatatgaggaaagc

SEQ ID NO: 11004 - DNA, 10190 bp, Vitis vinifera
  Intron number 13 from transcript GSVIVT01014047001 (locus GSVIVG01014047001) derived from phytozome v7.0 (chr-ID chr 16; pos 10006311 to 10016500)
gctgaatttgaccataaggtttggttaaattcttgaacaattttcttttgtgatgtatatagtttgtttaatgttgcttttacttgaacacagcatattgagctcaatgagaactcatccttccatttcattcagttccttaggtaagttaaagagttaaatttttctaaagcagggtttttaaaacagagggatatcatgacaggacaaagaaattgagaggaaagaagatgatatcagaaaaataagaaaattagaaagaccatcaccaagcttgatatcctcttcccacttacattatcattagtaacaaaatcattattagtccctcttgttttgtttggcatattggttatggttaaaaatatttgtgctcactggtatggtgagaactttaggtatggaaggagatggtagaatgccaatacagattgagaggtgggatgctgttcagttcctcatctttccagaaatgcagaaattggtttcactttggttttctaggagtctatgcatgaaatgatgatgggcgttgaaagaggagctgatagcagtaggagggtgatgtcaggatccgttcgtgggggaggatttctgctgctatggaacttactaagagtgtaacaagtcttgtcacctttgtgatatgcctttgaagggagggatgttttgggtggcctcaatacccacaattgtttattttcttctagcttctaggtaggaggatttctcaggtcgctgcagatctaataggtgatccaaagtttgcacttggtgtcaacttctaattacattgatattctcttgcatgttgagagttgttttggtgggaggagtccgtttcaaattttgaaatatgtggttgagggaggagtattttgttgcttggatgaagaagtgctagaacatgtacatctttgagcaatagcattgctttttgttggctgcaatgttagagattgagtggggaaagtggaggtttgcggagagggcaaccttgtcttttcacatgctctttctttttcttttttcttttttatacatataaaaaaactagggtatagatttagtcttcaaaggtgtacaaatagaacttcccttattggaagagtatgattagtagtacatggttttgttagattctaatctaattaaggagggaaatcatattcccattgggaaatgcatcttagtcttattacataataaataaataaataaaagtctatataaattcatgtaattttttgaagtctatataaacttttgtaggtttttcaaatttattaagtgtttttagtagctacctagcttctttgaaaggtgtaatttccttttccttagtgtgattatttaggaatcttattgtgattgccaagaattattttctcttgcatccttgatctcttttatctctgaaagtgtattctttacggaactacctagagaattaggaggggaaggggaggttgaataggtagtctaagcttttcaatgtctaatttaaaatttatccaatttatttgtattccaattaattcaatatcaatttgttcaaaccaagaataatcggaatgtcaagaaaattaacctaaaatgatatatacaagatatctatggaccacctacaagtcttggtagaaaccttacagatgtaagacccattggtcaaatgatcacagatgaaatccactgaatatgaaaagagggtacacagttttatttggtctggatgcatgtattcctaggatcttataccagtcagtacctatatgcttctttaatgttcttgatgcaacacttaatactccttggtaaatcacctcaatcctatatttaggcttgcaaattgaggcaagaccttgcttttccaccgaaaggacttacatattttagttcctgaaagatttgagatttaaaagattggggtggaccaatggctatatcttcaatgtatgcatcaatgttataagttcaaaaactgggttttatgagagaaactgtagaagacttactcagagtggatttgggaagtgcaaaattaccaaacaggaattttaagcattttaaaaaaaaattgtgatttcattgaaaaaaataatcgcatgtggggtgggtttgtgtttcaacgttcccctagtgggggcgttcaaatgctgaagggcattcagaagtcccttaatatattcttggagtttcagcacatttcatgttttctcgccccaattttcaatttccatttttacttgtgattgctatgtcatttaccttcaaaaaaaaaaaaaaaaaaaaaagaaaaaagaacttatatagcattgaaaaatttaactgtttgcattgaacttgttgttggaccctaccatggcaactagaaactattagagttctaaaacagaattgactgatcaaaactgtggggattcccctctgtggattttatatttttagagactgatgattttcaagaagcaagcaatgatctttcttcattgaaaaaaaaaaaaaaaacaagacaaactggtgagacgtattcttcctgcattaaaacaaaaaagtgaagatgtgtagcttacctccatcagtgcgggcagttgcataaatgtagtatccaaagctaccattgcaagcttcaagttgcccatgaagcaacatccttaaccttgtaaggtagcatggattatggtatttctattttggtaacaaaccaatatttggtttctatttctcatggtcattgtaatgattcatatggtgtgatgctatccatatgcttcttgcacatatttacttggttgacgttggtacatccttaagtgaagcaaaacaatgttgctgaaactaaaaaagaaagcctttgttcattcttaccaagttgttttaaagggatgctaagaagaatgatgttgtgtatgcttagtcaaaagaaataaagatccagttcttgtatcacctcaagatgtagctccatgtctaaattgttatatgattttcaaatgttgcactagatattgtgttgtcaaagacaaaaggtcatgccaaggcgataggactcttttttgcttgagttgaaaatggaaaagaaggaaataatatgagcatagcaaggtgataaagagcatacatatatttacctaatcctagtacttagtcacccaatcttatacttaagataatcttcaacaattaactatgaatttttcatccctcatggtgtcttctataatcaacaagatagtaataatagttcaaaatattaaatacaatgataccccatatcataagaagcatcatattctctacataaattcattttgttcaaatgcatatcttaatttcccaaacatctaataatcaaaataaaaaagaaaacaagagaatgaacatcctcgaaaagctttagactttatcatcatatcattgaaattcaaattatcatcactttcattaatagtagactgaaaatcctccatttcattgccgatagtcttggaaaccaatccgttcaagtggggcccaacaccgtttaggtttgagaatatgtggttgcaacatcctagttttaaggagcgctttggaagttggtggagagagtttcaaggaaataggtgggaaggtcacaaattcatgaggaaattacaatttgttaaggccaaattgaaagagtggaataaggcttcttttggagagctaaatgaaagggaaaaaagtatcctgtttgatttagctaactttgataccttggagcaagaagggggtctctcccttgaacttttagtctagagagctttaagaaaagaggagttagaggagttgattttgagggaagaaatacattggagacaaaaagctagggtgaaatgggttaaggaagggattgtaactcaaaattttttcataaagtggctaatggcaggcaaaataggaaatatattaaggtgttggagaatgaaagagacctagtgttgaataattcagagagaatcaaagatgagatgttaaggtattttgaaaagctctacgcgagcccttctgaagagttttgaagagttgaaggcttagattggtccttatctctggagagagtgcgtctaggttggaatccccttttactaaagaagagatttctaaggccatttttcagttggatagggataaggcactggggcctgatggctttaccattgcagtgtttcaagattattaggatgtgatcaaagaggatctagtgagagtgtttgtagagtttcataggaacgggattatcaatcaaagcactaatgcttccttcatagttctgttacctaaaaaaagcatgtcaaagaaaatctcagactattgacctattagcttgatcactagtctttacaagataatagtcaaagtgttagcaggatgtctaagaggggtacttcatgaaactatctattctactcaaggagcttttgttcaagggagacaaattttggatgcagttctcatagccaatgagatactggatgagaaaagacgatcaggggaggaaggagttgtcttcaaaattgactttgaaaaggcttatgaccatgtgagttgggattttttggatcatgtgttggagaagaaggggtttagtcctagatggaggaaatggatgagaggctatttgtcctcgatatcttttgcagtcttagtgaatggaaacgctaaagggtgggttaaggcatctagaggtttaagacaaggagaccctttatccccttttttgttcactttaattgcagatgtattgagcaggatgttgttgagagcagaggaaagaaatgcttcggagggttttagggtgggtaggaacaggacaagggtgtcccatttacaatttgcagatgataccattttcttttctagcactcaagaagaggatatgtggtcctcaagagtgttttgctagtgtttgggcatatttctgggctgaaggttagccttgacaaaagtaatatttatggcattaatgttgaacagaatcgtctctctaggttggtcgagttgctcaattgcaaggctttagggtgacctatactctacatgggtcttcctttgggagggaatcccaaagcttgtggcttttgggatcctgtgattgagaggatctcgagaagattagatgggtggcaaaaggcgtatttatcttttggaggcaggataactctcattcaatcttgtctcacccatatgccctgttacttcctctccttgtttaagattctcgcctcagtggcaacaaaaattgagagattgcaaagagatttttttatggtcaagggttggggaaggcaaaagagatcatttggttagctgggatgtagtgtataatccgaaggcgaaaggggtattgggatttggaaagatttccataaggaatttcgctctcttagggaaatggttgtggagatatcgtaggaagggtttagctctgtggcattaggttattttaagcatttatggatcacactccaatggttgggatgccaacactatagtcagatggtcacatcgttgtctttggaaggctattgcacaagtctcccaagagttttccaagtttactcggtttgtggtaggagatggggaaagaattcggttctgggaagacttgtggtggggggaccaacctttgggggtccaatatccaagactacttagagtagtcacggatacaaatacttatatttcttcaattctcggctctacttgcctcttctcttggaactttaattttcgtcgtaacctttccgattttgagatagaagatttagaaggcctcatgcggtctcttgattgtctacatttatgaccttcggttccagatatgagatcctgatctttatctccttcaagactttttacagtcaaatctttcttttttgccttatcccaattttctggtttgcctccagttttccctactaagtttgtttggaattctcaagtccctttcaaagtcaagtcctttgtttggttagtggtacacaagaaggtaaatactaacgacttgctatagttgagaagaccttacaaagcacttagtcctgacatttgtaagttgtgcatgaaatatggagaaacaatagatcatctttttctccattgctctttgacgacggggttgtggcacagattatttcagttagcaaagatggattgggttcccccaaggagcatctttgacatgctatctaccaattttaacggttttggatcttctaagagagggattgttttatggcaagctgcgtgcattgctttaatttgggtggtgtggcgggaaagaaatgcaaggatttttgaggataaagcaaggaatttagagaacctttgggattctattcatttccttgcttctctttgggctttttgttctaaggtttttaaggggattccccttaacgtgttacaacttgattggttaggggtgtgtaatcctactgggttggcctaacttagagagtttgcttgtttttactttgtattttcttgtatttgattccttatagttttgtttttctttggtgggaggattccttatccttctcttgtacatcctttttatcaatatattcctttgtcgtttcctataaaaaaaaaatcctccatttcattatgatcctcttccatgtcctttgaccctttaaacctatctttgaccttgcttgaagtttattgtaggtctttgtatccatatttaaattttggatcctttttagccaatttcttgcatcctaaattttagagttaaaagaatctgacccttagatacttacatttgaatccaataaacttagtttcatggttggattcttcattttagttaatagatctctttaatcattattattatttttatttggtaaaggaaggtgggattccttgtggatatttacggcttttttttttttttttgtggtgtattgatggatgggggtggtggtgacaagttgagtcctatggcttagggaggatgagtttgattcttggggttaggcatttcattcttttgcaaattcacctctggggtgtgtatgaggttctccttatgttatctaggtttgttactaggtttatttctcaaggctgagtgggtgctggacttttgttgaaatattatattagaggatagtgttttgggataaatagaatttataaaatgagggaaatgactcattacaaaaaacaggtctctagcctatcatttatgttttattagtcttcaccactccagttccttttgcagattgattggacgagttgtagaggcaattctggtttagcaatatagatcatgtggagggatattgggaattggggttcaggagattggtgcacttaaatggagatatattttgagacacatggttatggagacttgggtagagagaggcacaaatggtgttgcatatttaaaaggagaaaatttgattttcttcataaatgattgatagagacagcttatgtaataccccaaacccaatttaagggtaaaattataatttaaaagaattaaaataattaaattaattaaattaatttaataaagggtagaaaagtcttttcgcttttaaaagccctaggtataaattagattttctctatctttttcatttagaaaacccttttacatggagattagaaagatcgaggaacgtagggtagcgtaggactgaagaattagaggtttagagttaaatatcagttttccaggtaagattttaacccttatattaatatttttttattcgttaaatagtgaatattttaaaagtttgttggaggatcttaattttgattagcgttcgtttaatggagattgacaaattttgattactcaaatgaatagatctagattaaaaacaaaaaaattatatagttttgaatgtgaaaaatacataaaatttatgaatatggaggttaagagtttgaacttttgagataagagaaaaaaaaaaaaaaaaacagatgaaagatgtgtgtaggtaggaaggattaggtatgttgaaaaaaaaataaaaaataaaaaaaaggccaaggaaaggcctgcatgttgacctaggaaaggaagtaaatagtattaataataaacaaaagccaaattgtgtactgattatggaggaaagtagtattaataataatcaaaaggtaagagaatgtgaagttagaagggtaatgggttggttatgcattgaatatgaaaattaataaaaataataatatttagttttaagctaataaatgaaatattagtaataataatagtttaatgcaataaatagaaaaaacatatttttgagagatttagtttaaaaataataataataataaattaatagaatattaggaaaaatcttggaaagaaaccaactttataagaatttagaaactcacgaattaaatttttattgattaagaagttaaaaataatataggtgacataacataggaaattattaggattttcgaacctataattttagataaatagttaatagtaatagattttttttttttttttttcatgtaatgtttggtgaagagtggattcttcgggattaattttctaaggtttctgagtgcttctttaaggtaagagaaattaatgcaaattttgtgaaagaaaataattttctttttatattgtattttgaaatgtgtaaaaatattattttaatttctatgttgcatgggaaatatgtttgatcattttctttgtttatgaaaaaaaaacataattgtggagatatgaaattttgttttgtgagtttgaattaataaaataaagtgtttgattctagtttctatggccttagtcaacaggttataattgttgaaattttcggtcataatcaacaagttataataggtaatattatatggccctagtcaacgggttataattgttgacatttttatggacctaatcaacgggttataattgttgacatatccagccttaatcaatgggttataatagttgatattatatgaccttagtcaacaggttataatagttgaccttatgaccttagtcaatggattataattattgacctttggttttgttcaccttaaatggaacaaatttgaaactagttactcatttgtaaagtttcacttaattaggcaccatttgttacatgataaccaaagcgaaaatatttgaaatgtatttgatttggattggatgtgaaatggttttgatatatatgaatatatttagttaaacagtttaaaatgtattagcatatttgaactcaaatgtttttatggaaatgattgtaccccatatctcctatttataagtatgattgaaactatttgattcatgaaattgtattgatgttccttactaggctttaagctcatgttcctttgttgataatttttcaggttctctcagtttgggcgaggagtgatggctaggctagggaatttttctttattaggattttggttcaaactttattttggacattgtttatatgttaaaatttaattcccatttgaattatttgagtttggagttatttgaacaataatactttggttgatgtgttaatttttaaagttgagacttgaggattatagaatttatttattttactactctgaataggaatttggtaattggaaaccatctagttacaaaatgaatgtttgtgtcgttttcactttgatccttcgggtttgaggtgtgaaatgattgtcatgcccttggagtgggttttggggcgagacttatttaagaacaaataataatgggttgtccatatctataaatctgtcttttttgttctatagaaaattatttcttctctattcacttgcacaagaaaaatagaggataaagtattccatatacgcctttctccatggttgacaatattgcttgcctctattcttttaaagagtaaagctaatgtaagggaatgaaaatgagcgaaaacaatccttgaggcttaaggttttgggacaaaatcataattatatataaaatcacaatattcttaatgcacctgggctaaaatagtttctttttattaggataacatactattctttcgttgatatctttttgtgttttttcaatcttgaaacattttattgagttgcttctatcttgcgcaggcattgctagaggagtggatttcaactcgtacatt

SEQ ID NO: 11005 - DNA, 2802 bp, Vitis vinifera
  Intron number 1 from transcript GSVIVT01008068001 (locus G SVIVG01008068001) derived from phytozome v7.0 (chr-ID chr1 7; pos 6090193 to 6092994)
cgagtggccgaatcgattgggttacatcgctgcaggtacatccactgtaacgtcactgacgagcagcagatcaaggacctggtggaatcaacggtccagatgtatgggcaactggatatcatgttcagcaatgccgggataagtggaggggaccagcccatactcgacctggacctgtcagcttacgacgcgtcgtcagcagtgaacgcacggggcatggcggcgtgcgtgaagcacgcggcgtgtgcgatggtgaagggtggggtgaaagggagcatagtgtgcactgggagcatactcgcttcgggggggcccgtgaaattcacggactatgcaatggcgaagagcgcaatattagggctggtgaagtcggcgagcaggcagctgggcgcgtacggaataagggtgaacagcgtgtcgccggggggcgtggcgacgccgctgttgtgcaaaacgctccagatgggcgcagaggagttggaaactctactggataagtacaagtgcttgcaaggaaaagggccaatgaaagagaaaaacgtggcggatgttgtgtcgttccttgcttcagaggagtcagccttcgtcactggacatgacttgatcgtggacggtggccacccacactgaccgccaggcctatcatcatctgctgtgttaccttcttccatttatggattctcttaaatttcaaataaattcatgggaatgggataaatctaggaatccaaatcttcctcattttccacacttgaccatatgactttgaaaatataaaaatattttattattagtagaaatttaaataaaaatcgaaaatataagaaaaaattatttaaaaacttgaaaattctttaaataatcaaacaatcaaaagttgatatattaaatatttaatatatatgtaattgatgagatactcgtattatattaattaagaattaatagaaaaaataatatattttttaaaattttaaaaactaattaatatttaaagaatttgacatttttaagttataaattaatttccaaacttatctaaattataaattaattacatatttaaattataccttggcataaattatcttgggctaagcatcttctcaagccgttggattacatacaatgaatagaggctgttgcataaagggaggatactttttttcttctattttttatgaaatgatactaccaaataaaatatctacaaatataattaaaaaaggagctacaataatctactttctaatataataaaagaaatttgactaccaaataattgaatatgtattacaaataccttcttttgttaagcaatctcgtgttttatttgattttttttttgtaaatataacaaaaaatataaatatataaatcttgagataaattttaaatttcatctgttaataacataataaaattaaaaatatctcctcttttattataacaattaataattatttttgagtcatcagttatttttggtaatatgtgatctcttaaattataataattatgggggagatttatgtaataatgtgttatctaaaaaaaattaattttttttaaaactttgacttttcacttttaaagatcagtcatttacaaaaatacaacccaaaaaatgcacttaaataataaaaaatccttaacatactaaaattactctcaaacccttctcatccaaccaccaattgtgacccatttttctttgtcttttttctactttaacattacaagttaaaaagctccaccaattgttaccaactttttttttaatacttttacattacaagtcaaaaaggtaatcacctattatgaaaggagaaaaggttgaagttgtccgaagaaggggggacggagtggccgacagcaacatcgccagcgatgggtgtgcaggtgaaagagaaggaagaaatacaattttaatttaaaagaaaagaaaaaaaaaaagaaggctaatttgacccaaaattcttgataccacatatcaagcttattgataagtatgattgaaaaaagaaaaattatgtggcatattgccacatgtcacttgttttataaaaataataattatgagttttttttaattatcatgtcaatttaaaagaaagaaagaaaaaaaaaaaagtatggttgttgacgggtaagcgatagaataggaaaaattgaaagatactcttaaaattttgttagttagtggactgcatggtcagaaaattaattttttaaaaatctatacattttttgtgaagctttacatgatttccctcgttattaaagcattacctcaatctcgaggagcggatactttaccgactttttccctctcttcgttacctctctctttctctatctccccacgttctttatttcttcacactctctccacaggacttctaattcttcctttcctctttgatacaggggcagagccgaagtgctttagtgaaggacactggcgaggtggcgttgtgcccgtgcggtgcaagttatcctgttgacagtgactgtcgatttggacatgccgctgaggtccgccgctgcaatttgaactgtccatacgcaccggcgcttaccctcagcctcagaaaataccatgactgaccctacagcttgtagcaagaagctacaaggaaaagtgattatcatcaccggaggcgccagcggaatcggtgagggcacgtttgttcgccaatcacggtgcacgcgccatcgtcatcgccgacatccaagaccagctgggccaaggcgtcgccgagtcaatcggcttacactgctgcaggtacatccattgtg

SEQ ID NO: 11006 - DNA, 2804 bp, Vitis vinifera
  Intron number 5 from transcript GSVIVT01021594001 (locus G SVIVG01021594001) derived from phytozome v7.0 (chr-ID chr1 0; pos 7749006 to 7751809)
aagtatcataccacaatcaccaattcttttctctggtatgtatcatcaacaacttactatacctactgagagtacttcaagcaccatgcatttctctttctgattatttggcaaaacttcttttgaactatcaattttcctaaaagtttaaacttgttggatttgggcccacgatatatatcatgcaatctatctttctgattatttggcattacttctattaaactaccaattttcctaaaaacttaaacttgttggattcgggcccatattgtataccatgcaatttaacaccctccctcacatgcaaactacacgtgaaggaacacagtcccataggcaaacaattacaattaaccttttttaagcttacttaataaattaagctaaattgggataaaaatatgcagtggtgaggtttgaacccatgacctcccactaaacaagacttagattccatgtcaaacaactaatttttcgaaaagttttaagcttgtaggatttgttccacaatatatatcatgctctctaacaacttccttttctttttttagttattactttttttaacataaattgcttgtccagtgcttttaatcttcaatctaaaaatgttggtcaaatttgtatctcccctatattaatatcaagaaaaaaaaaagtgaaaaagaaccttggttgtctttattgttgactccatgaaaatttttcataaaataatagaattattattgtaatagtataacaacccactcctaattgtgtagatattttcccactcaaaagcctacagagtctcttaatcttttatctgttcaatctactagcatttgaatcattagaaattgatatttttagttgcgaattctcttcaaattaagcaatatgggcttaaccattccattgtccaaattgtgcatatcgattttcattccctttaccaaatgattgcaactttccatggagtttctaataagtctccttggtatgccttggttctttgcatagacacaccacaatctatctttgttgactagtgttctagacacttcactcctccataattgttgtttggcaatatggattttggcttcatagtgactaaagccgagccttttgttgttggagtgtcaagcataacgccacaatccatttgaatactagaagttgagatttctggttgggaattctctttagattgagcaatataggcttgactgttccattgtctagattgtgcatatcgactttcattccctctaccaaatgattgtggctttctatggaatttccaacaagtctccttggtatgccttggttttttgtaatagacacgccacaatccatctttgttaactagtgatccagacacttcacttcttccataattgttgtttggtagtgtgcagtttggcttcatagtgacaagagttgaaccttctgttgttagggtgttaagcataacactccttccttcttttgctcttacaatggagaagacttcatttaagggaggtacatcttactttctaaggacctaaaccttgacttgatcatattccacattaagacctgctaagaaatcaaatatccttttactttcaacatatttgagcatcatggcagcatcttcgctgcacttcatcttaatattttgataataatctaattccaatcataagcttttcacgatattatagtattcaataatagaaaaagtattttgcttggtagcataaatcctggtctttatttcgtagatgagggcatcatccctcgctttggaatatgtttgcctaacaatctcctaaatatctatagccgttgttaagaacatgcacatcctgctgatttctggttctataaccataacataatcattgagttctcttcatcccaagttggattgtcttcacttgggacaggtccaattagatgattcaattttccttttcccttaaaaaaggttcacatcagttgagaccacaccaaataattgcagctattgagtttgaatggattttgcagattttgatattctacaaaagggttactgctaatcaagttgcgagcaaagtttgaagattggatgatttctaatccatcaaacaaattagagcaaatcagaaacaatttttgtaaatctaagaggggaaaattctatgaggctatgcaggctaaaaaaaattaaaaggaaggagatgggcatcaacaagttctgctgctagtaatgaaagttgtacaagtgtaacaaaattctcagcaattaaggctaaggaaagaaaaaacttagggtgcaaaagagaaccctagctttgataccgtgaaataaattatgctctccttgaattgtattagcatacaatatgtgcatcctatttatacacagctggggattggattcccctaaaatccctcccataaataagggatcttattcacctactaattattatcctataatctctcccatgagtcacattttaccaaagagagaaaaggaaatgaataaatacaaaattatttaaattctaccaacaaaattaataaattatttttatatggtttttcaaatttatttcacttatttttcctcttatatataaagattagataacttgaaaacgtataaatttctaactaattttaattgtatttgatttttgttggtatttttcacggtgaaacaaaacatgataaaaatcattttcctcaacatatttttctttccgagaatatactgtataattctaattgtcatttttataatgtaggtactgtgagatttaatcttgatcctttca

SEQ ID NO: 11007 - DNA, 5708 bp, Vitis vinifera
  Intron number 1 from transcript GSVIVT01020727001 (locus G SVIVG01020727001) derived from phytozome v7.0 (chr-ID chr1 2; pos 2639366 to 2645073 reverse strand)
ccattagagaagtgaaggtcggtgtaaccttctcactataatgaagtacaattgccaatgatttttagttcgaatagttatgaaacttgaatatattttcttacgttggtcaacttttagggttattgaagctgtaagtatagcactaagcagagcaggtgtagccaaattgcaggccaaacggtttaaatcttaggcatgaattccatttgaaaatgattctggatgtttttctttgaagtttaagatttgtgtttggatcatagacatacaacatttggaattgagttgacatggggaacacttaagtgaaagaataaacaataattttgtatgtgcttctttaaaagaaggtggttgaagatgaaattatctagaatgtgtgtgtcagaaatgaataggagaattgaagaaaactgatgctgtagcaatgttaaaaaaaaaaaaaaaagttagattgacttttttttttttttaaatctttgtctacagtgaaatctaaattgtagcaagagccattgtccttgaaattattttgaaacccattgatgtaatcttctgctgctacgtgttttgatcctataacttccactactaaaggaagaggtcactcagcctagtaatgcatgctaaattctctgttatggactgaattttggaaataagagtaaagagtggcgacagttagaacagcaatggcttatattttcttgtggaagtaagaattttaactcttgactagcttcaaaggaggggatgggatattccgaatagatgttacatgtaaaagggaagaaaaagttggctggtcatatgctcttcactacttcaaaacaagaatgtattgacacttttttgttctctgtttggagtagctcgggtaatgcattcccctgtgagaggaacacttctgagctgacatggctcttttatgggaagaagtggaagaaaggatgaagggctgctctttgtgcctgtttaggaggttatggaaggaaagaaataggaggagttttaatgaagtaaaacagtcagatcaaactatcaaatccttctttgtgtgtaattttttggacaaggctagagtctacatagatgattcctctatgtccatgataggctttgtagattgggtgggtgctttctaaggagagagattattttgcttactctctgtctttttgctcatctgtttggtgctatttgtatacctcatgtgtacctcaatgtgttttttcttacgcttctaatatattatctcattttgcccataaaaaaaaaggcttatttcttaaatagttagcgtcaactatgtgaaacctggaacagaggagggtgtgtaggggagaggaaggtagggtgatctggacaaagttcaagaatgacaagttttctgttaaattcctctgctcatctttagagccaataagttcattatctttttcaataggtgttatttggaattcttgggtgctatcggaagttggattttttgcttgggaggctacgtggggcagggttttgtagtatttattgttttccttatttggcatgtcctagatgttaccatcaacaattaaagagacattattaggatgacatgactctttcatgggtaaaaacagaaaaggcatggcgtgctattccctcatgcatcttttggacaatttggaaggaaaggaatagtagatcatttgaaaatgaggaacaatctttttaagggttgaaacactcttttctttgtaatctctaggcatggttcaagttgtttaataggttttggtccttcatctttagttgattttgtggattggttgggctcttattaggaaggggttgtttttcgttgcaactcggttttgagaccatatctttaagtaaatataggtgatgcatctatttgatgcaagggtttatttcttaaagtagtttgagctataatagtatttttttagtggtgttgctaggaatttttctttttcaaagttttagtaatttggagaaatatcctatgagtcctaattttttttggcaattttgctggaactttgtaaaaaaggaggtgatgcgaattttttgggagtttgagttaacttcctttgaaagagcttaaatgtcaatttcatagtgttactcccaaggaaggggggtgtagaggatttaaaagaccatagacgaattagtttggtgagagggttatagaaattgctaacaaaagtcctagcaaataataataaaaaaaggtagaaaaagtggtttcggattttagcatgcatttgtggatgatcattgaatattggatgcaattcttatagaaaatgaagccactgacttaaggttttcttacctttgtccaatttacaacttagttggcttttgatgtgtataccttagggttgggcctacatggggaggagcctagacgagcttctagagatgtcgcctattttgttccttttgcatggatctccttgtaaagttttttttttttttttttgggtcttttgattaggtttgtatcttatggggatgatttctcatcattgtcatgttttctaaatattaattaatacttttgtttatgatctaaaaaaacagttatgagtggtttaattagggttttttttttttttttctatgtgattttggaaaaaaataaggtttggtcccaagcggattagatggattgagtggttcatttctatgatttgtttcttcatcttgtttaatggaactcaagggtttttccagagttttagaggcttgagacaatgtgaccctcttttcctatacctcttcatcttggctatggagacactctcttgtattttgaataggcaaaaggaagggggcttcattgtgggtttcatagttagtggaagaagaggtgtgggaatggacatgtctccttgtggatgatactcttatcctctgtgatgctagtcaagggcatttggagcatttgagctgatttttcatgtggttcaagacaagctttaaaaaccaatttggggaaaagtgagttgatcttattcagaatgtagagcacctagttggtgttctgggctcattgtgagtttgagaagttgtggagcaaagatttaaaaaatgacttggtacgtggaagataaaatacctatcatttgaagacttactccaaaaatcacaatcaagattgccaatctatttcatgtttttatttttcatccctagaaaggtgaacctaaggttgaaagttcaaagggatgttctttagatggggaggttcctttgaaaataagcctcttggtaaattgatctaaaaatcacaatcaagattgccaatctatttcatgtttttatttttcatccctagaaaggtgagcctaaggttgaagattcaaagggatgttctttagatgggaaggttcctttgaaaataagcctcttggtaaattgaccgggagtttgtatggactagagaagcagggtgtgggtattagtgttgttggagatttgctactaagagggatttcatttggaagtgggttattgcaaggaagtaagggggggaagagtgagggaagagtataaggtgggtttgtggaagacaatcaaaagcgggtgagagacctttaatagcaaaattggttttagggtgggcaataggtagatggtgaaattttggaagaataggtggtgtagtgacttatcatgggagagtcttttcttgagatgttttccctagtcactaccaaagatgcatgggtagctaaggtgtgggagcaaaaaagggagagttgttggaacccccgcctcttaagacaaatccatgactaggatcttgatgggttggaggtttttttatgagattataaggttagacaatttgtcacaacatagaggataaaatattgtggttgaatttgaagtttggcaatttctctgttaagtctctttgttcctctttgtttgttggaagaatggaggctttcccttcaagcatgatttagaatccttagattttgctaagggttgactttttttcttggaaagctacatagggaaggatcttaacattggataagctcaaatgctttgtataccccctgtatacttgtaactctttgccccttcattaatatatcttgctttacttatcaaaaaaaaaaaacattggataagctcaaaaggaggggatgaacgatgccaaatagatgttatctaacggctaatcacatcctccttcattgcactacaatagtcattttgtggttgttgatttatctcctatttggcaagaagtgagtgatgcatttcttggtaataagtgcccttttgggttgacatgggtcctttgttgggaagaagaggaagaaagcttggaaaatgactcctttgtgcttattttggactatttgggagaggaagaagagaatgtttgaaattattggagaagtggatcaagcgatcaaacaatccttatattcaagtttttggagcggcttagagtgtatatagaagattcctcaatttccatggtggactttattgattggttgaactaagtagggaggaagagttacttttttgtctttctcctttttgtttggcttttttgtgcttttgtatatgttgtgtatgcttttgccaaagctttttgtttgccctttttttaaaaaaacttttgtgaaagcttttattagacacttttaatatatttgatctttccatatcaaaaaaattcttcaagctttccctttggggttcatttctatcaactttttttcccatctaatttttattttattaagttaaaaggagttttcccttttaaaggcacacaatctatgattctatatgcatgtctcaattatactagggttggtgttctatttgatttagtttacttgagttgtgaacctagaatcaaattgtttagctcataaagctactgcaaattgtttatatattcttgtttgcctatcaagaaaaaaatagaactactgcaaactgacttaggttgggctgggcatgattcttttcagcttctacctgcccaaagtataccctatcatcatcctgccctgtgccatgagtcagaggaaaggtggagtgcatgtatttctgcatgtgtgtgcttttggagcaaagattgaagtagtaaatatctgcaggagaataatgagacttaagagatgcagtgtggcaaggtggcttgttatgatctccaattacatgtttcttgtaaaaagataaaaaaaggaattcactgaattttatcctgatatagttttactcaaaactgctgtatatcacccactatggtcctcatttcctatgttagctctaggagtgtattaattatcgaatcaggatggctaggattgtgagccataaaatcatttatcagaatacaggattactatttattacgtggggaaataatctgtgcactatcaattggtacatccattaattgtcatggttaccccataaatatttttcctggttttctcccctaaattttaatttttctgcttataaaatcaaaattatcagtaacatttaaaaatttgaagatttgagccgttaatcactttggagctgttatgttatttttgcttgcttataacatgctataaacatgaatattttattcatatttttataaacatttttggttattactaatttctgtgtgttatttctagcacttgttcaggcta

SEQ ID NO: 11008 - DNA, 5800 bp, Vitis vinifera
  Intron number 4 from transcript GSVIVT01021569001 (locus G SVIVG01021569001) derived from phytozome v7.0 (chr-ID chr1 0; pos 7175777 to 7181576)
gcttggaaggtggtgcaggaatacacagatgccatgcttggcacctacctaaaataactaagtactcccatttccatgttcacattaaaaataaaattggtagtgccttgtctgtgtgtgtgtttttcttctctgaatgctctttcttctgtcctcaacttttcattccattccattaatccatccctctggatccatttatcatctttcttcaaaggtttgtgattagtaagttcaatttccttgtctacttctaagttatttaacctattctattgcttaaaaacaaaaattaactttatattagtttcaaacgtagaaaaaattgattgtaaataaaaagtaagaaaatcatcaaaacaaccggttcactcttaagtccaaaattaatgtcggtgggtctccaacggctggtcaacgcagtcaaagctcaaaattgagctattggggggatacagttcagtatatatcacaagctccactagggcaagtttgccctttgataaataatatgtactaaagaaacatatatcaaaagttaggatataaataaataataaaaaaacactttaaaaaacaaattaattataactattttataatttgaatgaaaaattttcatttaattgattagtaaagatatatcataattttctttatagtgtttttaatattattaatatattaattaaatattaaaaatttatacatttatcataatttattttataacatatcataattttaatattaaatagattttaaaattaaacatattataatcacacattacaatattatcatcaaataatatttgatataatttaataatcaatgtaatgtatttaataaatcatcacttcaaaaaaaacacaagtatggttctttttctcactcttaccttttctcttccctcttcctttcatctctcttccctcatttcctcaccacgacgctaccaccccactctcactcttcacgtcgccaccaccctcatcactgagttggagaagctcccacgctcagccatctctcttccctcacttcatcatctccatagcgaccaccacttcacgcaccttcgctgcaccactccatcattattcttcatatttagggctccaaatacaaaggtaatcctcattaatccctacaatagttgtatgtaaacttgggcttgggcttgatattgattctgatttaggttttgtatgttgggctattattcttttgttgtgaactgtgaggctttgttttcaggcttggattgttgatttgggcttagtttatttacttattgattgcttgtgtgggcctaattaagtttatgtagcattgggttggcttgatttgttagatttaatttacttctcctaagctcgtcttatttccttttacattggcttgatttggtccattgctgaaaacccattccattggctgagttgtttactggatgaagtcggtgatattcaccatgtggagagctagattgcattggaacaatagaaggctggggaaggtgatataagggacacgaaaccctaggaaaaagggggagacggctcatttttctcttcgaatttttttctctctctcttatttgctgtttcttgtactcttggtgagggagagttcttggttttggatcttggtttgggaactgcccgtttgggagtttgagagcattcgagttgtttttgctcatatctaggtacataactttttccttcatctttgtttgatcttatttttgttaatttttgtgtactggtggtatatgaagtggaatgtattgcttatttttatttttttacttgataaatattttatccatatatatatttttgtttatgttatgttttttgtttatgtattaaactgtaataaattttttgtaggttttttgtacatatgttttttcaatttaaattttcgggatgttagtgttaggattttctatttatgtttatttgtgcttgttatagtttatgtataaataatttattcatttattgttgttttgtttattcatttatgtataaatctttttttttaaaaaaaaaaaattccaaaaaaattatttatgctataaaagtctgaatacaagttttgttataacttttcctacctttttatcattaattatttcgacatgaaaaaaagatttggatcaagcgattgagtggaagatgaagagttaatttcatttttgaagtgaattttgaatttcacggaagtcaaatgataaattacatccacttaaatgttgccttagaattttgacaaatgatttatgtgctaaatttggtattttgcgctaaatatggtattgttagaaattttttttttgggaatgtcaatttttttgagataaaatagagttgaaggttgttttttcaaatatttaccattctttttatttaatgcaaattaatatttatttaatatataagattgaaatataaacattttcttaatgtatttgtatttaaaaaaacaggtcgagtaaaataatatgtatacattcttctaagatattttttaaaataaaaaatatgcataattttttttctttaaattagaattttctctttgaagagtggaaaataaataaattatatggtatgaaaataattacacttatttgtatagaaataattttattttattaaaaaaaaaaaagaaaatctcaatcatatccctttttttccatttttatttttagtaaaaataaaaataaaataagatattcatatcacaacaaatattaatgatcataaaattaatgtttattaaatatgtaaaattaagatataaattgttcataatttggactgatattttaattttaaaagaaaattttcctatttataaagttaaagaataagaaatataaaaaaattgttatattctttagaaatatatatatatatatatatatatatatatatatatatataattacaaaattctatccaattcttttttatttttcttttcttttttccctaaataatttttttatctatataaaattatagataatgatacattgatttcaaaattcaaataattatttgaatttaaaatttaagtttctttttaatttaaaacatattgattttctaattatgataaaagacctactttttttttttcaatatttatattttgttttagttttataagaattataaatcttatttgaataggattattattttagttttcaaaatttaacaaataataaaatatgcttgtttcattaaataataaagaataaatcatatcaagtataattatattcattataatgaattaatttcataaaaacatgataattacttttcatttaatatttaaatttttttattcataatattaatattagaacatatgcatagatatatcataatccttctaatttcaatatttttaatcaatcactatatatttgagttcatatttaaatttaccaattaggaaaaagaaaaacaataataagaaaaaaataaataataaatttattaaattattataagacttaatttcaattttgaataaaattaaatactaataaaaataaataattcattaatctattataaaacttatttccaattttaatctagattgtatatcattaaattatataacttattccaattttgatatagataatacatcattaaattataatttgatttttttttaatcaatgaataaaatttaatcttatcttctcttcaagaaaatagatattattttacctgttaatataatcattaataaatattaattttttaatatatatatattcaaatacaatttaaaatagatgaaaattaatttttttcataaattttatggaataattaaaattaaattaaaaaatataatactttgttagctaacggttcacatgtcttgcgcgtagaacaagcctatataaaaggcaagtgagatggaaagtataattaatttattttttcattcattatttttcattttaatggattttaatgaataatttctactttgttgcatacttgcatctgctcctccatttaattggtttggaggtttcatgttgtggacctcgtatttcggctcatgcgtttcctattcgataacgagctcgatttttattagaaaaattgatttttattgattatttaaaaataacttggagtcgccacttatttttgttttattttaaaggggtaaacaaaataagaaaaaaaaaccctaagtacgactccttattttggaaaatgtgatttacgaaaaatcggatcgggttcgggggtcaggttacttatcgggaaggtacggtaaagatcgtgacacccctctaagtccataaagtcgggtttctactaataaaatgaaataatcatggcaatggatgagtaaatcaatgagtacccagaataaatcatgcacacgtgaggatcaaaacatgcatagacactgatcaaagtgaaagtgggtacgtacccgagcagcgagccaccatgcgctatcaagagggagggttagtgctcaattaaggaataatagcatgtatgtcataaaatagaataaatcaatcatgtatgataatcaaatcaatcaatcaatcaatcatcaaaatcatgtatgtggggcccccaccaaagcccatttattttttagtgaatcaatttcgtaaattccacaacttggaattacgaaaataaattcacacttattttaaatcattttaaaaatcagagaaaattcgagaagtggcttgccgaagggagaatggtggccaaatttgatgggaaatgagattttgggacctaattagtctaaagagggaaaactatagaggtttgaaagcatttgaaaactaaaatttggaaaactgcttgaaaattggacaacttggaattacgaaaataaattcacacttattttaaatcattttgaaaatcagagaaaattcgagaagtggcttgccgaagggagaatggtggccaaatttgatgggaaatgagattttgggacctaattagtctaaagagggaaaactatagaggttcgaaagcatttgaaaactaaaaattggaaaactgcttgaaaattggattttggggagatcacttttgaaatcaaagatgaaggaaaggagcaacgacaagtggacataaattgcatgccaatggtggccatgcatgatgaagttctgcacatagacttgacatgctactcatacaaccctgtgaggtaagtgataacaactgccattcccttgagattttatttgaggagacttttgaaatcccccttgaatcattgggaatatcgaccaatgggttttcaaaaaatccatcaccactttgaagctgaaaccttttattctccgacttgaatgctccagcgctgtcattatttcccggtatgtggcacatggcagtgcctgattgagtggcatgagaaggagaaaaccttgatgttgacccctgaccttttgttttccttcaaaacttggagctcagaaaatcagcaccgggtaacatgcaacatgtggctcccacatagtctacgctggacatccatttgtttgacacggccgagtcgaatgagatctcgtccaatacgaattctaagccatgaacacgtgcctccagagatttcaatccgttctgggagtccccgaagaaattcgggtggagatctagcaggctgggttgctggttttcaatctaagcaaactgcttgcggacctgagatagaccttcacattctttccaaccccttgtgtgtgctt

SEQ ID NO: 11009 - DNA, 5886 bp, Vitis vinifera
  Intron number 4 from transcript GSVIVT01036136001 (locus G SVIVG01036136001) derived from phytozome v7.0 (chr-ID chr6 ; pos 20275936 to 20281821)
cacgggttcgtattttaaaatttatttcatgatatgatctttattagtgatttagtaacatctttatcctgttgagtaatctgtacagggtttcatgacaaacagagtgctagtgtttacattttttatttttattttatttttatcttttttgtattgattgtactggttgttttggctgacacacgggatgaagacacaacttggtgcattcttaagagtactccataatgtgaacaatttctcaaaataaggtttatcaaccatgcttctttaaaagtcccaaatgctcttgaatatgttctagttaggtgcaggtttggaatttgacattgaattgatacaaaacttggatagagaatgagacatcatatatgaaaatcttgtaaaacattttctaaatcttttatttaattggattaagaagaatgctgatattccgttcatgcttttgtgccctttagttaggtgttgttaatataatgaatccttggccatcaggaaaaaaaagtctttaatttaattggattaaaaagaatgctgatattctgtgcatgctttcgtgccctttagttaggcgttgttaatataatgaatccttgcctatcaagagaaaaaagaagagaaatgttgaatcaaggattcaccagacttccaaattaacatctactaacatgatagacgtgatatggctgaaggttgggctgataaatcaaattgagttgaaaccattctggaaaatgatccttattttggaaaagcatggtaaaaaattacccttaatatcactttgaaactgctctagttgtccagataaatgctgggaatataagtactggaattaattaaaacaggccaaccttgaaagatgaaaaaggcatggtcatgtaaagttggctggaaatttggtgtcttaaacaaacattgtaatttaagcacaataaaattcaatatttatacagtaccatttagtggattgaaatggatgaaaaagcagtagaagttgtggatattcaagcaagagagatggatgacatctaataagggtgtttctattctccagtgtgttcacaacatactgggttcaagaacgaaagatatttatccagtgatatagaaacaaaggttagaaagttggcacttcaagccagtcaagaaactgggattgagtggttatttagtgcacaataactggcagtaataatagtaagttgatgatatgtttaaaaatactgcttctttggacttattttagtgtatttggaaggagccaaaggaaccaaatggaaaatcttcaattgactggagctgtcagttttagttttgaaagatctgttccttgtatctttgttttcatggtccagggaatctcttggtgagggtagcttttcatgaggacaaaaatccttttagtctggctgttgggctggggcccttagcttcacttttcttttagttttttgggtgctctttgtgtacttcatttgtacatttgaactagggttcactgcctacacactcataaatgcaaaggcgtgcaaatactgacacacaaaatattttgcttataagaaaaaataacgtgttgtgaaattcatacattttttttttaaatttgacagaaaccatagaattgatctatgagaagcaaatcataggaaactatatattgccaaaagataatatccatatttttccagagtacaatagtggtgaagggtgtccattttactgtatattgtctgcatattatgaatctttttgaggtgctagtttcaaaatggtgaaatttttcagaaaagaagaaaaaagaatgggtaagtttgttgttcagaagaaaattgcattgtcaggaaatgtcgggtgtcaaatctatgttcttgagcagaagtcgtatattgtgcagtgaatatttttggatccttcctttctggacatgatttgcttaagcatggggttgcttggtggaaaaagtttggtaattgcttgggtttcgaagagttgggaaaggtgactctggaattttctatccatcagcagttttgggagtggtctgtagatttgggaaattatggaggagttgcaatcaattgggaggagtttcaaaagtattggggtatcgttgtgaactctttgggagtccgttcacgtctgtttaggtggttttatgtcaaaatagtggttggggatagaagtaaggtattcattaaattcctgggagtagttgtagtctcataggcatgatagtagtttgatgaaaagatggaaaacataagggctggtggttggatcttgagttttcaggttctgccagttttattctggcgtctaaactgaaagctttgaagttgtacttgaaaagctggactaaagaggtatttgacaatgtttcattaaggaaggaggaggcctttaatcagctaggtttctgggttgtgaaggagagggaaggtgttttgtctactgttgaggcaatagcaaggaaaactgtgagggaggattaccaaaaatgggctttgatggaagatgtgttttggagacaaaaatcaagagaaatttggcttaaggagggtgatagaaactcttaagttttttcataagatgacaaatggtcacaacagaaaaaacttccttgctaagatcaaagtgaatggggggagtggctttttgaagatagagaaataaaagagggggtggttggtgcttttaaaacccttctctctaaagatggggattagaggcaaagaattgatgctttctcctttgaggcgttggaggagattgaggctaggaagttagaggaggttttctcagaggatgaggtgtttggtgcattgtcggagttgaatggtgacaaatctctaggcttgaatggattttcaatggccttttggcattttagttgggagtttgtgaaaatcgaagtgttgaatttttttaatgagttccatgagcatggtaggtttgttagaagcctaaatgcaactttttgggtgttgatccctaagacaaaaggagtagatgatcttaaggattttaggcctataagtttggtaggaggcctttataagttgttggaaaaagtgttggccaatagacttaagaaagtggtgggtaaagtggttttaaagtttcagagtgcctttgtggagggaggacaaattttggatgcggtgttgatggcaaatgaggcagttgattcaatgctaaaaaagagagattgtgggttgttgtggaaactcaacattgagaaggcttatgatcacatgaactagggctttttgttagcaattcttagcaagctagggcttgggaaaaaatggatagaatggaattaagtggtgtatctcttcaactagtttctttgttttagttaatggttcccctatgggatttttctaaagctctaagggattgagacaaggggaccatctatcccctacctgtttgtgattgctatggaggctttcagtagtttgcttttgaaagaaagcctaggatgatggttttattttgggttttaatgttggggaaagagggggtgggggtgaggaaatctctcaactcctttctactgatgacactattgttttctatggggcctctcaggagcaagtcactaatttatgttggcttctcatgtggttcgaagccatttcggggttgaagataaatttggaaaagagcaagatgatcctagtggggaagaagataatttggaagagttggcttgtgaaattggttgtaaggtgggaaacttgttgacttcttacctagggctagggcttcccttgggggccttgtacgagtctgtggtggtttagggtgaggtaaaagagcagtttcgcaagaggcttttgttatggaagagatgatacctctcaaaagggggaaaactcacattctttgtagtactctagtcagtttaccaatctattgtatgtctttgttccccatcctaagaatagtaaggctaagattagagaagactcaaagggattttttataaggaggatggaccttaaagaacaaaatatacttagtgaagtggtaaaccgtttgtaaagccaaatcaaaggaggcttaggtgttcgttcttttgttttttgctaaataagatccttctttgtaagcgatgttggcgttactctaataaaagagattcgttgctgaagaaaatcacaaggggaaagtttagggagaaagagaggggaagtcaggtgtggtgagagattcctatggggttggggtttggaaagcgataggaaagcaatgggacgttgcttcatttaaaacaaaggtttcctttgcaatgggtagtgagagtagggtgtagttttggaaagataggtggtgtagtgaggagcccttatgtgagacttcccgtccttgtttgcctcatctaattcgaaagaggaattggtagttgacttttaggagcagagaggcgaaggatgaaattggtatttttgttttgttaggaatctaaatgattgggagttggttgtcatgtagtggttcttgtataaattccaaggatagatagtgaagagggggtaggatatagtttggaagggagatagcaaaaaggtattctctgtaaaagagctttattctcttttagagaaagattgtgccatcctattccctttaaaaattatttggaactcgtagattccttctaaggtgagtttcttcacttgggaggcttgctggggcaaggggttgactttggatgagcttcaaagaatagggtggacattggtcaacaagtgagctgtgtgcaaagaggagtcaaagtccattgatcataatctcctacattgtgataaggcaaggatattattgcagttggtattctccattttttgtattcaatggggttatccttgagttgattagggagattctacttgggtggcacgactcttttgtatgtggaaggaattttaaggcttggagagctactcctttatgtattttttggactatcagaaaggagcgaaatcagagatgttttgaaagtgaggaattgtcagggcaaagactaaaaaacttttttcttaataatttctcactgtgggttaatgtgtacataggcagaggctatatgcctttggttgacttcatagattggcctttgttgagggagggagtatttttgtgtcccttcttttttgcttatcttttggtgctcattgtatacgactcatatacctttgtgtgccttttgcgttatttaatatattctcttatttataaaaaaaaaaaaaaaaaaagttgttctgataatctgcaccatcgttttgggtgtacctttttgtacttagttacctaaaggactaccatttggaccattttgttgaaggagagaaaactaaagaaatgcctgatttaatgcctggttttctgtaagtgtagtctcgcagaataaagtctatattcaatctttttgttttcaaaaacatgagagtgagttgacatttctttttattatgcatgatgaagttgaattgtatacctacaactacatacacgcacccaagagaaagtgtttgctcttgtagtctttagtttctggactagaggtctaattctaaattgaacttctacttctacttctcctaaatgtttgaatatttattattccaataccattaatagtattttctgtttccttattaatttttttttcccaatctaccaattcatttaaattagggaaaatatttgtgttccaatctctgattgaacacttacattttagccttttttggtatactttttctgcataaatgctttctataatgaacattcaagtatttttctttgactagtttaagatttggtttcctgttctaaacctatcagccagagggtagggcc

SEQ ID NO: 11010 - DNA, 4934 bp, Vitis vinifera
  Intron number 4 from transcript GSVIVT01005929001 (locus G SVIVG01005929001) derived from phytozome v7.0 (chr-ID chrU n; pos 22788037 to 22792970)
aggtaattttgtttcttttgattaactcacatatgaacatacattttattctaaagaatggctatttgtttgatgacttttttacatggatacatgtgcaggctttcctttatgtgtatttcacatctagagtttcccttttttttctctatttctataagaattgcacagacacatgcatacactcttggcagaaccctttttaatgtatagatgtgtttatgtatcaatttggattggttgggctttaagattaaattagagatgttaaatagtaggcaatgaggctagtataaattaaactcttgttggagagagataagtatcgattttgatccatccaatcctcaaataggaataggctaaatcaggaataggcaattttggctggaaatagatggattaattcaaattttctcattcgaggggaggatgttgcttaaatgagttttgtaacatgaatttggagaaaagaaatgatgcaagagattcttaactctcatagacataggtgcatctgaaaatggcttgcattcaattcactaactttatgctaaaactataaattcatccaagggaggggccgacaaagaagtattaaggcccatggtttaatggttgttatcaagaaatcaagtgaaatgtgggaggataataactatccttgtaagaaaaaggaaaaagtaaaaaggctggctgaaattaccttcttaaaaaatgtcaactgttatgaaggtgtgtgacttgtgtactttggtgcacctttgcttggcacagaaatataatttctttgtttgcctataaaaaacggggaaaaaaagacattgttatgaaggtgtgataaagatgaatccccaagttctactcaaggaaggaatgaaaggcaataaaaaagccccaaggtcttgtgcttttaatatatttgcttttacctatagaaaaaaaggtaaatttctaattttatgtcaaaaaaaagcttttactgtcttttaatgtttttatagaagatttaatggtttaaagaaagaaataagagtcctaattagttactgtatgggttatgtttattttttcataattttattcaaatttctgatgttaacttaagtctatgtataaagctaattgatctaaaataagaaagattgatgatcaataatatttacttttttttttttgcatgccttagaagaaaaccaattaagtcaccatagagaactccaagtgaaattctaagaagggctttagtgaaattgtaaagtttctatttcttctttttttgtctttcttttcttctagtttgttctactttttctgttgccataatttttattcctcgatcttctccttaaaccccaaaagattgaagcttagcctacctatttgattgtacaaccatcctagttttatcctacaatagttttagtatttgagtgaaatggcttaacggtgctagtggaggagtagaacaactcatgccaccatgattaaaggccatgatttttttatttaaccattggtgaacatacaaaaggcaaacaaagaggagaattgacgatgtgctagcatatattcgaacttgtgttgcttgctaagggagactatgtcccatgatcatcgatggaggttatggtttgcatatagcttcacaagaacttgttgagaagtttaatctaatcaaatcttatcaaatagcatggtgatgtgggaccaccacatacgctcccaaaagcttaagctaatggtgggtagaggtagccccacatatgagatctaaccaacattggtaattggccgatgtgggacattgagcttctatttgtactatgtgagacaccatcattcaatagctgatgcccacatcagtgaaccaggggcgagctaggccaaacctcactttgataccaaatgatgtgggaccacatacactcccaaaagcttaagctagtgggggtagaggtagccccacatataaggcctaaataacattagtaatcagtcaatataggtcattggacttctgtccaccctacgtcacatgggtagatgacaactttattttggtgagttcttgttttttagtaacaattaattttagtaattattttgagctatttatatggtatgatgttttgtcgatgaaagttgtccatattgtgttgggaaggctatgactttttgatagaaaagtccaatgttatgactataagaacacttacacacttgtatgcagtgggcataagaagattctccatccaataaaggaaattccgccatctaagcaactagtggaaaaatcagcacccttgaaattagaaaaaccatcaaatactccccttaagaaacaattcaaagttatgcgtaagaaggaaagaggcgtcaatgatgaacctagaatgcgagatgtattaaaatcagtcccaaaacagcctgtaggagagctcaaagaagtgaaacagatgctggttgattctagtaacccaattaccatggtactaaagagtgaatcattacctatgcaaaacctacaacatgctgttgatatgcttctgtattcttctttcctatattacttgtctaccatattgcatcacaaagggcacatgggctctaaaagacaagttaatatgttgcctactaaagacttcaaatagcttaatgaattatatgaaatcagtcatgatctttaaattaaccaatgcataaagtaggtttgtgcaaatctcaacataggttttaattgtcaatgttaaagagtatttacacatagtttatatgcctattgatggttatttaaggtacatgcaagcacaaggaaagctaatgcttgaattttcaaagcaaaaaattgctacaatcaatttcaaagttccagaatcctacattattatgataagaaatatttgaaggacagcatctacaatttctttgtctcatggaaacctttgttatcatgttttagaaagattgatttgtcaacttccaatatcacatttcatttggaaagaatttttttttttataaccgatgaaccttccattaccaagcccttaggactctccatggggacctaaacctcggggtgctgaccgtcccacaacaactagcactgggtaaattcagggcatcatctgtggcaatatttgaattcagaaccatgtaccacttactcggaccacacttcccagtgtttgccttgaccaattgggctaccttagcgggtatttcatttggaaagattttgaaattctttattatgttagcaaaaaataaacttgaggaatgcttagaagatctcaactaatggttgcatttagtaataagtttacaaggttctaatggagagttctatgttatggactatctatccattcgtgtacatctaggaagaaagaaatggtagaaggcattgcttaggatttcaattgaccatgaaatctactagaactcaaggtcaaggttttttttccaaagtttgagagaattgatgaaaatgaatctccaagatcactcaagaaagaaataaaggaaaataaagaaatcctaaattactcaagggtaattaggctattttgtagccttttaggtatcagaaatagttaatagtttgtgtaggacctccgacactagcaactctcctaaaagcaattgttgttaggaaaagcgcataccctagccttatagtggattcacccaagcgcctatgacatttgaatgcaaggggagttgatggacgtgaccaacctccgatctaccaacaatctccccccagcaacacccttagggttcgaacccgtgactttagctttgataccacttgtaggacctcgagttggtagaccaactctcttaaaagcaattactgttaggaaaaatgcatatcctaaccttataatgcattcacccgagcacctatgacattcgaacacaaggggagttgatggacatagccaacctccaatttaccaacaatttgtatttgaattttatttataatttggaaagctttaaaattttccttaaaagaagtttgtaaactttttgttttctaaattaatctctatttttaaaagtttttattttgagcccttagaatttaaaaatcttctttattagaaactttattataagaagtttctataaagtaagtttataattttaccaaagtaaataaagtttttgattttttaaaaccttttttagcagatttaatgattttagggaaggaataaaagtccttattagttactatacaagttagatttacctttcttagtttaattcaaattatatggttttctaaaatctatagacaaggctaattgatgtaaaagaagaaggattgataatcgatgataagtgacatgctttgtaactctcaatggtgaggatccattattttcttctaaatcaggcaagattttttattgcttcatctttctctccctatattttattctgctttttcctgctgccataatttttattcttgttcctttccttaaaccttaaaacattgaagattgaggccctaacccacctatttgattatagatagccatcctagggttgtccgacatcaaagtgacttttgtcttttgacccaattatattagaaatttcctgaaagatatcgatacatctagcaatgacagtagctgcattcctaaactattaaagtatcgcaaatcatgttggaacttgagtatatttatttagctaacattttgcctaatagtctctaggtctctagtcatgattagaagggtttttattgttaatattttttagctaatattttacctaatagtctctggaatcaaatgatatgattttcagcaacttttttttttttttggataggcatcttttttgtattttatggactatcatttattttataattgaaaaacatctcttatattgtgcaggtc

SEQ ID NO: 11011 - DNA, 8779 bp, Vitis vinifera
  Intron number 1 from transcript GSVIVT01024808001 (locus G SVIVG01024808001) derived from phytozome v7.0 (chr-ID chr6 ; pos 6785578 to 6794356 reverse strand)
ccaaccctctgagctcgcttccagatttcatctcggtcagtgttcgtttcaaaccttttttcgtgcattactttgtttttgtcaagtttgtgttttgcaatttttattgcctgaaagtttggaatgaattgtagttgtatggattgaatgagttttttttttttttttttgtggttttagggtttcgtatcttgcagaacctttgcttggtttttgaggaaaaaatgagtgaaagaggagaaaattaattatattgtgttttatatctgggttggtttttgttctgaaatgaaaaactgtgctgagttgtgtgcagattttttatttattgggctcagatgatgaaagagaaatttggttatattattttgtgtttttttttcctcagcagccaggcgaggttaatgcttgcccttttattttttttcactgtctggaggttggggctggttgggggtgttattacaacagtagtttgggtttcattttaatccttattttagtgtttggcggctcagaaaaccaagggaaagaaaaggaattgcagttttgaatggtggatttttattaaccgtgaaacgaggaaacaaaaccttcgctgaactgaatctaatacaactattagtttctatttgctctctcaacaatcaattgggaaggtagggggttattccagggcttttcacaatgatctcaaagcaaatgatcaaattattgttttatggcaagctgggaggggggagcccccctcttcttatttgtttgttttggtagtggaggctgttacttttcttttgaggagggtgattttatacaaggctgaaggctgggaggtagggaaggagagggtgtggaggtttcctatcccttctttgtggatgatgctttccatttttgcaatccctgcaaagaaaaattaacttacttgtgttggattggtttgagatttcctcggggtttgagagttaacatggagaaaatgaattagtttccattggggaggtaccgaatatagggactctagcattcttgataggttgtagggtagggaagttgcttaccatatatttaggtctactcttggagccccatttaaatgatatgtggtttgggatgtgctagaggaaaggttttacacaaagttgtcaaggtggtagcggtaatacctctctaagggtgggaggcttgctttatttagaaatattgtttccagtttactttttttattcatgcccctcttcattgcccgtagagtcacgagcttgatacttcaaaagatccaattgaattccctttttttttcccttggggggtggggttggggggtggctggtgccttcgagtagaaatcccacatagtaaagtggttgtccatttgtaaggattacaagaaggtgatctaggaattagagccttatccatcttcatcaaagtcttgtgttgaaaatggtgttagagttttgcttccaaaatggactttctatggaggcagatagagggaaaagtatggcaaagagtcaagaggttggtattctcacaaacgaagagaggctatgacatttttttttgataggttggaagggaggctatgacattggtttgtggaagataattaaaagagggctatgacattggtttggtagactttgtggtttggtagcgggtttttgtgtcttcatgccttctttgtcttttgttttctttgtatacgacgtgtatactttatttcgttttattcgattcttatttacctatataaaaaaaaagataattaaaagagggtagggggtgttccatgtcaaaactaagttagagatatgcaataggagaagagttaaagttttgacaagatgattggtgtggttgctgttgatgtttgggaggctttaagtgagcaagggctctgaaattgatgtttcttaaggccattccaagattaagagttggataatgttggatgtttgtttaggaagtcctatgaggagagaggagaggttttccgctgaaaggaggtttagagcttgttgtccctttccaaggcggggttttttttgggtgcttggaaggtagtttggggaagcatttaaccttagatcctaaaaaaaaaagatgacgacttcttgttaatcattgctatatgtgtaagagagaagttgaaccgactatccatatcctcatccacaacaagataataagaggaccatggtatcttttgtttgcttgtttttgctctttgactctccctaccttagtgagagaaattgttcaaggttgaaatgggtgttttgtggggaaaaagaagaggaaagtttggagaacaaccctctatgcttgttttagatcggttggctaacatgaaggcaatagctatcctttgatggtgtgaagtgattggatcacttagtaaattttttgtgtacatcctcttctaatggtcccatcaatgtctttttaatggttctttgttcttgttgaacttcattgagtggttagggtctagatagctatttttacttgaggatgtttgtttttgtttttgggtaaattataaaagtcatcctattatttgttttaagcaataccaaccttaaattatgcctaaatgtgtgatattttttttgataggaaaaaataattatgtaaaagtgcctagcacatgcctaaatgtataatgtatttttccattaagattttcattaaatgttgatggtgtcaaaatattgtgtgaatggccgaataccttggccttgagttttgtatattatatatagactttacaatgatgctatacatggaaagcaaataaaagcaaataaattcctgcatgattctagccctatacatgtaaactataatctgtcaaataatgtatgctaactgtatagaataataaatggagaaataaggaaacaattgtgggctaaaataaggaaagaagtgtgggctaaaataaagaaagaagtgtggacagcaaaactgtcctttgacagatggaaagctcgtacaacaattatgtgggtattgacataattttttttcttttttttgtgatatgtttggatatgtccattttgtctacgcacttgttacatgagtttttttttttttttcatcaatttctaacggaaaatccaaacagaagagcctatttgacatttgacataatttaaggttgacattgctataaaaaagtttaatggataaattgatacttgagtgaaagtacatgggtgatttttgtaatttaccctttggttttttaccactttggctcattttgtatggtatgccctttatgtacctaaggtgcgctccttctttctattaaacactttccatcaatgcaataaccatttgcctatccaataaataaataaaaaatggataaataaataaattgtgtgtacaaccatggaaaaaattgaataaagtattttttattctattgagaaagattttttctaatactttacaatatgaatagatgcaaaatatatataggaaaaagaaaaaaaaaatgcacaacagggactcttagaaatcaatagtaatatatgaaaattacattaatgaataatctttattttcctaatcctaatcctatccttaactaccagatattatgagtttaaattagaaaaaaatctcggccttaatttgttgtgagggatagtaaaactctcatagtattcatcttggcaattggtgcaaatgtctattgatagtaaattccatatgttcgggtatatccctttgtcaccaatcttgccttgaatcgatcaacagtcccatctagtttatgcttcaccttaaaaacccatttacatccaacgtgaggctttccttgtggtagcttcatcaaatcctaagttccattttttttaagtgccctaatttcatctatgatcagattcttccattcaggagtaatgagggcttcctacactaacttaggaacaactacattggacatattggacaaaaaagctttatatgaatgtgggagacgatgataggacacaaaatttgaaattggatgaagcgtataggatctagttcctgttccaagagtgatgggtaaatcaagatcatcaacaacaggagaagaataaaaatttcttgtgcattctagatcaatggatattggtttgggttcttggtagtgcactgatgattgaatagtcctcctcggatcagttctcctagagtagacatgaagcttttgttgctgcaaatcttctccccttagttgttgtgttggcattctggacaagggagacgacaaaggtgaggaaggggtaggagaatggataggtcattgaacaaaaatagaaggcattctctcgagtgatgaggcgggtaaaggaatggtttcccataacgaggcttcactagaattctccacttgaaggtgagtgtgggcataatatggttggttttcagaaaggtgacatcgatattgacaaacatctttttggtgatagtatcataacacttgtacccgttctcgggttggggagtatcctggaagagacatttaatggctttagggttaagtttgctatgatgaggatcatggtcataaacgaatgttgtgtagccaaagatttttggaggaagaaaagtgaataattttgtggcaaggtaaaattgagtgagtgaaagtagacataggtgttgcaaaactgaggactcgagaaggcatcctattgttttgggacacgatttgtgaacatgagcgattaagctaccttaagaaggtaactattttttctttctgctattccattttgtaaggatattttgatacaagaagattggtgaacataccatttgttgaaaggtatgtgccaaggatagaggaatagtattatttcccattttcagtccataacacttttatttttgttccaaattggttttgcattatctcatggaagtttttgaacactcaatgtcggatttttcctttaacaagtatacccaatacaaatgtgtgtaatcatcaatgaaattgataaaccattgtgtttgtgcaatgttgttcactttctagggtccccatatatcactgtgcacaaggacaaaaggaacatgtttttcatatggttgtggcagaattgagccctttgatgtttggaaagttcacaaaacacactgaagttttgaaacttgtttttgaacaattttggaaaacaaacgctcgaaataagaaaggttgagatgccctaatctaaaataccataacaaattttgtttagtcgaagattgatttgccacttgagcttgtctctccgagagattttcaccctcaaagtagtacagcccatttatctctctagcactaccaatcatccttcttgaatccaagtcctagaattcacaacaatgaggtaagaatttagcaacacaatgactatctttagtaaatttaccgattgaaaacaaattacaagacaaattaggaacatgaaaaacaaaatttaaagccaagttttttgaaataggtatagaccctttctgagcaattgatgatgatgttccattagcaatttatactctttgtctcctaaaacatggaaaatatgaagtaaataaattagaacaactgatcatatgcttagaagcccctaagtcaatgatccaagagactttattacttagaatgacattgagagcattttgaaattaccttgctgggctaaaacacaagtaggggaaggatttgattgactcttagattggttgatggcacggtgtggtaaatcccattgctcctttgtgaaaggcttggcctcttggcctccatggttcacaattttctgttcagtaggtctaacattaaaggcatgggtagcacctccattttgccttttttgacttggcgcattcccaggtctctcgtgaagctaccgacaagtttctctagtgtggtgtgactttttacataagtcacaccacatattatcatgctggttattcctcctgaaattcctgggttgttcagcagtaagagctttttcagtgtcgttgatttttaggacagaagtctcagtagtcaggctggaatcctcatcctttttcccattaacttcctatgactttcttcaccttgtataaggatgaatgcttcatctagatcaggggaaacttcctttcccaacacatgatcacaggcctaattgtattgaggatttagtcccaaaagaaactgctaaactctttcctattcaagcatctcttttacccaccttgcatgagttggtgactccatttctaggttggtgtacaaattcacttcaattaacaatcccttgagaatattaaaagatttagttacacttgaagctccctgcttggttttctggatttgtctcttaatctgaaagatttgggaagcagatcccaccttcgaatacgtcttgctcgctgccgtccagatattatgcactgtagggagaagaataacaagggaattctcaatttcccaagcctcataaatcgggtctgtgactactggggtaggtaaggcaccattaacatacttaaatttcccttttcccatcaaagagattttggctgattgagaccactccataaaaatttttccattcaatatcatagtggagatttgaagggtaagattatcattatgtgaaggagtttgagggtttgtggtgctgggttttgaaggttctgtcatgtttatagaagcaggacaggatgaagtcggactggattaaaagaaagaatctaataataaggtaatatgaatggggttaacctggtttttaggctatagaatgaaaaatgaaaggcgtgaatgatgggctagaatcagtttgtaatactcctcaatagaagaggaaaaagtgatcagcaaaatgacatgaaaaacagggcagaaacaaactgtaatactttctcaatggaaggggaaaaaacaatgagtgaaaggctgatatgaaggggcagcatcaagtatggccaataaaacaaacacctgatgaccggtatagtgcaatctttgtttccgatgatgaaaaatagagagaaatataatactgttggcagtatctattttgtggatgaaagcaaaggagaacagagaaaaaaaagaaaaatctgtaaggaacctgctttgatatcatgtgttttttttttttgataagtaaaagaagtatattaaacgaaaagaggaaacaccaaaaaccggtgccctctaggtatacagggagtatacacaccaccttccctaactaggagccaaccagtctacaaaacttacaagagaagaatgactctctgctagggaacccctgacccaaaaccaaagattacatacaaaagaatatttcaacctttgaagcgaaaggtcctcatccccaaatgctaacctatttctctccttccaaactgaccaaaaaatacataaaggcgccatctgccaagccttcttgcgtctttttcccacaaaccctccattccacccaagaagggttgtcttcactgtacacgaaagagtccaagatattccaaaaagagagaaaaggaggttccataggacctgcgtcttgacacaatgcagtaaaagatgatccactgtttcttctttagatagacagaggaagcacctgtttgccaaagagaaccccctcctttgaagttgctcctgtgttaaaactttaccccaagaagcctcccaagcaaagaaagctaccttgggaggcactcttgccctccaaattctttcactagggaacaaagaaaggccccccggctccatcatagaataaagggatctgacaaagaaagccccattatttgaagctgtccatatcactctatcttcctcctccctttgaaccctgaaagctttgatatcatgtgttccgccatgaagaaaactgaataaaacattttttattctattgagaaagaatttttctgatactttacaatatgaacagatacagtatgcatgtatgagaaaaagaaaaaaaaaacgtgtataacaggaaatcctagaaatcagtagtaatatacggaaattacattaaagaatttccttattttcttaatcctgaatctatccttaactgctgtttttatgagtttaaattaggaaaaaatctcagccttaatagtccaagcactagagcattcacatggttgaacctctgagtggaagaaaagaaaatgtttatacttgcagaaaaaaatccagtgatgagatctccaaaaagtttcattagggaatcactgaattcataaacaggcattcatgaataatcttttggagcttgtggaaaataattacaaaaaaggagtatatggatcacaatttggaagttatttgtaacttgcagttattaagattataaagaagagcaaaaatactttgttgggctctgtttggtcctttagaaaggggtttttataaattgaaggtgttgattctttctccccttgcagctttgcataagctcccatttttatcagatttatagtccattctcaaactatcaggtaaaactataaagacttcatagcagtagcactaaaaatctttggggaaattaagggtgacattcgtgaagtatatggcaacagtatatgtagccagaggttaatgcaaatgttctttaatgaaaaaagttgaactatattttgtgaatagaatttccatatcaaagtgccaattattttattcttcctggtaattatgtttacttttgtttcagccacctgcatttgctagggaaacacctgaaactat

SEQ ID NO: 11012 - DNA, 1483 bp, Vitis vinifera
  Intron number 5 from transcript GSVIVT01017244001 (locus G SVIVG01017244001) derived from phytozome v7.0 (chr-ID chr9 ; pos 5863229 to 5864711 reverse strand)
gaccctgagctgaagattgctgtaaaaaaattcaggtaagttctctctacacccgaagtgcgtttattgcttattgataaccagctaaagaactacaagaccctgtttggaatggcttcttggaggtcaaaatctctatttcaagccctataagagtttccatcagtgttggagtaattttaatagaagtgctttttatgcttaaaatgagcttaacatgaaagtgaggacaatactgcttcttatagaagttcttctttagcttatttagaaagttgtttcatgattaatggaatttttataatactaaaattgcccctctgaaatcatgacttcactgcttcagtatcagtttatagtcaaagcaaagcaagaagctattttagacggggcctaagaatcttatacttggattatttaaagccaacctggcttaataatctagattccactttctgctaatttctctattaattcaagatgcgaataaagtatagtggtaattaacaagttagccatcacaattcatgtactgattatggttgaactatgtgccatcatagaagtgatttggtggtttttgacatgttttatatctggagttgtctgtctcatctcgggtgtttgaatgtgcgttttgttattatgaaaatgcatgtcttttcaaaatttgtttggtcatatttaagaacttatgaattttagcagagaatatctagtagaatattgtggcccttcggtttttccaagaaaaaacatcaagttattcatatataacttgaaacaaacaagtttcttgtaggatttttttgttgcattttgcaaaacagagtcagaaaaagtacaaaactgtaaagcattaacgaattccggtttgctttttgtgcaaggtaatattagtttcttttgaactatgagtgcagagagtgaaatacactctgaagactaatcttttagcctgtagaaatcaatgacttcaattttgtactgtaaattggtacacctgcatctcaccatgtcaggtacaagtgaatacttgttctgacaacttgttactaataaattctctttcctctttgacttttaacaccctttccattgttcaaattctcagaatgttcaacctctgctgatagtttttgcatcttttgataccatttgtcaaatgtgttaggtgttcatgtttaagcgacttttattcactaggggatttggtgttcaaggtcatggctgatgcttttgaatataaaaaaaaatcagctttaaatgcaatttctttttcccagtttcatatcatggatgatatgatcagatgaataaaaaaaatagatcctttgattggctaaataacaccctcattggcttcataaaataccaaattattaaaaaatagatgatttgtgatgcctgcatgtttcactaatcgaacactctctccatctctgcagccactggcccacatttccacaaatattcataaagg

SEQ ID NO: 11013 - DNA, 5664 bp, Vitis vinifera
  Intron number 12 from transcript GSVIVT01000179001 (locus GSVIVG01000179001) derived from phytozome v7.0 (chr-ID chr 7; pos 15923881 to 15929544 reverse strand)
gacaagcaagaatttggagtacaagtaagctgcctgtagcataattgcttaatgttttctgttgagtgagagaaagaaaatagtgtcttgttgcccaaggaaagagtacaaagcgtatatatggactttacaaaataaacaaaatgactaaactacctcttaccaaataaccattaataactctttaacactttacctcaagttggggcatatatattatatagacccaacttggaatacttgatagaaaaagggatttctccttaaagctttagcaaacgcatcgcctaactaatcttcaaacttgatgtaagtggttatcactttcttgctcattacaatttctctgataaaatcacagtccatttcaatatgtttggttctttaatgaaacattgggttgcaggcaatgtgaatagcagtttcattatcacagtacatagtcatgcatttttcaagagaaaagttttgaatccacattaattcacacattgtatatgccctagccttatattcttttttagcactagatctagtgactagatgttgctttttactccttcaagtaactagattatcacaaacaagggtggaattggaccccctgtcaattgaggatcttgctcagtttgcatccaaaaaatactcacaagatcaaggctagtgtgagacctctttccattgagtactctcatacctttagtacctttgagataccttaggattctacatgttgtttcctaataaatctgcttaggtgtgttcatgaattgacttattgtacccctaggaaatgtaatgttaggtctgatgactatcaaataaatgagcccacccactagattttgatatcttcttttgtgtgaaaacacaagactatcatctacattaagattcacattttgctccataagagtgtgtgttagctttactcctaacatgccgatttcattaagcaaattcaatacatacttccttcgagccaaaacaatctcacttctaccatgtgtaacttcaatgttgagcaaataatgttacaacctgagattctttgtctgagaggtatttttcaagtaatcgttcacttcttcaatactttaccgtcactatcaaaatgaataatatcatccacacatagaatgagtagtacagagtggtcagagttacatcttctaaaaccaaatgatagaagaatagcactcgatttatcaaaccaagctcgaggtgattgttttgatccataaatagccttcccttgagtaacaaacccacgtagttgctccatatagactttctcactcaaatcactatacaagaatgcatttttctcatctaattgatgtagactccacccaaaatttaaagctaaggaaatatggatgtgtattgaattaagacaagcaataggggagaaagtctcaaactagtccacgccatcagtttgagtaaacgagccaacaattctataattccatctagatgatacttaatagtaaaaacccaacaacaacctacaacatgctttccttgggtaaattaatgagttcccatgtacctctgcctagaggagcatgcatttattcttccatgaccttcttccacgaccttcttccacacaatatgatttaaagcttcttgataagacttacggatagaaatagaagacaagacacgagcaaaacacctaaaaataggggaaaggttatctaaagacatataatgaataagatgttagtgagtacaatttcctttgcctttccttataggtggcaataggtcaagttgtgttaagttgaggttagaaatagtgaaaatttactaacttgaatacaacccttttaataattgtgttaggatgacctgatagaaacatgacctatttattacactggtaacacggcataacttgtttaaccttgtttaataaataggttaagttgaattgtgtatgaattgacatggataactcgttaggactgttctaacctaatgattctaacccattgacatgattctagcctgttaacatgattctaactcatttaaactatttaaaatttacaaatatattattttaatgctttttagttgcaatttttaatttttttttaaaatatttattaatttaattatatcatttgaacatttttttttataaataagagaatgtattaaatagagcaactagcgcacaagagtatacgggtcgtgtacaatgagcaccaaaaggctaaacaaaaacgaggggaaataaaaaatactcccttcctcaacaaagacccaaccaatctataaaatcaaccaaaggcatagagcctccacctatagacaccttaacccacaaagatagattgttaaggaaattgtttgtttactttcaaacaaggatctttgctctgacattttctcactttcaaaacattttaagtttctttccttctagatggttcaaaaaatacataaaggagcagctctctaagccttcatgcgccttctacctacaaaagagccatgccacactagtggagcctccttaattgatgtagacataacccactaaacatcgaaaatagataacactgactgtcatgataacctcaccttattacaatgaaggagaatgtgatcaatggatttcgactcttctttgcataagacacatctactgaccaacattcaccctcttctttggagctaatctaaagtcaattccttattctagcagacctctcaagtaaaaaaaactcaccttaaatggaatccaagagttccaaataatctctaatggaaatgggatgacacaatttgactctaaaagagaatagagctcttttatagagaaccttcctttgctatcacttttccactactatgccctccttcttctccctattcattgactaaacttggagtttacacaggaatcactttatgacaaccaactcccaatcatttaggttcctaattgtagaggagagattgaagaataaaaggtagaaaattcttctttttgatttttatgtacaaagacttggacatacatatatatatatatatatatatatacaaaaatcctaggatccaaattagggactttcctaactcaattataacaaaatccctttgatcatggattgcctaattctttcttcagaatcacaattttccttatttcattcttccacactatacttccaaaagtcatctattcacatttctttcgagtccgataaggcaaacaaggacgagaataacacaaataaaggcttttcattataccaactatctttccaaaacttcatcttgctcccactacccattggaaaggagacttttgtgttaaaaaaatcccactgcttacttatagttttccgtaacccaacctcataagagtctctcaccacacgtaaactccaacccccttcctcctctctaaactgtcccattttgatcttcctccacaacgaatctctttcattggagtaattataatatatttataataaaaataaattaaaagcttaattttacacttattcaatgttttaattataaaatatttttaatctttaatgaaatatgtacaaatgggtcattttaacatgattaggttaaataagtcataaatggctcggatcataaaaaagtcatttgaaacgtttatgttaacaggttattttgacataattaagtaaataggtcattttgacacaatcaaataaatgggttagtttgacatgatttagaaagcagattaaatgggttgagtaggcaatccgaacacgacctgtttattaaatagggtatacaggttgttacgattatgatatgaacatgattatacttaatttgaacctgctaaaatttgtattgttttcaaattgtgttattgtgtcatgttagaattgctacccctacctttcctgagtgtaacaaggaggtttgactcattaggaattgaggtaatgaaaatagatggtcgtataggattatctactgacaagcccggaggaggtagagactgaggttgatttgttttaccatctctagccagtcttttccattgatgcacttgtaatggtttgttagtcttagagaagtatcaataacaacaggaagaggaataaactgaaactgaaataagtcattttctaattgtaaatcgtgatcagaaaaattagtcttaaagaatattgcattggcattaataaagtatttacgagacatgtgatcaaaacatttgtattgtgtttgggttctagagtatccaaaaacaaaaaaaaacacatttgaagagcgaggatcaaacttgtctttatttggagaaaaattatgaacaaagcaaacacatctaaagactctaggaggaaagataacctatggtgtttgtcaagttaacacaactcacactcaggcttattggacaaatttggagacaatcctaatgaatgtaacccctcaaatgaagcaggacccaatctataatgccactgaagaggagtaacaaatgaagaaagagcaacagaatgacattttttaataatgagactggaatataaactgactattgagataataaagccatttcacttgaggggactaacgatgtgttagaagacttggttaagtgagaaaagggggaggactgtccagtcatatgactagaagcgtcaaaatctctacccaaggggaagaagactgactaggagtaagaagagcatgtgcatccaaatctgttaaggttgtggtaggagcattgatgttggatctcaaggaaatctatgaggactgttgcaccggtttgttataattatctaaagataacatgatactccctactactactacctgtaggcgaagagcatgtgcatccaaatctgttaaggttgtggtaggagcattgatgttggatctcaaggaaatctatgaggactgttgcaccggtttgttataattatctaaagataacgtgatactccctactactactacctgtaggttgaacatgagtaggaacatcaactctatcattagaagagaaggcaacctgattagcccatgtaggacgaccaaacttatcccaacatttatcataggaataatttttgaattgttaattgatgttagaggaacttagccaaaactattttctatccttaacatgtgtcattccacattttcataatgtttgacttacatttcctttttcaacactgttaaagaatgtgtagagggtgtgggtttcgtatggtggcatttgagcaatgaatctatatgcatcacagaagggcccattaaaaagaatggtagaattctattcaggaatttaatgtttaggatttttagacaatgacaacagtgggaattcatttctcttatcatttagctttcaatttcagtcctaccatcttgtgcaggtttgtgcgtgcatgagtgtgtgtgtgtgcgtgtgtttttttttccttctgtttgtttggtttcttctctgtaatgatatttgatattcccttctagttattgttctatttgggacaatttttttcctagtttactaagatcattcctttatttagttttactgcagtttgaaaactttatacctcatgttatgggtattatttttgtttaggtgaactaaggagcactttgagcaaacacaaagga

SEQ ID NO: 11014 - DNA, 1366 bp, Vitis vinifera
  Intron number 2 from transcript GSVIVT01014707001 (locus G SVIVG01014707001) derived from phytozome v7.0 (chr-ID chr1 9; pos 8874327 to 8875692)
cttccattaggaaggcaaagcctcattctgcagaggtatttttgatacttgttttagaagttgtaatctcattaagcaggcaaaccattaaaaccctgtccatagttcctgataactttgatggtcacgaataatagaatgtgttttttattgaagtaattttttttcctataattttttagatgctcagataatatatcttgttgaatccatatcagatgtctgacctgtccaaatttcctaaactaaaagtactgactgtacagtggtctatggtagttctcttctaaaaagctgtatttgttgtcatgtttttttcaattttcaggggatgttaattgttatcgttaaggcatgttctgaaaattttttcccctcttcttttgatcagattttgtaaatttgggaaggattcctcatccttcacttgtacttttaaatccatattaatggccatgtttgtttctgattaaaaaaatgttctgaaaatttttctcgctgcacagtcatcttccaatgaaggtaaattttgaagataaaaatcaatattaattagaagtccaaccaagggcttttaatgatgttgagcagtccatccaagcaatcaaatccaattttatgtatacttttgcaaattgggctatggtatatagaggactagacaacaacgtctatgttagattttatagaatggttgagcttaaagtaaggagaacggttttttgtttcttaaccttctagtgtatattgggctttttttgtatacttgtgtatactgtaaatgttctcttttgcctatcaatatatatatatcaattagaagttgtgtaataaacgaaattgagaatagaatgatagtgttacctgaaaattgtttgatatgtttacatattctgcttttctggtatatttattttcaattgcttttttattatcaagattcaagggtttttttttttttttttgggtgggggggataggcaatattcaagtgaacatcgcaaattatgatctgcagatgctattttctctaacatgagttatagtataggttttcctttaattggatgagttatattatagtttctgtggaattaagaggcttccatatatctggaaaattttctgggaacatatttctgcagttgtagatgaaccatttttggtgacagtcactgctttcctactaattaatgaagccccagagaagtccaattccattgaatgcaatttaggttattcttttttggaaacaagggatcaatggaataattatttaattttgtgcttgtattcagtttcatgacaattttttcgttatattatgttagagagtattggccaaggagacacagctccacctggc

SEQ ID NO: 11015 - DNA, 3387 bp, Vitis vinifera
  Intron number 2 from transcript GSVIVT01027072001 (locus G SVIVG01027072001) derived from phytozome v7.0 (chr-ID chr1 5; pos 18165480 to 18168866 reverse strand)
acaagattgcctagagaaaagcatgtaagcctttgcttgttttaatatgttattccacatatgttgtttcttttgtttatattgcttcagagaatcagaactatgttgctaataccacttgcatttgtccttgattcctgcaagatgtgttactctgcagaattgtaaggaaggatagcttataactggctcattggaactttattctttttatttgatttttatattgaaatttaattgtgtgggggctgctttttctgcttcctaatctgcccaaaactatttattgccctagcatacaaactatgtgaatacttttcttgcactggctgcaaatccaggattttacttgagggttggtcgctaattggttgttgtcttgcctgagtataagagtgttgtgttaggcaatcttgttatcatacatcttactttataatcttgttggatgttcttgtccatatcctttttatgagtggctacaccccctcagcacttttagcgaattctttctaaccaatgtatgcttgcttaccttttacttataaaaggtaagcaaaaaaataaagggtaaacaagaccttagagtttggaacaaagaggtcctttagccacattttggcagttaaacttagagctctaaagcaggaccttagagtttggaatacagaggtttttggtaatgtctctaccaagaaacttgctgctttatttcaactaggtttttgggatgcaaagaaaagggaaaagtctctctctatggaggaaagggaggttagaaggagggtggtggaggactttaaaaattgggcagctttggaggaaatctcttggagacaaaagtcaagagaactttggcaattatcaaaaaaataaaaatagaaaataaaaaagagaactttggctaaaagagggggataagaacgccaattttttttttttttcacaaagtggccaatgcttgaagaagaagaaattttttggccaagttaagggtgaatggtgttaattgaggaggcaaagattaaagaaggtgtgacaaatgctttttggatgatcctttttgagtcgagggattggaaaccaaccattagcgggctggcctttgcctcattgcctagcatagactctcatgccttggagatccccttctgctctatcaagcttgaaaggggataaagctcccgatcggatgacttttccatgaccttttggtagttttgttggaatgtggtgaaaagggaagtgattggattttttgcagaattccatgagtttcagactttctagaggagtttaaatgccacttttattgtcttggttccaaagaaaggggggatagaagaccttaaggacttcaggccaattagctttgtaggaggcttatataagctcctagctaaggttcttgccaactgcctcaagaaggtggtgggtaacttagtgttggattttcagcatgcctttgtggcaaggaaacaaattttggggatgttgttttgatcgcaaatgaagccattgattctagagttagacccaacttgagaggggtcatttataagttggatattgaaaagacctatgaccatgtaaactagagttttattcttgcagtgttggaaaaaataggttttggctccaagtaaattagttggattatatggtgcatctctacagtttatttctctgtcttggtcaatgggtcccctttaggcttctttcaaagttctacgggtttaagacaagaagatcttttgtccctttacatattcatcttggcaatggaggttctttccctcattcttatgaaggcaaataagggagggtttatcgatggctttctagtaaggggaagagatggagagggggtggaggcttcccacttgttgtttgcaaacaataccctcattttttgtgatgttaggaagaaaaaccttgagtacttgagttggattcttatgtggtttgaggctatgttaggattaaagattaacttggagaaaagtgagctcatccctattagtgaagttttgaacttagaggatcttgttggggctttaggttgtaaggtgggtgccctcccaaccacctatttagtgcttttgttgggagcccctttaaagtcctctagggaaagaatccaaaaaaagattagcattgtggaagagacaatatttttcaaaaggtggaaggttgactatggtaaagagcactttgtccaatttgttgattgacttcatgtctctttgtgtcatcctacatagggtagctactagattggaaaagattcaaaggaactttttgtggggaggaagggctttggaacaaaggccgcacttggtgaattgatctattgttcgcttgaagaaacaaaaaaggggcttgggtatcagagatttatccatcctgaatgaggcttttttgggcaaatggtcttgaagatttgcaattgaaaggaaccctctctggacacgagtaattgtgggcaagtatggacaagttgagggggggtggagcacttaagaagtgagagaagggcacagtgtgggggtgtggaagtcaaatcagaggtagctgagaagtttttaagattagaactaagcttaaggttgggtctaggaatagggtgaagttctagaaggacaattgatgtgggggttcatttttgagggaatcattttcgaagctatattccatagctaccttaaaagatgcttgggtgagtgacctttgggagaatggtagttggagtcccaggtttactaggcagttgcatgactaggaactagaggtggaagccttctttaggaggttgcctgcacaccccatctctttggagactaatgacattatggtttggttacctacaaaggatgatactttttttgttatgtccttctacttctctttgaaaaataagagaatggagttgttcccttatgacatagtttggaattcttaggtgcgtccgagaattagcttttttgcttatgaagcaacttgggtcaaaattttgtctctagatcagcttaaaaagaggggttggaggatttctaatagatgctacttgtgtaaggaagaagaagaacaagtgaccatatcctcattcattgtccgaaagctcttcttttgtagctgttgatctttgcgcttttcggtattcaatgagtgatgcactctttagttagagagacccttctaagttggcatgggtcctttgttggtaaaaagaggagaaaagcaggttttttattttttttatttttttatacctatatataaaaaaaaaagttaatgaagctgtttttagtttattttattatatattcttgatttcttatttgaaacaatgctttgtcagctgcctaagcctaaaccacctacaaa

SEQ ID NO: 11016 - DNA, 3456 bp, Vitis vinifera
  Intron number 43 from transcript GSVIVT01037993001 (locus GSVIVG01037993001) derived from phytozome v7.0 (chr-ID chr 10; pos 12142100 to 12145555 reverse strand)
gctaaagtcaggtttacaattgtatgtctctttatttttcatttccttcagttatgaaacgtgttctctgtttatttttcatcttgattttttaggttataaaatactgtcctgaacaattcatgtagagttgtttctttcctcatatatatactagtaatatttggttaagaatatctcaatcccattttgcatgtaaatggtttttttttttttttttttttttttttgttgtcatgtaatgtttatgaagtatctgtttgtacttgtttctattgtttttgttctcctatccgttgaatagacttttgacattgtaacaacctttattttctgatagaaccctgcaacctttagtaggattgaaatctggccttgaagcttttttttttttttttttttaagggggaagggggaagggggaagggggaagggggaagtggaaaggggggaccacattttatgaactcatctttgtcatcaatccaggaataaaatactcactagaggaatgtttaggataagacaaatattgcagtctggggtgtagataataagttgtttttgacaaggcctcatcttttatagtgagtttgttttccttttcttctatggatgttgacatagttccaatttccagaccagctgcttatgtattccattctgttacattgggttttaataactctcatgtgatatagtgaagaaaccagaataagttcaaggtgggaaagttcatcatgaagtacaatttcagattgtagtaaagaagaatgaaaaatgtctttgtacaatatgatttggagaagttttttttctaggaaaacaaacagactagggaagataaccaatcaagagttggaaggacttctagcacattttcacttgattttataatggcatcactgctaatttaattaatgaggagaaagaaaggatatatggagcaaactagagctcttgttatatggtggaggatttatgaacaagttgcattcgaggaagtaattttagcaagatgtatataaaaaggcaaaataatagtagaataatatttattatatcgctttagtatgtttgtcatcctgatgaatctattgtactcaatgaataatagaaactagttcttttggtgtcacttcctctgtcaaatgaccacttagttccttactcttttttctgagaagatgaaaactgactgttgctttatcagcaagcaaggtgcaaaagaaatccttgggtaccttgtggcaatctcaattcaggcatgataatatttcaacaggtcgaagagactttgacatcaattaagatgaaatggtcaaaatcccatgcaaggatgtgtgggggttctactgccactagaaagaccatgacaggcaagctaggtgcagtatactaaaacaatggcaagaaggggatacaggcaaacataaaaagtcatcagatatagtatcttcacaaagaattcatatgacagcaactgatggttggttttaaccatatgtaccttgcaatgatggtcctcaagggttaaggtggttcttctaagggcattgaaatgtcactgtgaaaaattagaatgcccattggcctttctggttattctaggtgatggggggtggttatgttgtttaagataaacttattatccttggccatgctagacagtggttgcctctacatggaaaagggcaaggctttgaagggtagaacaggtgctttggggatcaagaaggtgagaatgttggaaatctatcacaggttaggttgtagtctcccaaggggcagagtatagaagagatgaggttgacttttttgtagattgctaggaagtaggcaaaacatgacacaactgtacatgtgcaaattagaaacctaaagctactgggggtggtctctacagattcttcaaggttgctttaaagaatactagccaaggtggagattcttttgtggatctcttgctttctttgggctgaggggtttcttctactaattgcctcatctgtgggaccttacagttttctgcatcattggggtttgggtgttacatccctgaggcaaactttctctcctagtagtttattggtatttttatcattgatgaattttcacttatcctcaaaagtttttgggctactctgtagccagattacccattaaggaatgattgctcattccacagtactctctctttagggtttctttcaaacttccgaaataagatcattaaccagtctgcagcacctctcaatacaaccacacaatctcagctaaaagaaaatatttttttgctgaatcttagaagtaaaagggcaatgaagaaacagaagattagcaatctcaccaatctccagcaaaaaccagcaatttgagctgagagccttacaacactggtatttactttcttattatccaccaaccatgtgaaatttctgacttctagccagcaacgaacatacatttatgttttcttctcagatttatgttgtccaactaaaatttctttcttagcttcccttgttcttcctttttccttttttttggagcatttcctttatctttctcactgcttgaccatacctttttacttggaccaacaagttttctcaattctctctcattaataaatccccaagtgaaatatgaaaataaaattttaaaattatttttctatttctattagacaacttgtttcaaaacagatttgaaatctcatgttagcagaaaggtttcatctaactattcttgttgttgcatcatttcaagaagggattgatgtggaaagttgatctgtagattttgtagttgatgatatgacattgttcacctgtaagttttatgatctaagaagagctaaaccctgttattctttgtctaatttggaatagtgaacatcaaaacatgtcaatatcaactcatagaactaatagatttatgaaattaaagagcacaactatcattcttagaacttaattatactgtttttaagatctattgcttttgcggtgataacctatctaaaacttttattttactatttttgtttttcatcacagatatattgacatgtcatactgcttctgtcgagaaatagtttttgacattgacacttgtttgccagttcattttgctttatttgaaccatttctttatatcaaatactaattctccttctgttgtcataaatcgacttcttattttactacatgaaaatccaataaaacctctacattctacactaaatgttttaaactgtaaagttaatatatcataagatcatatattgtttaatgtgtaattgtaaactagtttctccaacaagtgatcaatattgagtttttcttgcttgaatatgatagaagttgtttcactaccaataataatactaagcggccactgcatggaacttgtgcaggaacttagtggccaataacttgacatttgatagca

SEQ ID NO: 11017 - DNA, 3263 bp, Vitis vinifera
  Intron number 1 from transcript GSVIVT01030354001 (locus G SVIVG01030354001) derived from phytozome v7.0 (chr-ID chr1 2; pos 4937728 to 4940990 reverse strand)
gaaatcttgtgaatacaactcggtaccagaagttggtgggaaaactgatttatttatctcacacccgaccagatattgcatttgcagtcagcatagtaagtcaatttttgcactcacactataaagtacatcttgaggcagttaacacttttttaattcaataataataataataataataataataataataataataataattttagttcttttcatatattaatttgtcttttgtgatttttttaataaataattttttttttttttgcttttcaagaatttgtgttgattttttcataaggtctataactttaaactaaacaagcttgaatatatatgtttgtaataatcttatattatattagtacttaaacacaattgtatgtcatttttttatgtttaataataaattttcaatattaaagttagaatctataagaaaatcaacaaaaacaatatatcaattcagaaattatggaagctaaaatttatataaaaaggtaaaaagaaaaaattatttatgaatattaaataaatgagatttaaaataacatactggttctatgaaaattttaaaaataactaagatatgaaaaaaaaaaaaaaacatgttaagtgtaaattggtgataatttaaaattgagacaaggaaaaggacaaaaatcgatgtgttgaccgcggtgaccgtgccggtgccggtcgaccggttcgtcggggtgagaatttaaagcgcctcccgcgcctcagtttctcattcatttcttctggtgcttcaagccttgtgccgttccagctcccctcaagggattttatatgccattacagccttctgagacgtacggattggattgtggagtctagggttttggattttgggactcagggctgcgcatttgggcgatttcctcctcagttggcgtttcagagcctgcgtcagtgtattcctgctcttgaggcctttcaggtgtgtgtgcatccctctcttcagcctcgtctccttcatctcagcctttcggatggcacctaggagagagtcagccgcttccagggctcagggcaagcgccctgctgagccatctcagccagatcagtccgaggctcgccgaaaggcgaggtacgacaccgctcttttcgcctctgtcgaagactaccagagatataaacaaaaatttgcccagaggaaagttgttccagggagaagcatcaatttctcccagcttaagtactttggatttgaggagatttttggacggatgagatggctgccagtggtgactatttcggagcctatcttcccgactctgattcgcactttctactcacgggtgacctacgggattggaggaccgatcacgtcgactgtcagaggagttgagatcaccttgagtccggagagcatttgccggattttcgatataccatcagttggactcagggtgtatgagtccaaggtgtggcccacggtgccgggatttgagcccagagaggctattcagaggctgtgtggacttgccgatgcccaggggatgggcaaaccctctgcacatagtctgacagtgattagccgtatccttcatcacatggtgtgcaccattctgttgccacggggcggacatctagacgaggtagcctacctcgaggctttcatagtggattccattttgacagggagacggattcatgtcgggtacctaatgatgatgcatatgatatcttgctgtgagagcaagacccgcgtcctcccctatggtcgcttcctcacgagagtattcaaggatgccggggttgatttgagccgcgagacagatttcgaggccccaaccacgtatgacacatatgacgagcagtctcttgcccggatgaagtttgaaaaggcccctgatggctcttggatcaggagagctgagcgaccaccgccacaggaccaggggcggggacagctgcatcctgaagatgaggaggaggccgagattggagagatggagggtgggctagaccctcagagggactttgagcagagcatgcctgagtgtgacattcctcctcctgagccgatgatatctaagccgacatacacagctggaccatctgagccttctcacatagagataccatttcaggcacctcacgcacccgatcatgcgccttggatggatttatccgctcagatcagttctctcaggactcgtatggaggagcttgcagtcgtcaatgatactcgttgccactctatggaggatcgcatagatgagtatcagaccggcttcacctctcagtttgagaatctcgatcagagacttgggcgtcttgaggagcgtatggatcaccagcatgaggagatgacctctcagtttgagcatctagatcagagacttggccgtcttgaggagcgtatggatcaccagcatgaggagatgatggcctaccttcgctcagtgtttcctccacctccgccttgatatgttcgagaccccccccctccccttcgtttcttttttatgttgccaaagggtctagggggcacacacatgcatgacatttccatatcattagtcttgtgttgtgtatatgcgatattattatatatgatatgatattttcagaattcacattgtctcctattcaaattttgcatgtcatttataattttcgctttaattgatccatgtttggattgagggggagatttcttctctcctagataaggaaggtttgtcatcatcaaatagggggagattgttagccgaagggtgcccctatttcgcaaaactaatatattaatactaacgggtctttcgtaaaacttaagacatttcagtacttaatttactttatcaaatttaaggtttaataaagttcagatatcgaagaataaaaaaaaatggtactaagttttcttttttttttaaaaaaaaaaaaacaaatacatgttaaattaacaaagttatttcatccctatgatcaaatttgggtttaatccatctgagaatatccattggcattcttagacgattcaaacggtatgagttgttggatagactgtttaaccaaaactctaataccatgttaaactaccaattacggcatcatgataaattgaaatgctcacaattaaatgacatgaagtatattaaataaatataaattaccgcattttttgattctctgatagttaccaaccggtcgacaaaatgcatcaaccggtaccaagttgttttggtaccggtagccactgatcagtttgggtggtgcatgaagaa

SEQ ID NO: 11018 - DNA, 2366 bp, Vitis vinifera
  Intron number 5 from transcript GSVIVT01031675001 (locus G SVIVG01031675001) derived from phytozome v7.0 (chr-ID chr5 ; pos 20009353 to 20011718)
gaatcattctacttcatagttttttgagctcagaggtagatgaaatttaacatttgtgattaccttttcttagttggtatgatgatgttggatctgcgttatccaaatgtccaagtagaggttgagtttgtggggaattaattatgatcataaatcagattctgaaatctttgtataaatgctgatgttctggcaggatatttggtgtgctgacttgcccttgagtatagctttctctgttttgttctctattgttggttctaggatgcatgggttgtgaaagtatgggaggaatccaaaggggtaggatattgaagacctcctaagatgattccatgattgggagtttggcagtggagagtcattttctaagaggcttcaatagtgactagtgatgaggagtgttggggatagagtgatttggaaagatttcaaggacatgaagttttcagtcaaagctttctattcttatttggagtaggaggactggttttctagtgaggtaggattcttggcttgggaagtggcatgggggaggattttgactttggtttagttaaaaagtagatgaaacaagaatcttgtttcagctctacttccctttgtttggagtagagttggtgctgtcctctttagttaaagaaactttattgagttggaaagtgggttttgtagggaaaaaacataggaatgtatggtggactattctgttgaacttgttttagactatacaacaagagataaatcatcaattgtttgaaaatgcagagcattcagactatgcgattaaaaagtcattcctcgatgcttttcttctttggtcaagaaagttcattgatgaggtttcattgtctttgctggactttattgattggttgatttctagttcaaggaggggattatttgattttcttcttttttgggttgtttggtgcctgtgtactttgattatgccctttttgttaggtgtttttcatttatacacatgcatatgtgcttggctgaaggatttgttctattcctttctgtttaaatgtactgaaatggttttttctgatttaaaaatgatttcagatctccctaaactttgcaatctaaattatgctcaaagcaagtgtggaatattttataaaaataaaaagctaactttaaatgttgggctttggttttaatttgatattcaaggtcgacctataacgatctataacattcacaaaatgatgatattttttgaaaagataaatatttgtgatcaggttttgtaaattagggtaggatttcttatccttatcttgtattctcatttttaatgaaaatatttttgtttctggttaaaaaaggagaaatatttaattgacgtaaatttataaagttcatatttcactgtttatttacttattggttcttttttactattcattgctgtaatctcagcacaacttgaaaaagcctcaacttaggtcagtactcttttttcccctttcagctctatgttttgtaacatagcggttgctaaaatagcttaaattttgtaaatgttattttttttcacagaaatgtttcaagaaattgatttccttctgtttcatatgatgccattctctattgacctttcatacttcaattaaattattgttctagaaaagaaatgtcttccagtctttccttatactttgttctccttagaaacaagcttaattcattgatatttggaaatataacaaaggattaagattcttccaaaatgcacaaaagctgatcaacaaggtaaaaggaaggccttcttgcggggaagaaggggacagctatatagataaaaaaatatatataacaaaatcatgtataggccagagagaaagagagttgttttttgtgttctctcttgtgtggttgtgcctttttatgcttgttgtataggtccagcatactctggtgttctctttttttgccttaaatataaatcttttattgtctatcaaaaaataaaaaggggtaagtcagagagaagtactatttgtgagtgtaattatctcattttcatcttgttgtacttattttttccgaaatctttctaagatgctgcattttccttcatacttgacataattgtatgtttgttatccttttaatactgaagaatatcactactgttgaatgtcttttctttgtttacctttcacattggacaatatttcaaatcagttaatctaatgcattgcaaatatctggcaatattttctaattctctactgttgtagcaaccaaaacaatactttgcttgattactagacaataaagagattctattttgcatatgaagctgtgaaattgagtataagaataatacttctacaaccctaacagga

SEQ ID NO: 11019 - DNA, 2850 bp, Vitis vinifera
  Intron number 6 from transcript GSVIVT01035963001 (locus G SVIVG01035963001) derived from phytozome v7.0 (chr-ID chr4 ; pos 6544995 to 6547844)
gaactaaacggcggcacaaggaattgcctcaacaggttcgctcttttctaatgcattatgaaggcttttcagattcacaatcatctttcttttatccacataccaattttgcaaatgttgtaatgtgggaaacagatcaaaaaatggacaggataaatttgatgaaacaactgttaatattttatatgacctggtggcatcagaaagtagatttaacccaactatatcaatcacaagcatgtgaattcatcaaaacaaatgatagtgcagtctgtcataggctgcctcaccttaggcattctatagcacagttcataatctaaatctaaaccagcatctgacggccaggtaccaacaggctaccctgatggtgaatgccttacctagttggtttgttttctaatgaatgagccatgggaacatcctactgtaaccctacctaggaatcttgttctttatattgtttcactctgaattgacagaatctctgtggcatctattactctctgtttttgtctaattcaccttcaagcaattaatattatgttgtatatgaatgaatatcatattgttctaattattcatactgatattagtttctttatcttattaaaatcaattgtaagtcatccatttttccatttattgagcaaaataagttgcaatgctaattaaaagtgtcttgtgcagataaaaattcataaatttaagattttctttgacatgattaaagttgttaatttactgaattggacaaactggttctgggagacatcaagaatcaatttctctttcccttgacttcaaatctgcccaatttttgattgcttacctctttaaggcaattctccttgggtctcaatttaatttgctcgtgtttgtagtggtttttttaatttgtttattttttattatcactctactcttccttctctatttaaattttgttttctatcctttcagattaaaattgctaaattaacatattaatattttatagttttgtagacaattccctcatcatgcatttcacttaatagtttctccaactgaagttgggtttaaatcctttatacacttgatatatgaggtcccatgctctcgccctaccattttatgatgcaaggacattttggtgtggtttgcccgtggcagttttacattgtagaatgtgtttcagtaattgagcagacacatccactctatagtaacttttatggtaaaaaagttctcttgccaggttgttcccattatagttgtcaaaaactgatgatacatgatacgaaacaacaatataataaaagacctttgattattgttaatagtttctaagaaaatttgaattaattttttttctcaaggagttattatattccttgtataaaatgtactttaaggttagaaatagatgaaaaaaaaggaaaagaagcattagaatgatctatgtgaagcactacaaacatgttgtgaaagatgcataggaatgattgaagcttaactgcaaggatcactgcaataagtattggggaggcattatttgaatgatttgaatgatgtggtgaaaatgattatgatggaggcttctgcttaataaattgatttttcctgggggagaatgtgatgagtttggaaagttagtactttgaagataacacaaattacacatccattgtttattcaagcatatttgactagttgaaaatgaaatatttttttgtggattttatgatggatctatgccataaagtgccatagtttgttagtttgattttgttatgtttaatgttttcatatccatgatattgaagaatgcctgtttttaactctttcaacattataatctttcatgaaattacttatcaaaaaaaaaaaaaaaatctttcatgaaattaaatctttatagctctatacatcattcatgcaatttatatgctgttcaaataggtataaatattttttctgttcattttctttttgtatttgaaaaaaaaaaatcacaggagatagtatgatattgtacacaatgtggaaaggagaaaaatgataaattaatactatttttgagttgataattttggctcacataaaaactatgcaactttcttcatttcaataattgaaccttgaatgatcaaatgattgacaatgtctcttatattgccaatgtaagttggttcatgttaaggtctgatcatgggttgttttgtacaccactggaggtcttttcagaagtgtgtcatgttgtgtgcttttaagtatttagaaggattgctacaggtaaaaatgttgaagattggggtctttcaatcttaaatttgagggttgtcttaaatcaatgttgaactcatcattggatttcttgtgggaatattcctagcttgcattctttgcattcatactttgccctgtttctttaaaataagtttctctaaaataagtttctcttcaaaaaaaggcatatccctttctcagttaggtttatagttttgcagtaatttcaaagatatgcaatctgtggtatgttctaaaatattctagttgtctggttgtctatcttaatatatttaatactagcctccccacattggtaattatctttctatgattgtttgtgaaggttctccattcaaacattgcttttagacatgggaatattgaacactgttccatttttaaaggttttaagcagtgaaattatgctactttcttttctttggctccgacttacaaggttggctttctaagattttttatattgatgaattcacttatttgttgcttttttaacatctttagtaatgatattctctcataggtggaaatcaaaagagacgaacaacaaggagaagt

SEQ ID NO: 11020 - DNA, 10390 bp, Vitis vinifera
  Intron number 3 from transcript GSVIVT01023847001 (locus G SVIVG01023847001) derived from phytozome v7.0 (chr-ID chr3 ; pos 3009192 to 3019581 reverse strand)
gagaagaaaatagaacagcgccgtatcaatctgtggttagtttttcctttctccttcaaacatggatcttacattattttgttctttggtgctacgactgctgcttcatttccaaaaaaaaaaaaaaaaagtcattttttctggaacttcaatgcccctccttatggcatttctatgattgaatattttttcacacttgcttcagttcatttacaattggtcacgaaatcataattttactagaatatcaatgtggaactattttccttacaaatattaatatctaccttgtacatgtacatgcttttattagtacttcttcttgtacagtggaggagtatagtctttctttgatcaggttttgtactttgtgggaatcattcttctcctcaactctactattatcaatatatattttgtttgtgataaaaaataaatgaataaataaataaatatctacctattatcgcatctatgcttcttactgcaaatggtgacaggtgattgatgttagaaagaatcagttccagaatgttctaggatcttgctggtataagtttagagttggttgtaaggttctaggtttataagatgggcatatggatttaaagaagaaagagtatagagtatagatgtggattgagacactcattaatcaggacaattcttgtctgttggatatccaatctaggcgattgaagctttttttttctgataaggataacattactcaaaatatggaaagggacacaaacctagtaaatgcaaagacccaaggaagaaaaggtggattggagttcatattcattaattgaaatgaaggaacaccaccattattcaattcaaagcacagtaacaagataagggaaattgggatgttcccaaaagaagtaagtgtgcaagttgtaacaagttgtaaaaaccgagccaaaaattcttaatgttgacaatggtcactaatttggtacaattagtcataacatattaacattttatgattattattagtgtgggaacttgtatctagaagagaagtttccttttttttcctcttttgggtgcgattatagtggataaggaaggacaaataagtgataatatgtcgagggagggagagatgacatggaacattactactattagatatttttataagtaggcgttagaaagtgttagttttttgatggagatgaatctcccaaatctattcaagaaaatgaagaaaaggaagaaaatggaatgaaaagaaatatttgcttatttaagttatttagtttcaagtttagtagtattagttgggtatttgagtcttatttataattttcaaagtttctacttaaatcatttttattaggaacacttatatcaaaaagtttatataaagttttcaagtttttaattctttaaaaaaaaaatatctgttttatttttaatttcttaccttgtgtctttaaaaattactttaaaaaatttttaaatttgaggttgtaaaaattttgaatacctcaatttttttaaaaagtttttaaaaaccattaccttttgcaatgtaaacctccaagagctcgtatattttatataaaagttattattatttttacttttaaaaacaaaaaatggaaagtgtatttaaatggactcttaaatagttgaaatttgttgatattgcatagatgtatcatgtgaaagaaagtgcctgagtgaggggataatcattttgtttgttgtataatcattttaaacctttgggctttaacgatctctttttccttttgggagctgaccttggttgacgaattgcttcaaatcctaaggagtcaaagaattaccttggaggaggacttggccttatggaaggggggaaaaatgggaagtttgacgtcaaggaagcgtatgggctgttgaccagccatagtacccctttgtttcccaaaaagggcatttgggtggagaacgttccttccaagctagcgttttttgcgtgggaagctacttgggggagggttcttactatggataggcttcaaaagagaggatggcagattcctaatcggtgttatttatgtggtagtgatgaggaaagtgttaatcatcttcttattcattgtacagtggctagtgtgttgtgggggatggttcttagtctgtttggagcctagtgggtctttccagaaactgtaaaggaggcggttatcagctggaagggttcttttgtgggtaaaagaggaagaaaatttggagatccataccgttatttattttttggacggtgtggaaggaaaagaatagattagcattaaggggggggggggggggagttagctatacagaaagtaaagtattcttttgtttgtaatatgtgggggtgggcaaaattgtataatggtgcggagctcgttcccttataggtttcctggagtagatagcctccagttaagggttgatgggtttttgttgttttttgatctttttgttgtgaggccttcgttgcctcgtatactccctgtatgctatgcggcgctttgccttttgctaatatatgtgtgtttacttatcgaaaaaaaaaaaaaaaaaaaaaacgatctctttttccttcctttttctctaaggtgatctccttgttttaaattaccaaaagctttgtggtttgagctacaaataagtgaattgggtgtggagggcagtgccttgttcaatttttatgtatccttttatttatttatagaaacgagggaattcgttgcaacgaacttggtacaaacagtgaagaatgagaaaccctttcaagatttataaaaagcttatcaaaattgaagaatatatttatacctttaaatgttaacaaaacaaattggacattttagaaatgaaaccaaatcaaagtgcaactaaagcttgaaagaggattttccaagcttgtacttgttagcctcctctagagaagcttgggttgcccagttgtgggatgggatagggcaagtgggtcattggaaacttcacaagacacaacaatgattgggaaatgagagaggtggaaactctgtttagaagattaaatggacaagtgcttagaagggatgatgaggatgtcatgaattggtggatatcaaagaaaggcctctttactgtcaagtccttttactcctccctagctccttacaatgctagatagttcccttcaagcattgtttggaatccttgagtaccaaagaaggttagcttttttgcttgggaagctttttggggaagaattctaactatggatcaactaaaaaggaggggttggtttttaccaagtaggtgctttctatgtaaagctgaagagggatcagcaaaccatttacttcttcactgtcccaaggcaaccatgatttggcagctcatttttgctctttttggtgttcagtgggtcatgtccttttctatcaaggactccttacttagtttgcatgttcttttgttgggaagaaaaggaaaaaagcatggaatgcagccctattgtgtttattctggaccttatggatgaagagaagtggaagagcttttgaagacaccgaactaatagaccaagctattttacagtcctagtcctttttgtacatgttttggatttggtcagagtcaatgtaggctctagttcatggtctttacttgatttcattgattggttagggtgtaagtaaggtggtgctttttgtgttttctttctcttttttgactttttagccttgtaagtaaggtggtacttcttttggctttcttaatacgattacttttacttataaaaaaaaaaaaaaaaattgcaactgaagaccatgctacatatctatctatagggtaaaaattccccaacaaaggatactaagtgtttaacccttcacttagctaaatgatttgcgttttgatcaacaacatgggaaccctaagggggaaaattttcaagttgttcacaacagtagcaatttgatggatccccatatcaaattttcatggacttgtttcctcttggacacccggtaaatgacaatactggagtctcccttaatccataagtcaaattctgatagctttatcctataataaactttctaaaagagcttgaatctctgcctcaatagttacaccctctctcattggcttggaaaattaagcactgtaccacaatgatctctaaacactcctcccacctcgtgttatcttgggttacccaatgcataaccattaaaagtaaattttatatggctcattagaggtggaaaccacttaggttgggtctccttccttaacttcttggatctacatatgtgattctcaaatgcatctatgacggtggtacatatggaagtaggaaataaaccgtgtcaaagaacctccatagatgtccttgtcctcaaaaatctttttagttatctcttgccaaatagtgcaaatcactatgagctacatcacattaagaatgtactcatcatctctgtcacacttgtagccctgtgggaggatctgtcaatcccagcaagtcaaaactgcttcaacctgtcccaaagtttgtgagtgctgtaaaaagaaagatgaccaactgtttttctgctagccaagcacatgatacaatgatcaggacaatgagctttgaaagacttccacttttgaagcatgttaccgatattaactcttttattagccacaaaccatgcgaatggctataaccatggaaggggattttaaattcaaaatgaaattgactggaaggaaaaggataaattaactgaacagacagagttctgcaaaaagaattggctcagaaaatgcctaaggtagtcataggtccaactttcatatctagaaaaataggtaaaatatatacatggagtgctaaggacatgagacatgctagctaaaagttataacaaaaattgaaattccatgaaggacagaaggcagagttttagatagaagaaataaaagaatctctcgttctcacaattctgatgaaatttggaaattaaacaataagaacttgcttgtctcaccaaatatcttcccaaaaatagatttttgagccatctgaatagagaaaagagacagatgagaaaaattagggaaaaatagctttctcagggaatcaattggatcacttggcaacaattttggcatcccacctattgggctatgacccatatgttactcaaaataaccttatataataaaacactattttctcttgagaatctccaccaccacttcccttataaagttctattttggaaggcaatccttcctatacctaaattcccttctctctttggtaggcaaacttagtcctaaaggttctcagagaaaaatgaataatctcacttaataccttgtgcatgttaaggggatgcacattagctatgatgttgtaggggctagttaccaaactagttggtctagaatttgactccttgtaggcatcatagcaatgattgtgacactaacaccttttttttcatgatcctacatcatagaattccaaaaagactttcagtggatcctccttattagtgttccaaacaatcttggtacaaagctgtggtgaagccatcaggattgggaatgtttgccttatccatctgtaaaattgcttcatagactcttccatgaagggttattctaaccacctagcactcagtacaaagattctagaccgatccttccaacctctaagggcactccctaggcctactataaagttgcataaagaaactcaagatctcttcaaagatattgttttgtttatcaagcaccaatgcttccttattctccaaaaacttgatatacttcttcattcttcttgaatttgctgccctgtggaaatatttagaattgcagttcccttccttagcctatttaggtcttgggactccactttatggttgttgctctttggtaagagaggaagtatagaattttttaagatgtcgggtccaaattatgaaattgaagcatattgtaccaagaggattatttatttaaagggtgtgatgttgtttgggagaatccattctttgttgaatttttgtttgccctcaaatttaaaatttcctttccttttgtacttagactaagcacatgggaattttttgtcctatcccttttccttgttctgataaaatatttgtaaatgaaaaatgtgaccatgaagacatttcccatcatcttaaggtataactatttaatagcttggtacaactcttaagtaagactcatgtgaaatgagtatacttcacatgggatgacctataataaaaagactaatatgcatctatttactgtatgaatgtgtttgaaagtttttaacaacaaaaagatgaatgtaactttacaaatgcaagagaatctataaatgtttaggtccaataaaaattgatcatatatatatatatatatatattttaatagtcaagagagtaatagtttacagagccaaaaaaaggctacatagggtagacaggaggtattcaagtgcgctctaaagcaaaaaacaagaagacactccccttactagcagtctaagtaattgatgaaatcaatcatagacaaggactcaacccttaaacctcctttgatccattctaaaaagttacacaaaaaatagaactttaacgatagctcaaattttcaaaaacctttttatttctctttccaaatagttcagaacaaacgaagaggaacgacattccacaccttctttctgctatttccaatgaaacgaccttgctaacttataagcattgttttaactaaggaatccaacaccccaacaactccaaacaaggtgaagaccaactaccatagcaaacttgcctttaagcaataaaaaaggatctgattgcaagattcctccttgcctttgcacataaaacatctgttcaccaacgttcatcctctcctcttcaagttgttcatagttagaaaccttttccaagttgcttcctaaacaaaaagctcacttttactagagcctagaaattccaaataaatgttgttaggaaagaatccgaatcatctcataatataaagatttaactaaaaacttgtctctcttcgaagattatatggaattcttgtatgcaacctaaattaagtttctttgcttgggaggttgtgtggggaaaagtcctaaccttggaccgaattcagaagaggggttgggctttagctaataaatgttttttttgccaaacgtttgaggagtctattgatcacctccttctccattgtgaaaagacaagggaagtgtggatgttgctcttttcattgtttggagtgtcttgggtgtttccctcttcgggaaaccctcttagggtgaaaggggtcctttgtgggtaaaaagcgtgaggctatgtggcaagcaggtccattatgtttgttttggtccgtttggacggcaaggagtaaaattgcatttgaagatagtgtgttgtccatccaaaggctgaaagcctcttttgtgtatttactgtggtcggaaaccaaattgtttataaaaggtggtccttcgaccttaatagattttattgattgggtgggttctcggtgagagagaaggtttttggttttcttgttgttttgggtccagttgttagggggtgagtgtctctatactgtacatctttgggtcgctattttagcgcctcttcataatatatttcttttgcttatttatcaaaagaaactcaaaacttgcctcccttagtggccatccacattgccttgttatctacctccgtggtcattgatttaccttgcaaacacaaaagaagagcttcaatacaatcaaattccaagtcttggaaattcctgaagaaataagggtttcaaaaacccccactattagcctgctcctaagcatcacaaatccaagcatcctttgagatggcatagtgaacaaagatgggaaagaggtcctcaaagggatgtcctcataccaaatgtccttcgaaaatataacccttctttcattgcccacaaaataagaaatcttacttttgaaggcatcccaccctctccttatagccttccacaatcccatgcaataaccctctcttgcctccaaaaagcaccaaccccctttttctaccccgtacttacctatgattacctgcttccgtaaggacttcccttttgacgtgaacctccaactctacttgcctaagagagctttgttcaaaataggaagattctaaatgcccaaccctccttccaactttgatctaattcactaagtgaggcttattttcaagagaccctccttcctacgaaagtccctttgaattttttttctaatatatgataccccttttggaataacaaaaagatccatgaaataaatgggtaggcttgacaagatgcttttgataagagtcaaccacatcgaaccttaaaccctcccccctacaccccagcccctttccttggacaggtattgtctcttccaccttgcaagccttctctgcacctctcttctaccaagtcccaaactatcatcaatttaaagaccacacttaaaggaaggccaagatacttggaaggtagtgaccccaccctacaccccagaatgtccaccaactcgtccagaataggagcctttcctactaagattaacttactttttctaagttaatctttagccttgaaattacttcaaaccacatcaaaatccaatgaagatgcaatatgtgatccttgcaagcttttatcaaaaaatcagtgtatgatctgcaaacaaaaggtgagatacctccactcccttgttgcctttgccttccacattaaagcttgaaataaacccccttctccttagctatgttaagaagaaagctacgagcctccatagccaaaacaaagaaataaggagacaaaggatcttcttgccttaactctctaaagctatgaaaaaagccagttggggtcgcattgatcagaattgaaaatttagctgtagaaatacaccaattaatccacacaattcacttatgcccaaaacccatcttatccagtattgcctagccctatttttctaattgtaaaaatatgaagtttattcatttaaattcataacatagaaattttcttttaaatatgaaatcacaattttaagaatgatccattcagtcgtataacaaaattggctctgtttatatgttcaataacatattaattttaataatgaaaaaaaaggagttgtccattttttttggcttgtatttatacaaagcatgtcagagttgagaatgtagatattactgtcgataacctgcctaagcacctttttagcgatcttgataccatccccactaggtttccctgtatcaacttaactgtatggggttcttatatggcatctaagggtgggcatttttctaagatacatgggatctgattttgggtaagattctcaccttagatcaatcgagaactaggggtttttatcttgttaactgatgatgcttatgcaaaaaggataaggaatcaatttatcatattctgtttctccatcaggtggtctccagtgtccactttgtttggattttcttgggttcaatagagggttccctgttgcttgtgtatcattatggtccctggatggtattaggaaagtgagtttatatattggtattatggatagagcagggggtcgagggggctgactttgtattattctgctttttcttttcccttttctttttgattcttttgtaacagcctgtttgggtggtgctccatacactgtgtagtgggattctcccctttctggggcattaaacagagatcctgactagttaattgccgccaaaaattaattatcaaaaggagacattgaaattttattttctccataaactcagtaaaccaacccttttacatgagcttaatttttaactcttggatttataattgtgaactaccaaatgacaaaaaaaaaaaaaggggggtgaaagaaagaagtagaagaccagaaaacacctggagcttcaaattccattggcatttttctttgttcctctataaaaacaaacatatctggggtttcaactgcaccatttcaaaattcaaaccatgcttaagactagccacctaagctaaagtgcatatgtaattttataatccattacaattttagtttcctcttggttgcttactttgtgcatcatgctagatgagtgtatgtgtattattttcttattagaagaaaaggaaaatgagaaaataattgacatactggtctactagaaatattttggttgtaaccatagaagaagatgattatgatcagtgcattctggtactagtgcttgcgttcccattatgatcatggctaagactcacagcgctccatttcctttgcagg

SEQ ID NO: 11021 - DNA, 7532 bp, Vitis vinifera
  Intron number 4 from transcript GSVIVT01027344001 (locus G SVIVG01027344001) derived from phytozome v7.0 (chr-ID chr1 3; pos 16220576 to 16228107 reverse strand)
accttgaaagtgtaagctcttatggcttcatggcgcccaaatgttcttgggatataactctgtgatttgtttttaattaaacaatcagtttttagcatcttaatgatgttgtcatgaaaattaaatttggaatttcatcaaagaatcttcactcctgttggaagttaatgaagaagacaatttcaatactgcaagcatataccttttcatatcaaaactagtaaattaaatttgaaattcctatatatagaactgtttaagctataaattaattaaggaattttgtagttcgttgatgtcaaactagttaggaatatttgtaaattctataggataggttaaatgatgtatttcttaatgatactgattatgcaagagctttgacctttttctggatcatgaatccatcaaaatcattgaatagttgatgttttggtgggggcaaggggattgggaggtggatgttggatttggcatggcttgcctctagagctccatgtcaatatggatggcagaaataaggtagagatctcctcttggagggaaatctgagaatagatttagaggatgagaaatctgtcttatccatggcaaaactcttttttgtccaaagcagaaggtgagaggtgtcaccaaggaaggagaaaattttcttctggtgaatcattaaggtaaatgtggaatctatcaaaaaaaaaaaaaggttaatgtggaaatcaagtttccattagggagaatcagtggaaagatattagaaatggaagctttgattgttcttgaaagaagatggaggtggaggaagggagacaaagtattaaaagtaatcctagaacctgatgttggattcatttccagcaatgtacctgacttgaaatgaaactataaaaaccctagggaatcactttccatgaatgccaatgagatgtcagtcatcacagggtagagaggactttgttctagagctaccatatgagaggatgcttttcaatccaatcttttcttcaagctgttttttccttgggtcagcgctccttttccatcttctttggtctgggaatcccattcttcttcaatcaattaattcataaaggcaggaatttggtaaattggttttgtttgtgcgagtaggtaaggagtcatccaaccatatttttctttattttaagatgcctcattctctttgggccttgctcctctctgcttctagaatctcttatgtgaaagccttttgctatgaagagctctcaagggtgttggattaataggtctgttggttaaaaggaataggaagatgtggaaaacaaaacttccatgcattttctgttgtttagatggagtggaaccagtctatttttgaaagggtgtaggttttggatttggattgaaaagcttctgcattaagtcaaaaatcttgttgtcctagggatttcctatgggaagaaagcttgtcctctctaaatttcattgatacaatgttacccatgcttttgtttgatgcctttcagttttcctctcttttctcttcgttgtttcttcgggtgtttgttgtatacttggtatgaattcttagtgacttttggtatatcttttcttactcgtaaaaaaggttgagatctctagcatctctctgcaactgtacttgctcctaggggagaatgccaaaaagaggcttctgccttaaaaaatttttgcaaccacttatacatgagtgcttcttttctcaaggaaatcctcccacctcgtaaccctgaattttaggttgatagaaggtatcccacctaatctaatgctctttcctataagccaatatctaaccattgaaaatccctctaatcctctcaatcttggattttattttgattggtattgtataaatagataaaaagtaggtggggatattgactaatcaagattgaaccaaagtgatcatactttatagaaataattcagcttctttcgaatagtcgagatgcttccacactttcttgatcacaatttctagaatcatgcggtcttatggttgcctcccaaaaatggacaaagataggttgagggccactcattacccttgtaattgattgtgaaaataggaaggactaattgacatgtcatatgagggttatatattattaaagaagtcatagaagttatggtaaagatatggaggtgagaactagaatcatagcatgtatgtcattactttttagggaatttgtcatataaaattcatggttgtatttgttgttgatctttggttttccaatcattagtttgaaatatgatatgatgaatctccatatacaccaatgtccttgactctcaagttgagggactttctttactttgaagtgcccgtgatacacagaatattctgcgatattgtttgtgcaaaagaacctcaacttgacagcaggaagataagctccttttggcaagctttaagatagcatgtagaagggcagctccatttctgttttgatttattgcatcatcagaaaacatttgccaatcatgaggagttttgttttcttctttgcctacctcgagtagaatagcttcatctgggaagttcatccccttactaataaaataaagctcatagttaggttggttgtagatcttcagcctaagttttgctataagaactgatgcttgaacaattaccaaaagagaatgactttgcttttcactaagaagttgttttgctccttctacccttaattgattctaaaatccccatctaaaaaggaatcaaccatttgtgatttttctcattaatcattgattgttggttagaacaatgaagtatggtggccaagtctttatgtcagtatattcatcaaaaaaaaaaaaaaagtctttatgtcagtatatttttgtcaaatcttgcctaatcaatagaaggagagaatttctctaagcgggtggatttgacatcctggtcttgtaaattgggttatagaggatatagaaaaaaacattaatagttggagtattgtgacagttatagttatattaatgtttatttttttgaaatcagggacattcggaatttcatccctgatgacacatttttagttaagcctgtgttgaaatcaattagatgttcttcttttttggtctttttgaggcttaaagaggctggctactgacagtgttcttctttagctaaggaataaaaagcttaatataactgatgctagtataggcatgttttggtggtcttctaatttggtggaaatcatattactaccgtttcctatctagttaggctttccaaatgggttagtggttaattgctatcactttggtatgttgtggtattttgttttggagtcatgtcgtccaaatgacaagtattttttgtctatgcagagtgatttggagcataatgtcatggacttaggtgtttcctaagcacccttatgacacttagacaactcaaccttcttgaagttgctaagtcagccttcccacctacttagcttgctaagttaagttactcaattcggaagctaggaacacacaaaggaaacaacaattagagagtttgaaagaatggaacttgtattgcagaagaggactttacaaggattggaatgctctcaagtacttggtgtcttaaccaaatgtggcctcttcctatttataggtaccaagaaaactctctggaactcttaaaggtttcttaaaaccctagaattctctagaaattcctacacaaaagctatatacaagctacttacaagagttctcaagaactctctagtctctctagaattcttccagaagctccctgctcccttatagagctcaaatgagggatcattttgagcaggctgtgttagtatgttcactaaagaaggggacttatacatggagaaagtcatgctcaaatattaggtggaatctcttgtacaatacgtttgatgatatgaggaagcctattgtgatttcttaaacagcctttggaaccactataccaatagtttgttggttgctatcacttcatgcgtttgctttgtacactccacttgctctagtccttgctccaatagactcttgggctggtagctcatagatcttgcatgaaaggttcccttatgggggaagggtctgactcaataggggcgacaaactctgcacttcaagcacacctttgtatcaactgaattactctaagggtctagttagtgcaccacaaaactagttagattcgtagggtagagggcttgctttactcccttttcttaatccaaccttctttgctttggttgctaatcatatactaaaaaggggtaggcttgcataccgtatttgagactactaagtgctggcagatttgaagaaatcaaaggaaatttgaagttgcctaattaattttcggctatcctgaagttttgaaattatctttgttccttttttagagcgtacaattatgtatggattcaggaaatcagtgtgttattttttttcccttctttgtaaatatacatcaacttaggtttatatataaatctaatagcttgaaatcccatcaaatatgagaatagaattcaatttctctaaactgtgttccatagtattagagccaaattagggttgtaaattttttctgcttcctgcttagtaaagcatttcttcttctaagcagccttaatggcagcagtcgtttttccctcaattatttaactagcgtatttttatctcttgttttcttcttccatttaaacaaaaattatgttgatcacttttgaaagccaatcatcttctaaactataaactagctagcaaccaacctagccaattactgcctttcaaaatgataaccttactcttcagatcaccataataaaacttgaagataccaattttctagaatggtcccaatctaccaagcggctcctcaagagtagaggaaagatgggttatacatttggagctattgcaaaattagaagaaacaaattcaaaatatgctgtgggatgttgagaatttgattgtgatgtcctggttgctgaacacaatgctacctgagattcctttgctaatatatgtgtgtttacttatcaaaaaaaaaaacaatgctacctgagattagcaaaggattgggagttctccctatagccaaggaaatccgggatgcaatcgatcaaagctattcaaagattgatgttgttgtttgcttctatgaactggaagttcaaattcatcagatcaaacaagatacaatgactataacacatagagaagtttctgataaaataaataaataaataaaaataaaaaaacacagaagttagaatctgactgaactcagtgaagtggccaattttttataccattcaacaagttttaaaatgttgatattactgatagagaacagggtgaggtaaagcgacctcttgattaatgcctgtggctacaaactagccaaatgaattctgttatttatttcattatgtgcagccaacctatacctttgctttgacattttctcatagctttccggaaaatgatttttcctttgttttttttccaacctcggaaactttctgtagaagttgaggctatggataaatctcaactacgaataacactaagaagaggaaggagggaggggggtgaataggtgttcttaagtcaatttgagatagtatcttacaaatgttaaccacactccctccctttgattttttcaattgtttggatcttctttttcaatcctaccaacaaacaagcaaagcataagaaataatggatgcaccaatactctcccaacatgatagtcaatgcaattcacatgcaaataagttaacactccccaaccaaggtatacaagacattttatctacctaaaaatatattctcatatccattaataacgatgccaaatcagaaattatttcatactattccaaagcttaaatgatctaattccaactcatttcctcaatcaaccaacataataattcaatggaaattccataagctaagataaactaatgaaaaagtgagattaagataaagagacactaactccaagatttaacgtagaaaacctttgaagagataaaaaatcacaagcctatagacaataaaaaaaatctactatgacgaaaattaaccaagtataaggatttacctagcccaaaccttcaattgtctcttggatcacttgcttaaaactttcaaacttaagctacccactttttcttctaaagcatacttggagtccataccaaacttgatcttgatgtcttcttgaatccatacaagaagaagattttcctaaagatgacgaatataagactagacataaagcttacactgaatcaacccattttgaaataaattttctcacttcaaagatgatttttagctcataacccataaatttctttttctaattgaaaacccccaatataggtaaagaacttgaagcttaagagtccacctagctctcacatccatcaaaccctcttttggaaataaggcttaaatactagaattttaatctccatccaacaactcaaatttgtttggaacaaaagaaagattttgtagatgtgatcaaatcctaatcaatcaaacggaattgtgaaattctgggtataatagaaaatattaccctttagtgtgattgatctaaatgtttaaacacaaatttttacacccttaatcttcaattccaattttcaacaaaataataaaattttaaaacttggttgatcaatgttttatatcatccatcacctcaaaaactctcaccatctcctatagcaatcttcaatcacgaacaatttggaaatgatggaagtttaaggaaggatttaaagcaattgaggtaagagaacacaatgggaattttgacccgaaattgccaacaaaaaaagacgctcacagaaacactttgaaacctgcagacagaaagatgcttgcatggatactccatgtcagtttaagcgcacaccttttatgggggcaaaacaattctcttgcaagactcatcctaatgattgtcgaacttcaaattacaaatgaaacctatacaagagagtggtttaagacgtctatagagagccatatattcatccaatgaaatatcagctaaactagacaaagaggcaaggtcatgatgtttatctcttctctcaccatgatgccatttcaataaaagtagttcttatatgtatacgccttggtaacctaccttagtcctatttggaagtacctgagaatgatcgcctttcaaattattaaatttgaacttcaattcatcattgatgacttttaagttatatatgccaagatacatacttatgtgtgcatgcagagaggttctctactccaatagtatctttggaatgctcttccactttcccacacacttccattttaaattgttggttagctaggacttgcccagacttatactactgttagtactttcttatctgattgtatcctgcttatttatacaccgacttttttctttgattcttatcattttcaggctatccgaagaaata

SEQ ID NO: 11022 - DNA, 2089 bp, Vitis vinifera
  Intron number 4 from transcript GSVIVT01013682001 (locus G SVIVG01013682001) derived from phytozome v7.0 (chr-ID chr1 8_random; pos 2546504 to 2548592 reverse strand)
cagagagttttccaggaagtgggggccttattgctgtaagaattctcactttagtgtgactgcattagaattatgtgtctgagaagttttcttgtttcatttttttaagtcatcataggaaaaacatttcactattcaaacagatgttgatatgtaatttatacagttccaggacataggatatgttgatcaagctttgatgaaaattaatttgcatgaatctggtttatgaagaacattctacaaaattgcagggacccaagccaataactagtatttttgttgatggcaaatggtttcaaatttctccacatgtcttgccatcaaatatgtcctttcctaagtaatcacagcaccttttaatatcaaacatgtgtgagattgcaagacatcaatttcaatggatcttgtacatgtgtgcatccattgttatatgtgcttacacaaggacatatgtacctggattcatgcttgattttggattaagtcttagtgtaaatacacaagggacctacaaatataactaggtaaatctttctggttgaatggttacctagttgattttgttggacttcttatgccccctgagttttggtattttatctcagggatgggaagctaaaaaattcccactgcaatgtttttggtttacactttatacaccgcacattttttttttcttttttttttttgaagattctctcatctttcttcctcttttatgaatgcatgcttattaatataataaaagtatagtttcttatgagaatgaaaattaatttcattgcccagcagccatacttgaacttcatgttcatgcattatgagcatcaaattctgtaaagttttgctctctcctgaatttcaaatgtattgacccaaatgtaaataagtcccagagatatgggtccatgggagtttcagtgttcatattgactccggcaatgttgttgaagaaaccaatgtatggaaatttgtgaagtactgctcaaagtgaaatctaaaagaatgctaaaagcctaagtgatgtattaatagaaaagagaacttgtagtatagcaaattataaaaacagagaatatgacacttttacagggcatatatcctaattggcaagtatattatgattcactaattttctatctgtcattcatatattatctttaagaccatcttatcttatagtacaccagtaaattagacaagaaaatattcttctcagaaggaaaaggggaaatccttgtttgtgtgtcaggacttctataagaacttctaacttgcacttgtggcttgcaagtagaatattggcatccaataaccattgagacaccatttaagcagtctttacaaatcatttttatgatttaagtaattataggcaacttaattctaatttattctcccttgggaatgaactgttactttttctttttctttttaaaacagaagttagaacatgaactgtcaaaatgagctactatgatggtccaatattttctctgttgccagaaactgagaattttaaaacattgaaatgttactgtcagaatttcaaattttatcagcagaacagtgaaatttcagtgaattgatttgcatgcaactcaataaaggcttatctcaacaattggagtctgaaagccaaatgatttcaaagggtaatataaactatcagtgggacaagataatggaagtatagatatgtatgacaaaaatgtcaatacatgtattgaaccattaggtgattgtatattattctattttttaaaattttattttttatttctaaaatttcttgttgaggttgcaaattggaagagagcttgacataaccaggtgagtattaaacttaactggtttttggacacttctatcaatgaagtggagtgtcgtgtggcaaatggtgttctaagttagctggataatgtgaaattcaacatagtacttttttgttaaaaatacttgtatgataggtgaattggctattttttattttcttgtttctttatcagttggaaacatatttaaaattttcatctttttgatttctgaaggctgccaaagaagcaagatttgacaaggaagctgt

SEQ ID NO: 11023 - DNA, 1570 bp, Vitis vinifera
  Intron number 8 from transcript GSVIVT01025567001 (locus G SVIVG01025567001) derived from phytozome v7.0 (chr-ID chr8 ; pos 13995873 to 13997442)
ccagaaattcattcctgtgactggtaactatcttgtctttctatgcatatagacatatgtatatacatatatagatgtcacaggaggttgtcaatagttttttttttgtaatttttatgaactagttaagtttttccaacctgagatggaattttagtagtttgacttaatgtggttccataatcattaaacttgttttacacagccaaaatcagaaaaattgcactctgaaacctaagaaattatgtcttgaatgtgacagcattggtcacttctgttttcttcagtataaatttgtggttgtatggttcaaagctggcatgtcctgtgctgccatatagataagaatccttatcaatgggagttttccaaatttgtttcagatttctgcttgttagtcattacacatttgctttaattattggtgtattgttgttgataacattttctttcctcctatagcaaaatatattccaactttccattcttgatgcctgaatattcttgcctctagtgcaatgcttcaagttcccactgttactccctttgatgtcccggcttattgttggacaaagaatgctaccaatcaccatcaagatctatagtgaagagagcacttcaatgaagaaataataggatgataataattatcgtgttaaaaatttgagaatctagtactttgaatctttctgtgaaatgagctataagttggggtgggctaagcttgggctcaaatatagccagaagcaggggccagtgactcaagctcagcccagtccaatctaaggcactctcagcttgagcgagcccttttgtgaaattaaccttagattaggttcaaactggcctgatatttgaccttctcattacaattgttagaactcaacacatagttctactcagttaaccacaaagtacattcttaaccatatagtctaggatatttctgtaggctcaaaacataacatgctaggagggcatatacccaggtccttttttctgatccaactccaggttgagtataggccagcccaagctcagtccttgttagatgggctctagaaaatcaaatatgaagaatgaagagatagaaaataggatttgagacgaaatacaaagaaatgaaaggggatcaagtgtatttgtactgactctgagattaacattgtccatttccatccagtaattactctggagtctggactcaacttggctcaagtatgcataagaaaggtagtttgtgataaggatttgtggagtcagattgtatgtatcaaatcattcctctcacagattttcctacactttcgttttcttaatattgctttctataaacttgatagctaacattcaatctttgaagtagaatgtatgacaacagtgatgagaactgtgcaagaaagcctcctaggcttttgaggagctgttttttctctttttctttttccttctttttcaaatctgaagaaatattttatttgctaaaaatgattatgttgttggcagattatgttgtgctagctgatgtttatggtccaagatttgtttgttcttaatgttgcagctaatt

SEQ ID NO: 11024 - DNA, 4208 bp, Vitis vinifera
  Intron number 7 from transcript GSVIVT01023109001 (locus G SVIVG01023109001) derived from phytozome v7.0 (chr-ID chr1 2; pos 22466815 to 22471022 reverse strand)
ctcaggatctacataaaagagctatcaattaccaggtaaaaccatttcaaataaaaaaataaaaaataaataaataaagaaagataaataaagaaaagaagaaaccaggtaaacttgcatttgatttctttcccttttgaaatctggtttcttattggcttgtgacttcttcccaaaagttcatgaaccagcttaaagttgttaatatttggtgaacctaaaatttattttattggaaatttctgctcatagcatcaactatttgacccacagccaggttctaaatcccaattgacattttttaatagaggaaattgagagatattttctttagttaggttgggaagggcaaggagatctttttttaaattggaattgctatggagttgttgtgggggcagtgggggtgtggagttggtttcaattaagaatagacctttttaggtgagaggctttggagatttctaagatagcaaggttaatacaaggatccataagcatagttttaaaaggcgcaaggcacacctaaggtgtagaagtctcctacaacttaggttcaagacgcacacttgagtgaagggaaatgtgccctaagatgcatatcaattttataaaatatgatcgaaaatctaatccaatcaataaaaagtttaagattccaaacatttaaaagaagcgttcaacaaaaaaatagtgaaattatataaatttcaatatacaattagcaggattaaagtatttaaaaagtaaaagtaaagtagacaaggtgcacctctccaacaaggtgcatgccttggccaacgaggcgttataactagggaatggttgcgccttgggagcattccttttcaaactatgtctatgagctgcattccagcagatggggtgcaccaacttggttgtcatgtagttgtgccaatgtccttgagaaggttatttctttagtcttctcagactgtgtgattttgttcatcttgcatgactaaaggctcagacatttgcttcttgaaggaccttttatgggatggttaatcttttaatatcctaatcccaatctctatctcaaggatggaggataatcctagtagtcatttccttcatcagtccgtacctatctttttttgttttttactgataactaaggaaccttccatagccaagcctttaggactctccatgaggacccaaacttggggttgctgattgcctcgcaacaaccagcactgggtaaatttagggtatcatcagtggcatgattcgaacccaagaccatgtgccacttaatgggaccccacttcctagtgctcaccttgaccaactgggctaccctagcaggtttgatcagtccctatcttcttattcatggaactttaactttcagcataatttatcagcaagaaattgatgacctctcccttgtcctctttgcatcatgtataactctccattttgtgatgaaatggtctggacttgggctccctcaggcctctttctctttcacttgttctttcatttcatttctaagataaggtgaggatgcctgagtccttatgaaagcagtacactatcttatatttcgctggctcagagtgtaagggcattggaatgatttcataagattagtgaagtaggacaacagaagcattttttcttatggaaggaatgaaatgagaagaaaagatgaaattagatgagaacatatgaaagacaagacaattaggaagcaccatctgaatatttctcaaaaaagaataatattaatgcccctgttgttataatcagccctatctataaccaattcaatatactatcctaaaggaaattcgattctaatcataattgaaacattgagctaaagtaacaagaattaactaaatttgaacgctaattttaataaaatagaaatcctaattttagggcaaataggaaatcctaatcttagtacaaatgggaatccttctcatcctctgcatctacatctagaatgaatttgaaatgagtggtcttcatcttcatcaattctctttgatggaaaaggactcgacttagacgagttgtggatatagtattgctcaagaatatcaggaccaagtcattataaccactatgaaaaatccaataacttcatcatctagcacatccttcacatgttcctatgtggctgctgaaaaatggtgaaagttttaggaatctttgctgttctagctgatcttagagacactctctgacaaaataggaagctcaaaggtgcatcaagaaggaatctatccttcatattgaagattggactaatattcgtatgcatttaagtcaagtaaatatacattgagcccaagtttgtaaataatacgataaggttcattttcttaagcaaacaacttcttaaaggaatgtggttaggatttctctttgccaaatatagatcatgacgtaaccttattcattaaattcttgatttctataatgcacatcagcaacaagttataactttcgttgtttaatacaattttacgttgtatatcagcatggagatcttttttttttttttctaaagatgagcaaatggtgatatattaaatcaccaatcaaaaagaggagctcacatggtatgcaagaagtgtacacaagaagagtacgtctaagaggcaaaaagaagcaatcaatgatcacaatactaatataatagttagtacatagccactcaatgaaatctatcaagcatgatggactaacttgaatcttgaacaacccacaagaccacatacatagaatagaaataaggaaatccttaagagattagtttgtgcattgcacctattcaaaagttctttgattatgttcctttcgaattgtccaaaataggcaaagagaagctattctccaagcctttcttctcttcttgcccaaaaaaccccccattcaacgcattagtaagtctttcaccaaataagggagaacccacaaaatgccaaataaagagaataggaagtgccatgaccctctagctttcccacaatggacaaggagatggtccaccaattcttttgcatttttacacatagaacaataattcgccaataaccaacctctttctacaagtttaggatgtctagattcaaaggacaaaggggatgagatcaataggttgatgaggagagactccataaacaatcccaaacagtggtttacctatagagtggttaacagaattgttattgagtgtttctctctaacaaggtttctatgcaagtcttctagattatgattaaacaacctctgtttgaggatgaactctgatctcagattggggccaaaatttctccgaagtgtcttctaaaaacacctgagaaatttgaaatccctaccagacactatgaaagtgataatccatgaagcttaactattttcctaaagaataatttggctacatgtgagacatcaaactgttttggtgcagggatacaattggagtgaggtttacaaagtaatagcattcaaggtggggttttaatggtgtagagcctccttcaaaagtagtcttgaatgtttgcttgggatcaaagattctgatgaagatgtcattatagctttttcaaaacctgtagatgatgagttggctgtagaactagatattctggcctcgttggcgtgctttctgagacacaggctttggagatcaatacccatcaagtagaatgggatcaattgttgttctctcttgggtgtctcaatgtgagaggggagcttggagatgtgatgcatggacttgaaaaatcttggatctcaataaaaagatgccttgatcgttttatcggctgtcttggtctgccaatctgtatctgttggcaccaaggaacctccttgtttgagatttcccctgagatgattaggttttttaaatttattcttgatccctggttgaatatttttcttttccatttcttgcatcctttctcgttttttttttatatagtaattagtagtttttttttatcagaagtaattacctatttgttttttataaaatattgaaaaaaaaaaaaactgattcttttgaccatttttctctttgcatttttagtaagtattctgaggctttatatctattctctgatgttttggaaagtacttttcaattcaagcaattgatttcttttttgacctaatttgtaggctgccaatattgtttctgcaaacatacagccact

SEQ ID NO: 11025 - DNA, 3017 bp, Vitis vinifera
  Intron number 1 from transcript GSVIVT01015702001 (locus G SVIVG01015702001) derived from phytozome v7.0 (chr-ID chr3 ; pos 15886812 to 15889828)
tttagatcccaatccaagtgtctatcctacaagtagtttatcagatgctctctattgagtaaactagttgaacaaaatagaaactacaaaaatcttaaagaaaacaagaaaatagaaataccttctcttacactcccaagcctgaaaggttccttgtcaaatttaaaacattcttcatgcttccttatttccttgttgctcagattagatgtgctcctaaatatttttccaagtaagacattataatccatgaagccatgtcatcctaatacaagaaaagaagttttcttcaactagatttgattttaaaaagataaggtgaaaattctaaacatgtttaaaaccttaccatagcttatgcgcattttcttttctttttcatcgaaacaaaactcgatttggatgataactttacattcaaacatccaaaaaggaaataattaaaagatattttacgtccacataaattgttcaatacttatattctttatggttctcaaaaagcaagacaattttaattttattcatttcttttagtatataattcaacttttttacttcgtaaaagtgttgacttaatagggtaatttaatatcagtaatccatcttgtaacacacaaaggagaagttaacatggaggtgtcatcataataccaaaaataaactgatgagattaaaccatttattgacatttcaaatgcccttattataatatacaaaaggagtgaatgataaagaatacaagcatctaaatgatttctacataaacaaaattgatccaatcaaatttcataagtactttaacaaattatcatgtaaataagcaaatgatcataatccatgagtagttgcctcattacattttattttattttatttttaatttattttttgtaagggtttgcctaggacttatcaccaaatgcaataagaaaattatctttcaaacatctatagtgaacttttgatttatttattcatctaaacataaaaagctatgaaaattttaatagaattaccttggaaattggcatctttcctttttaagaatcaatcaatgagaaatccatatcacctacaacaatgcttgttgaaggttgatctaaaacaccaaaacagaagaactaaatgtgggtgtattatttttgtatttgttagtacactgtacacctattaacaacattaaagacttttttcatttaattaaactcggattaaattaaaaaagtatgccatttttaaacaaaactcaccagccaacctcatgactatataaagtgacataataaaagatctccaaactagagattccataaggaaggaggaactcttagagaaaccaccaatgataagctagaaactaagtcacacccaccaataataagatgatgtgaattttccatttatgacaccaaaaatgtctctacccaaatggaaacagaaaaaataatattaatgaccacatctccttatacttggcaatatcagaatgtcaatgacctataatctactaccaagttggaaggttaatatcaatctcatttgtttttgtttgttcatatccatgaaaagtagctgaccatagaaggtatagcctttcagtcaactaattctatcattaaaagtgtatggctttctacaattctatgattgaatgcaaaatgcacaaatgaacaaggaatgtttaggtgctttaatgcaataaaagctgaattggttttgcacggttactatcccttgattcaatgatcattttaacggacacatgatgaacaattaatgaatatttggagtagaggttttgctttttaatttttcaagccaaggggaatgtctaagaatcttaaaaatccatataattagacatatatttggataattcattatgggatagttcaaatggtattcatctatacctagtattcataatttatataattagtgctcataatcgagtggactaatttcattctttgatgtatttcctgaatccttaattcagaaacctattactctaaccaaaaggatattcaacttaagagaatagatatctttctctctatatatacttatatgctccattggttcctcttattacaaatctaactagttgaacaattataacatttaatggaacaaaaatatgtcttttatctctatgaccaatttttctcaaaaaaaaaaaaaaaaaaagaattctacaaattcacaatattttaatttctagaaaaacaaaagaattacccatggtagattcactgacatccaccgaatcattatcaaaaaattattcaaattggctctttaagtctcattttcctatgaatccaaaagaaaatgttagaactctttaagtctctcaacatcattatgatagggatgtgcaagacttagaagaatgctacaaagaatataaggatgtgcaactgatgtaatccattggtaaatatattggctcatatgcccattgaaaaaattaaattaggttatgagttgaggaagacaaaaattccttttcatagaaaatttagagatttaaaacaattagaaaaaatcttcctttctcaagcactaaacaataggaaaatgggaagagactttgtttgtatttcctaagttttcacaagaaacaaatggaggagaattgaacaaacaggaagtagattgaaggagttcttcatggagaagggaagagcaaagagacttactagatgactcatagctgaaggttgttgaagatctccctcaactgaagactcatcaaagctagtaccaatattagagaatgaagattgcaaattcgagaatggagattgcacgttagagataagatatttcatcatctacaaaggtgtagggttatcgaaagaaatgaaaccgtgcatattaggtttattatatatggagcttatggttaaggcttaatctaccatagctgcattgggtctgttttcgcggcccacaacatgccacatccaaaagccttttgtggcctataggactgaaacaaatatttc

SEQ ID NO: 11026 - DNA, 5466 bp, Vitis vinifera
  Intron number 6 from transcript GSVIVT01008249001 (locus G SVIVG01008249001) derived from phytozome v7.0 (chr-ID chr1 7; pos 4133814 to 4139279)
gggtgagtttcctgtttttatcttttctttatcatttatgattctagtaaaaattgaaaaagaaaatggggacaggttgatgggaaggaagaaattgattagctaaggagatacttataaacttatatgaagaaaggctggcagattgtgccaaccaataaagagctaactgaatttctttttttattttaatcacctttggtgtttaggttctatgtttggatatgactgctgtttggctataatttgttgtggatacatttcagcgactaaaatgattatagatgtagtcaaattatttccaagttgaccatcttgaacaaggcactagaaagtaccaattagcctttatttcacagcatataagacatgatttgaatgagggtatgtaaaataagtaacaacaaccattttaacttttgctatgggttagaattcagttgttggatgggaactattggagtctatggatttttatggaaggttggagctaattttgaatttgacttattcaggttttgtaaattgaggtatttttactcaggtttaatcatactcaaatgtgaatgattctcggtggaaatattattttatttctttactataaaacaaagggttaattttattcacctttcttgaggttttggctaaatacacttggtccccattgatttgaaattttatcaagtgcctcccccactcaaaataaaggaggtatttgatgaaatttcaaaccaacgggagctgggtgtatttacccaaaacatgaggggatgtgagtgaaatcaaccctaaaataaatggtggtgtattataaggagtgttattttactacaagtaagatgtgtgaaagaaaccagaaaaagtgaagtgaaaagaatattcaggaaactcgtgtaaaaggttgggaaaaaataattgagggaagatgaagctcctcgattttcctatttcagttaaaattaacgtattccattttttttttaccttattggctgtaaaaatctgagttccaaacttcttgtagtttaaggcataaactgtagttaaatcccttattaccctttttacatgcaaacgtaatttcttgaatttaagctgctgatgttacaaatggggagtcaaataagccctggtttttattatgaaggtggcttcctttttttccattttgggtgcatttgcacctgtttatgtttaggcttttgcacggcttgtggctaataagaatgatgaggatgaatttccaagatatgtatcaagaaagaaaattagtattagttgcaattaaattatgattagtattacttgaaattaaattaggattaatatttgttagagttaaattacaagtagccaattattagaatcaaaattaggttataggacaattagatcctagtcttaattgataattaataatattatgttttcttgcatgcttagcaattctcaacggtgagactccatgatcttcttttaggtgagactcctagaaagtcttagtgtgactttaagatttctatcctttcttttctttattttcttccactatatttttatttgattttatctcactgccataaactttatcccttgttcctctccttgaacattgaaagataaaaatcctaagccatctatttgattgtagacaactaccctaggtttgttctattaataccaatgacttgcttaaattgaggaggcccaacaatgctctcagctccgacttatgtattatgtgtttgaagagtagtgaatatcttctttttcttcattgcccaatggcactagaactttgacatagattgttctgtgttgccatgattgagtgggtgcctcctagaggtacaatggagatgttgggaatttcttttaaaggctttgataatcaaccaaaagagaaagttctttggcaagtagctatcttatccttgatatggtttttatggttggagaggaatactataatatttgtggatgctatttgggatttgatttacttcttctcttccctttgagatttaatcaccagaccttttgtcgatattcttttgtatcttctattgctatattggaagaatatctgccactcaaagagatcatataggatggatatgctcaattggttaactcctctagtagatttggtaaagtcaaactttgatgggtgttccttggataatcctagacaattaggtattaaaggtctgatgatcattcaagcatattattgaaacttattctaaacttgcaggagtgggttagctgttgagcagtgatattaacattattggagggcttgttgcaagctaaagctttgtgactatccaatttaatcatagagggagattgtgctattgttgtgtcttgggtgggtgcccaatagggagagaggctcatgaaatttcaataactaggtccataaaattatagatgctgctagtgaggtgggatgctccttctcttgggttcattgtccaacaaatcaagctgtaaactgattggttaagcaaggagcaaagcacttggtcttttttgttggagactttcttcttcccccttgagtgcataaagttcctttagagggcatatattgcttttttctatcttttgtttgtgtagatgattctagcttttttgtggagcacgctctgatcagcaattatacatcttggaatgattggttattcttctttgtgtttaccattcaataaatgaatatggttgttcctaatacaaaaaattacacttgcctttgtttgatgtatctactggtatatagtacattttccaccttttgtttgagtagatgattctagtttttgtgtggagtatgttctgatcagcaattatacatcttggaatgattgcttgttcttctttgtgcttaccattcaataaatgaatatgtctaaaacggaaataattatggacctttgctatcaaaaaaaataattaatggacctttggactaatgttcaaaggtgccataaccaaagagtggttctttcctttagatggttcttcattaggaaactacagaaatggggtttggtgatggatcagagatccaggaggcagggtggttagagcctttcccaaagctgctggtgatttggccattgaggcagagacccatcctttgttggaaggtttgatggaggcaccttcactgggaaactttttggtggcagggggctgaggtgtggttatctcaccaattactcagagaacccaagggaccttggaaattgagttcccagacaagttagctgagcaaggaaccttttttggaaacatctcacggggatgtctttagtaagcattgtaggattggggatatgtgctgggtttttggagttttctgctgatcagtcatttgtacttataccctgattttattttctctattttgcttggaggatggttcgtccttcgtactctttctcctctttattccattaatataattttctctagtttcatataaaaaccctcatcctcgaaggctttcaaagtgaggctagtagcaatgtgtcagagagccctaccttgaggaacccaaaacttgtaaaggatataatcaacatatcatctaccctttcaggtggaatctaatggatcctatgtgtcaaaacaattcacagcattggcatgtggggcaattatacactcctcgctccccctacacaaaacacaccattctgggctaagagttttgatacactttcttaaatttgattccattggtggaaattttagccctgtctgcctcataattcatagtgattctccaaaattttaaagaatagcatggacattgtgcattaggacaaatagatagttttgtttgggaatatccaacatgtttgtgtatctaaagacctttttattaattatgcgttggttgacaatgacaaaatcatgtctgaaaataatgggaaaaatcaactgtgaaccaaaattagaaacttttggacaaacttttcattggtattatggtgtcattaagaaaacaaaattcccaacatgaaagactccagttcctttcaaagtcccataaatatatagcatgtttctctttcataatggtgaaaatctatttgatgtggtcatctcatggatgagggccatggagctatgatcactggctttggagtacaggggacctccttagcaggatcagagccagctagggcctgggggggcaggtgccccccgtgaagatgttaaaaaaataaacctccacttcttacaaaggaaattgaacccaggacccaacttcttccccccctgaagaatgcaaggcccggccattgggctaaggcccacattctttataattgacaaaatttatatatgtcttaaaagttgcccccccgaactaaagtcctggctccgctgctgctccctaaggaatggtgtttttctcatggagatctagaactgcaaaccaagaaagtgataaactacccaagagggaggctttatccctcttatgttttgtcagggatcatcttctcctttggaactactgggttttgtggccatataggagggttcattttttggttcttcgttgcttttttctatccctcactttctgctgttgtatctggtggaagggccttcatccttccttgaacatacactttctttatatatactactatttcatttcttaaaatctcatttaatgtcacaatttcttagtcttttgaatcaaactatagcacatgccttttggccgaaaagttacaaatgtagggtggaagttgataaaagtgtacttgtttggcttttgaattaactctcattatttatgcattggtgatgcataacttagtgacaagttttttaataaagtttctttttgggattttatttgatattttctaagtttcttttccatggtggcatggctgatgatggaattcatgcttctgatggatacagacatttgctagctgctaacatttatttgatctaggttttcaagttgaagttaaatctgataaatctgaatctctgattaaagcttcatgactgaattcctgactagttttagtcaatcttagtatagaattatattcacaatgccctactcccaatctattagggttggccacttggattttgctctgcccttttgcagctttcaaagctaataattcttctgttattttttctgggtttattgctccaactgcttctagtttgttcaaagcaatgaacacattgtatccaaatagtttgagcatgtgtaccccgcattatgatgacccttaattcctttttctttcataaagttgcctttttccttttaattaatgacagttccgtgtacatgtatactgattactttttcttccctctcaccacctcccagttttctgtgtgttacatcttacatcaatttctcagtttctaaattaatttcaccatccaggtgggtgtcta

SEQ ID NO: 11027 - DNA, 7904 bp, Vitis vinifera
  Intron number 1 from transcript GSVIVT01008912001 (locus G SVIVG01008912001) derived from phytozome v7.0 (chr-ID chr1 8; pos 3340968 to 3348871 reverse strand)
ataaatttatttaaaaaaaaaagtaagatatgaaattttaatattatattaataatatttcttatctagatagactaatataaagtattttaactcacaataagaaaattgtcaatacaattagttaaactttagaaattaaattttaaataaaatatattatataaaattttatcttattgaaagtggtatttaatttttttttattgactttcatacttatctaattttttacttgaaaggtaataaaacatgtttaaaaaaaatagttttttattttttaaataaatgagtataaatatattaaaacaattaaagataatcttagtaaaaaaatttaataaatatgattataattttaaatatatattcatttggataaaatttcacaaaaaaaagaaaaaataataatggaaagaaagaacattgttaaaactacaaaaacaaaatatataattacaaaattttgatgatgaaatttaaaaataaaatttgaaacaattcttaagtgaggaaaaaatctttgagtggaaaaaaatgggaaagtttttcaaaatcacttgaaatccttaacaaaaagtagttttgtacacccttgtataattagtaaatttgtcttgtacagttagtgtaataccattgtacaataactcaaatttcatacatcatctcatgaatatcttataataggtcgattaactatgtttgcattggtctggttttaaaaaagaataaaaattgttattgtagacccccatttaggcatgggtcactttttctctatttgtttttacagatcacatttttagccaggtgtcactatcctagcgggccacgtgtcacatccttagtggccataaggaatcaacctcgctttttgaagctgcaataggactttgacacgtggaagaactttctagaagggggtcccgcaggccgttaaggggcgcggatgagagagaaggaaaggtagttgttgcagagatcgttggaggtgacagcattgtagaggagcagagggtcttgcttttgagagagggttggaggtgacagcatggtagagggacagaaaaggtggttgcgatagagatcgtaaaaaaaaaggcaaaaatctggaaaacaaagggaggttttgaaaaaaaaaaattgtagaagaacggaggagtttttctgggagttttgagggaaagagtattggttgaacttgagaggaagctaagaacacaagagcgtagagttgctgggaagagtccaagacacagagctgagaagggagatttccaggtatgaccatttgtttttttgtatattttcctttttttttcagactgtccaggttcgattctcagtgatttttcatttttgcttgttgggttgttctgttttggtgattactgattaaatattggaagagtttgttgtgttttatgccctattctgacgagtattttttcatcttaactcaccggatgttggacccatggatgaaatgatgaaatgggtctgatatgctggttaaagtcttcatgttcttcttcttattgttatcctgttatctccttgttttcttttcctccctgagtgcatactcaaggctccaaagtctcagctgctttccgtgaagcttcaagccatggcctccttgtggctagaatctaggttttcaatgatgatgagaacagaccttttcagttttctccaagctttcacagtcagcaaatacccaaggttgcatactaccaagcatattcgtcgactagacgtggaggcgcatctgctggtggcctgcccattgtgtttatgtccatgcacatgtcttcactctgcatgacccccatctctattctcatgtaagcgtgtcgtcatctcatctccatgtcttttttccttatccaccatatccatcgttcatctatccacctctctctctaggtcatcatacctatttcctcactcaagcttgcaggaatcaagcatcctccaccacacccattttcctctcattcattctccatcccactccctcacttccatggagtctcacgggtgcatgctacccttcactccttcacatactcattaaatccactcacccaagcctccatatctatacaacccatacccatccttcatgctactcataatcgtgttctaccatacccatgtgtacacccatttaaccataccaccaaacccgtttctctttctaaaccttcacctacctgtgggatcctccaaaaaaaaaaatgctacgtggctctctctcccttgcacacgcagacggtcccctttacgacgcgcgacatagctcattccacccggggaggaattctgtctggacgacgttcagacttctccggatatctcacatccggaattctgtctgccgacgtcccaccttctccggatgtctcacattcggaattctgtccgccgacgtcccaccttctccggatgtctcacatccagaattctgtccgtcgacgtcccaccttctccggatgtctcacattcggaattctgtccgccgacgtcccaccttctccggatgtctcacatccggaattctgtccgaccgacgtttcaccttcctcgtgtatttcacatccggcgccttacgccggatgggagatgagggcgattcaacttccctggtcagacatgtctgaatcctctgatagcgcctacccggagagcatccgcagccgacaattcagattccccgaacagcttgtctcgtcagacactcgcgatccgccgaatccatttcagcccagaatcaaaaagcaaactccgataatactgacgaccaagtctcctgaactgtcatcatctctatgtttcatccttatttgtttttttttttatgaataatctctcatactcctatttcttacatctttttcaaattcaagctattaaatagttttccaatctcctaaccctttcaataattttagtttttttaaattctcatccttagggttttaggtcctaaaaatcacatttttaataaaaattggttgtcactttctttctggcaagccattttcacacctcctctgttttaaaaaatgttttgaaataagtaaagaatcaaattttgtaattctgaataatggaatttacggatttggtccgtgcaaaaataatcgggctttggtgggggccccacatacatgatcttatgatcgattgattgacttggttatcatacatgatttatttatcctgctctctgacatgcatgctattattccttaattatgcactaaccctctctcttgatagtgcatggtggcttattgccgaggtacgtacccactttccatctgatcattatctatgcatattcgaactctcatacgtgcatgatcactttgggtattcatcgatttactcatcaattgccataattgcttcactttattagtagagacccttttttaggaacttagaagggtgctacggttttttaccgtacctttctgataagtaacctggcccctgaacccgattcgatttttcgcagaccaccttttctaaaataaggagtcacacttagagttttttttcttattttgtttaccctttaaaaataaaacaaaaataagtggcgactccaagtcattttcttaataaataaaaatcataattttttgaataaaaagcgagtttcgccatcgagtgggaaacgcattgagccaaaatgcggggtccacagttatataattttattttacaatcatcataagtgaggtacatattcaaatgaccatatacaagttagataaagtgcatgagatgaatgtatgcttaaccaatgtgtgtaaggaatgtcatttatccccggttaggagaaataaataaacaagtttttcaaaatcacttaaaatctttcacgaataataatcttgtacacccttgtacagttagtatatttttcatgtacacttagtgtaaatacattggtacagtgactcaaattttatatacctcctacttaatgtgtaaccataagtaggttaaccatattttcattggtttgtttcaaaaaatagtggaagatggaaaaacaaaattttctcttaaacatcattagtgggataaggatttgaattatcatgtgcgagtcaaataaagtgcataagatgagtgtgtaattgagaaatgtgtaccttaagagtgtgcaatccttagatgacaagacaaaaaaaaatatgtcaaaaattgattaaaatctttcacaaaagatagcattgtataacgcttatatagttataacatttgtcttgtacaattagaacatttatcttgtccaattgaatatttaccttgtatagttaatttatttattttagccaagtttatttatttatttccttttatttttggaaataaagaaaaaagaataaaaaatttatttaaccataagaaatacgaatataagatcagttagaaaatatcaaatttatttatttattttattttattttatttttggaattaaagaaataaaaaataaaaaaattattttaccataaaaaatattgatataagatatgttaaaaaatagaaataacctcaaatttatttacttatttcattttatttatttaaataagaaagtaatttattttaataaattaaaatatgcacaattgatttattactttgttaattatggatatattaaaattttctattaaacaaaaaaataaataaagaaaataaaattaaaaagagtaattaatatatatattttagttatttaattatttttcatgtaaaagatagtcccataaaaaacacataagtgatcaatttatttgtttaattgtaaacatactatattttttattttattattaaaataactaatgaaaataaataaaaatggataatcaatgaatgaattttttttttcatataaaaaatagtatggttttcaatttttatttttaaaaatagttttcattttttaattaaatgttttttcaaaaaaaaaaaaatatatatatatatatatatatcatattaccatttttttagaaagtattttttaaaatagttttttaacataatttttctttatttataatttaaaataaaaaataatactgattttcaattatttatataaaaaattaaaaatagtaaaaaatccaaattattaaaatagaattattataattgtatgaataatagtgcaataaaaataaaataaaaatgatataaaatatcattaagtagtccatcattattttatatccttagaaggtaattcatacaaattttgaaggatatacttttaatatctgataccctttcgggtccgccgaaaagacaattctcccttaggtttgttaaggttacgttacgtactcccaattaatgtcgtcttgtccagaggagccatctgtccgggccttggtcgaaggtgtctccttttccccggaggcatctctggcggggtatttcactgctcccacaattatgactgaaaatcttggtgaaattttccttctttccatcgagattttggattttggcatcatccagggatatttgcttaaccgcccccagtgcccaactatatatattttttcctagaaaaacagcaaatgagattttggattttagcataagtgaatatgaaaagtagagttcttatttacttaaaaaaaggaaatatatataattattattgacaatattgattaatatcattaattttattatatatatatttaaaaataacaatgatttgatatttttattattaattgttttaccattttcaaagttttactaagaaatttgagtgtttttaattaattttcatattgatatcacaattctttaatatttctatgaaattcacattgatgcttttcacctacactaatactttcagtattgattatgataggtggtgagacagctggtactaaaaacatgtaagactttaaaaggcacaaatttatttcacttctaaataattaatttgctgttgttctcacttctcattcataaatatccattcaaatttccaactacatagctactttagttaaggatgccaatcaatttcatacccccactatcttggtcccccaattttcttttattaatttgaatagcaaagatggaagcataagaaagaaaaagaaaggggttcactttctttttcactatttattaatttatttattaatttatttttgtttgtgaaggggtcattaatggaagaacccttttatggtcactcaaacatttaaggaatatgaactaaacaccattctttagaaaaacgaattaattatcgtgttctgacgtgttctagaaaatacaaccatatataatcaaacctataacaaaatgagttcattattattataaaaagttattgctcgctctaatagaaggatgatacgttaacttccaataattataaatattaaatagcatttaagaaagaaataagtacattttgttatatggaaatggaaatgtaaatgaaaggtacggagtaaggccgaaaaagagaaagaaaagaaagaagaaaaaagcaagagagagaaacatgacgggcatagggaggaaaaatagaaaaaataaaaagggaaaaaaataaaaatatatttaaaataatttatttatttttttatatattatttttaatttttttaactaaagttcatttgataatatttttttaaagaaaattaagtttttgatgaaatttaagaagtacttctaaatatttgaaaaaccaattataatattttatgaataaagacttatagtaagttatttaaaaatattttaataatgttattatcaatatttattttaattatttagtataaagatgaaataatttaaatatatataaatttttatttaatttgaattatatttaatttttttatatttttttaatctaatatttatggggttgaggataatggatgaataatttaatttaatttttatatttaaaaaaaaaaccttttggaaaatcggagtacaagtagatagaagaagagtacaaatacaatgatgaagaggaccgctggaagagtcatagaattcctaaggcctaactgtttggtaatcccaaccaatcttaaaataattataaaataagatttatttaaaataaataaaaaatacatacatatatatataaattatcattgtattttaaaatttaagatctataatattttaattagtttttaaaaattattatatttgtaataattattctttttcagaaggggtgacgtggaaaaatacacttcacttagtatgaattaggtaagattttgtatgatataaaaaattgaaggaaaagaaaattgaaagaaataaaaaataattttaaaattaatatttttttatatattatttaaaacttgttttacttatttaaattttttgatataaaattaaataatttaaaatattttaattaaatatgataaaattatttccttccatcaatacataggacaaaatcaaatgtattcacaccatgcaaaatgcgtgtttgatatctctccacgtccacgccaggcccatttcttgatcctaaatgatgaatttattgcttcaacgacttcatttggccatttccactgagtcaagaatttatgatattatatcgaattactattttttttaataaaaattaaatataaatttttgaatataaaatatatattatactctttaatgagcctgtaaagataatcaaatagataaaagattttattgaagtaagagtaagagcacgtttaaataatgattttgagaaatatttttaatatttttaatacttaaaaaataaaaaaatttaagaaatcaaaaaattaaaaccatttttcaaaatcaaa

SEQ ID NO: 11028 - DNA, 10252 bp, Vitis vinifera
  Intron number 3 from transcript GSVIVT01037411001 (locus G SVIVG01037411001) derived from phytozome v7.0 (chr-ID chr6 ; pos 14214930 to 14225181)
gaaacgctgcaagcaactggggtggcatttctttggtctattaaggacaacttgaagaaatatttgccggaaggatttctagagaggacgagcgggaatggaaaagtagttccatgggctccccagatccgagtcttagcacacccttcagttggagtgcacatcacacatggcggttggaactcagtgatggagagcattgcaggcgaggtgcccatgatctgcaggccattttgggctgataatactctcaactcgcgggcaatagaggatgtgtgggggatcggtgttggagttccaggaggggtcctcacaaaaaatggattaaaggcagccctagaacaagttttggggcagcaagggaggatgacagaaaaaattggtgtcctcaaaaagctttggacaagggccactgagccaaatgggagctcaactcagaatttccgtactttgtcgaagatggtgacgaatgaataggcatagtagttcaatttaatgcctctatgttcttacatatgcatgccaatgatgaaaatgtaaggggcttctttaacttttgcaacaattttaaaaattaattattaaaaaatatagttggaaaaatattgatagatgtacgaaagtttttgacagtttttatcatgtgaaagatgttttttgaaaagacacctttcataaatttcaaaattatggtagatatttaaaagaactaaatttatactaaaggtgtcttttgaaaagacttccacaattctataaaatccaatatgtattaaaagtgtcttttgaagagacactttccacaatttggcaattttgaatgtctcatgaatttgattttaaagttaaagatgtcttttgaagactttttagaattccaaaaaaatttaatttatacaaaaggtgttgcttgaagagacttttcacaattccacaaattccaatatatattgaaagtgtctcttcaagagacaccttctacaattccaaaaaattggatttatactaaaagtgtctcttgaaaagatactttccacaattccacaaaatccaatatgtattaaaaattgtagaaatgattttaaagctaaagatgtctcttaaagagacgccttcagcataaaatagaaattttccactgtgtatggaaattgtggaaagtcacttgaagaaacttttcagtataaacccaatttttttttaaattatggaaggtgtctcttgagactttcgtacttccacaattcccaaaaaattgggtttatactaaaaagacactttccacaatttccatacacaatggaaaattttgaatttatgctgaaagtgtctcttcaagagacaccttccacaattcccaaaaaaatggaattatactcaaacacatttcataatttcaaaaaaattgggtttacactaaaagtgtctcttaaagagactttccacaatttttattcacagtggaaaatttcaaattttgaagagacacacctttcacaattctcaaaaaatgaaattatactaaaggtgtctcttgaattgattcaaagtgacatttggggaccatccacaattccaaatatatccggttcttgttggtttgtttctgtactagcattacttagatattcttaatcaaacaaaaatcctatgtaaaaagtgttgtccctaactttcactccatgattcaaaaccaatttgggggataaaactaaaatctttaggtctgacaatgcatgtgattatgtcaaccaaattttgacaccctgcttccaaaaagaaggcattattcatgaatcatcctgtgtaaacccaccacaacataatgaggtcgttgaatggaaaaatggccatttactcaacgctactcaagcattgttatttcaagggaatgttcctatatcttattggggagaggttgttcttagtaccacttacatgatcaataaactaccctcacaaatattagatttcaagactctcttggaaacccttgcaaaattctatccacatgtcaaaacatcaactagcctcatacctagattatttgattgtacttcttttgtccatgttcatagccaaaatagagaaaaattagaccccagagcaatcaaatatgtgtttcttggctattcatctacacaaaaagggtataagtgaaatgaagatattggaggcttataggaaacacttgatgtgttggtggatatttaatatggtaaggatcctaaggaaaagaaattctagactatcttcagcaatgagacactttaaagagattatgcaagagctaaattttcataatattccattgatggaggtctttttttttttttttttgataagtcattgatggaggtcctttcacatggtaaaggtttgagacatctttctttgttaagattggaccgaatttcttgaatcggaggattgggaataccattttagcaaaaaaatttcaagtgttttgctaagaatagtcattgatcactttattgtgttgttggatgaaggaataagaaggggtaaaaaccatcttagattcgagattatatggtttaaagtggaaggttcaaggactttattaaaaactaatggaagagagttaatttcatgatatcttttagctttgttgttatctgtaaattgaaaactttggaggacgatcttaaagtttgggatgaatagggtttgggaatgtgaaagcttggaagtcacatgtcttagatcaaattggttatcaagatttaaagaagagagaagcaatagaagtgtagtaatagaagaatacaatcaatggcccattttagaaaaacttctcggatggaaaagtctagagaattgcaaacaaaggatggagataaaagcaccaaatttttccacaaaatagttaatgcccataagacaaggaatggaattcaagaatcaaggtgaatggtgttaactcatagaggaatcagagataaatgagtatcaaattctttttttttttttttttttttgaaatttagggattggagacctagcattcgcaaatgtcttttaacactttagacaggaggaataagtgttttttgctttatctaggttgagtagaaaacaaagacctagagttagatggcttcaccatgtcttttattctatgatgttagaatattgtaaagtatgaagtaatgggtttctttagggagtttcatgagagggactttttttgagaaaagcttaaatgccaccttttatcaaccaaaaaatgggtatgaactaaaggacttcataggttaactcaataaacttcatatgtccatgccatctttctaagctcctttacaaccctaagaaaaaaggaacggaagacttaacaggacttcatacccattagttcaacagtgggctagtataaactactaggtaagtttatggccgattagctcaagaaagtgatagggagagtgctcccaatgctcaaaatgcctttatgaagagtagacaaatcttggatgtgatgcttattgcaaaaggtgatggagtcaaggttgaagagctctagtgggcagtggtttgtaagctagatgtcaagaacaccaatgaccatgttaattaggtatttcttttcagaaaatctcaataacatcaattttgagcatgagtagatctagtagactaagtggtgtatatcaactactaggtttttaaggttggtgaatgatgctcctaattttctataaagctataggggttgaggtagagggatctcttatctccctatttatttgtcttagcaataagggcacttagtttttttctcaaaaaggatgaggtaaggtggtttcatctttggtttaaggggggagggaaaggtggcaaaggggtgatggaatctcatcttttaatagcgacattcccatcttctatgatttatgccaacaacaactaatatatttacattaaactctcatgtggtttgagatagtttctaggttgaaaactaatataaagaaaagtgttttaattctagtaagacggtctctaatgtggaggaattagattctttgttaggttgtaggatgggtgagctcctcatcatctacttgggtcttttgttggaacctccttaaaattttcgatgatttagaatgttgtataagagagattctacaaaagcttgctttgtggaagtggcaatatccatcaaatggtggaaggcttatattgattagcactctatctattgccaatatattttatgtctttgtttgtcatttaaaaaaatgtgagcttgaaactttagaagatccaaagatacttcctttatggtatggagcccttgagaaaaaaaaacttcattttacaagatggttgatttcttgcatggacaaaaagaaaggagggtttagcattagagactagcagtgcaacttaggtgggttcaacccaacctgattttggacaagcttatgcaacactttttgcattttggttaagcatgggcaaaaaaaaaaaaagttaacctaaatttaatttaggttaggacatcgtgcaacatgaacccaacttgaacccaaactaagtataataataatatttatatatttataatttatattatttttttataataatattctattcaattcctttcaaatgataatttaactatattacatattattttattttcttataaagataataattttttattatcttaaaatgatttattatttgttattcaaaattttggaataaatgtataaaatataaagttaaaaaagttattacaaatgggttcaactccatccaccttgaatttgtctcatagaacccaaacaattgtctaacctaaggcaaatccctatcaacccaagtctaacctaaacttaacctaagcttagaaaaataaggatggattgtgtttgggttaaaggtcaggttggggttgggtttgggttgcaaactaccccaagtcacaaccctattagagatttatttgtccttggcaaggctttgcttggcatatgtttttaggtttgcctttcaaagggaacctctatggaccctagttatagtggagtagtttagggaacaagcaagtggttgagtatagggatggattgtggaaacaaatagggagatgatagttagtatttaaaagtaaagccaattttgttatggtaagagtgaagttctaaaatggtatttaacatgggaatatccattgagtctctctttccctttttctttgcaatttccaactcaactaatgcttaggtcaagaatgtttgagaatatttaggtgagggagggcattagagaccttttttatctaaatgtgaccgaccggtccaatccagtttttaaaacgatgataattacatggttggtggtagaattcaaaataatcttgactccaagaaatagtgtttgttgaaatttgatgttttaatgtgtgttcaacgatagattgcatttttctaaatcaaataattagtcttaataaatagttaaagacatattattacacccaaggaggaaaatgtagggatatatcaccgatatatcgtgtatcgggatgggtcgatatgatatttcgtggaaaaaaatcggagagaagatatttccacaaaaatcgccaaaatatcggcgatatattggctcggggagataaatcggcgattttgtgaaaaaatcatctctgatggcaataaattgccgatatatcggtgattaatcaaagataaatcgtcgattttttggcgatatttcccctccttcatgcagcgtgatctgatagcccagatcacgctcatgttgatccaacgacctagatgtgattccaacagtaattgattactactcaaaaagtgctatttcatagcttgtaattaactcttttaaacacttttgagtagtagttatcaccttttaacccaattaacatattaaggacccttgcaatcaattctaatcaaattgtgttaaattttggtgttttgatagctttttgatcaccaaagcaatccgagattgaggagagttctttggaatccatgacaaaagatatccggacagggcgtccggacacaccatcggagggcagcggaacgtgggctgtggtaggttgtcgaaatgacgtagcaaggcttgtgcactttagtcaatgatccggacaacacatccggaattctactccgccgacattccacccggatgtctcacatccgaaattctaacgccggatgggagaagagggcgtttcaacttccccagtcagacatatccggatcctttgatagcgcttacccgaagagtttcgcagccattttgcacagtgtcgcggtgttctcctgaagcttccagatatttgcaaccgacattttgagatattttgctttagatatttgatgtttaaatccccaaactctccttgtaacccaccaattataggattccttagttattaagtttggaaaaagggtgaataaccccttatatatagtttgtaatcttctttagatagaatatcaaaatctcgggagcttgttctcagagactaatcctttgtatagttttggaaggaagtaaaatacagagcacttgctctgcttttcatatatatttttgttttctcattatttttctttctagccaatcaaactctgaggatttttcctcagaggatgagaggctaagctcttcgtctcttagagtaaagaaagccgggtaagtttccacatgcataaattggaagttttgttgttttagtttttaatgaagagaaagtgtgacccgttaatggtttttatctttttagttaacttaaaacacctttaaatcacctgggccaacacttggtaagacaagtgatctccgtccattgagatgcactagtttacctcttgcgagcctttggaaggtggtttgaaggtaggattttctataatagccaacacttggtaagcttttggactccatggaaacatccattagttatctcttgcgagcttttgacgggtaatccaaggttaaagatcactttgaatgacaagtgctaggtaagaggcacgagtcattgtaagatgcatcagtgagagggatttagtgtttgaacccattaaggggaagcatctgtaccacaccggttagagaattaactatatgttaattctttaatgcgaggaaaagaaacaagtgaccggaactccctttttgtacaaggaacctgagcctagtgatctaaactccaagaaacacttttctttgtaagtaaaatcagttactatttttggttagtttaaaacaaaacctttttccaccaaagattatgttttcttttaaagctaaccttgaaatgaaaaagcaccaattcaactttgaattaatatcaattgtgaagtgaaaacccattccagtgaacgatcctagagtcactatgttatagtagctttatctttgctaccctagttcatggtgtaataggatataaattttgttgattactccctcaatcaaggagcaccaactggacatgaatcagctgatacaccaattgggcacgaatcagtaatatagcaatccaacggccaaattgctcccagttttttatccaacggctaaaattgattttcaacggtaaattaatattccaacggctattttggcccaaatttcttatataaatagcccaaatttcatccatttcatccatttttgctttcattcttcatttgctctctcattactccaatttttattaaggtttctcaattattcaatcatttaaaggtattttgttttaaattgtaattaattttgtttgcaattgtaattaattcatgtattttcaattaattagtatgtttgcaacatggatgatttaatgctatttctacattcaattgtaattaatttttatatttttattaaattaacttaggttaatttgattatttaattataaattgatatgtttattttagatgattatttgtgatttattttcacatttagaattaaattaaactagttaacttagctaaattatttaattaatttaattaacatgttaaattatttaattagtttaattaacatgaactagtatattttgaatatgaaattagtttatttaatgaatttaatgtgtacaaattatcaatatttaatgaaatgaagtattttatgtgactttataatgagaacaattacaaaactaacatttcttatagatcgacatgatataattacatctaatatcgcaaattatatcatatgtatatcaaatttttcaataaaacaactttaaaatatctattatacttctaattatattattatgagattttccttacatttccatgagtttttaataattataagtctatttccatccctggttttgatccattttgccctagttttctatttcccacgtcccaatcagattatcaccaattttcataattctcaaagcctcactccaaaacaaaatcaaatcaaacgtgcttctttttttctctctttctctttgccttttacaccgccatatacagggagacttcattttataatgtgtttggaattcaaatttttgcataggttgtgattcatttagtttgcgaagaaggagatttttagagttacgaataagattttttcttgttttcatatattttttctttcattttgtcttttgttttttctattcagttcctagaaaatgtaagggaagagttgttgaaatctatgaccctaaatttcattattgtggtgtttctatgcacctttgtatgctttgttgaaatttgcaaggttaaatttattgttattgtgttttatatgcacatttgtttggttatgaagaaaattggggaaatatatatttttttttcatgttctctcatcgtaatttaatctatttattttcctcaaaaaatatggggcaattattgcaagttagatttctggtgttgggattttcctttttattcttcctcttctccatttttttaaaatcttttcaaacaatttctaggttgagttttgtaggaaaatacaacattatttggtatgcttgcttggttaccaagaaaatattagaaaactaaacaatttaaacacaaagcataaaaataacatggaatagtggaaaagaacaagtacatggaacatgatgaaggtgagacaaaaaatcaggatgatttgttaaatttaacaaatgttgtacaagtgttcacacaatatatcaaggtgggatgagtgtttcaacaacaacaatccaacttttcaggaggaatgacagtttgataatagtaaaaataataaataaaaaatgaaacaaagttacaacaaaactctacatttcagcttttataatataaagatatttagcattattttaatataataacttttacatataaccacttctcatgggttatattaaaaaaaaaaaattaaaattgaaatatggacaatttttactaccttgggttttagcctatttaaagtaattttcattctcgtctccccttaaagtataattttccctaaattatattggcatatctggaataagagaggtatcaaaatcttgacaaaagaacttctcattctcctaataataatttaaaaaaaaaattattcctaaataatcaattctaatatggtaattaacaatggaaaataaaatggatttcctattatcattttcttttccatgctcatctaaaccatggatgatggaatcactaaattataacaattaaggctcattttccatcctagttgaggtatggtattaccataaaaaaatttctttctccaaaaaagattatcattccaaacaactacaaaatatcaaacgctagatttcaactttatcctctcatcatcaacagatatgaggtttaaagcaaaagaagaacaaaccaaataagagaaagaagataattaaggaaaggaatcatggtaagcaaggaaaaagaaacacacaatggatggcagtgaaattaagcaactaatttaggcttccacatattttcaagtcagctgtttggacaatttgtttgtctatcttcttcattcaaacagatcctcaccaatatcttcaaaaactacgcctccatggaccaacacattggtgtctaggccttccccttcacctcccatcctcaaaccctgctcggacttgtccgcaggctcgcatttgcagcgccccacacaaagttctccttcttcagtaccgcaaactcca

SEQ ID NO: 11029 - DNA, 5174 bp, Vitis vinifera
  Intron number 1 from transcript GSVIVT01036059001 (locus G SVIVG01036059001) derived from phytozome v7.0 (chr-ID chr6 ; pos 21274329 to 21279502 reverse strand)
acgaggccgacgaggccgtggtggtaaaatctccggtgagtttgctctggggatctgtttgcctcggtgtttggaattggaaattggttggctgttgactgtgggaattgtgtgttccttgcggtttgtatgtgagtttggttgtttgtgctttgttctggaacttagggcgctgaattgtgatcaattgagtagaattggacctgtggttgaaggattttggcgtttttatatattggattgcaagctgggaaaggaacaagttaattgtagttcagaaagttgttagtagcagtattggggttgtcgttttgcataaaactctacacggggtgagatctattataagctcttcttcaagtttatgtgtcttctcccatccttctttctggttcttgctttctttctagttctttgctttatggtatgacaggttgagaaggttctatgggtgtaaatgtgaagttttagtttttttcgtcaatagctgaggcataaggggtttaagtaccatttggtgcattgaaagataattgtagttggatgattaggtgatctattagtttaaagatttggggcgttttgataaatggttgttgggccattgcaatgaagtgggattatattatgagtgaattagagtcctggatggtgatgatgttctcaggtgtaggttttattttagaattttagacccttgttcatcaagcttaccagaaaattgtggtgggtctcctgtggagggctatgttttaggatgatgtttggtgtcggatgctctttttggtagcttgatgaactttctggaacaatgcaaagagagatgcaaggttctcattgtttatccaatcaaaaagttttgttcccttgtctttgtgtttgattctttagaaagcctggggtgttttacttgagtttgaccatctaatctgtcaaattacttgtcacctttccattgggcaaagatgggggttttcttccgaacaaagattgttttaaaatttatttttcatatttttagccataaattatctggttttaaggttcttgatgcctttccaatttgtgcttcgcaaggtggacatcaagccagtgaatcatttgtgatttgttgccctttctctcctgccatctggttattcaacacatttcattttaaatcttaaagaatgcatccatgtttattgcttatattgacattttgttgatattagagtgctgcacaaaaaagtagtaacataagctcaaaatgcacattcctagagggagcacatagctcctgtgaatcaataattagagctaacttttccaatatttaatagatggagaagtttgtagtctagaggccagactcgactaggtttttatcaacttagagaaatcatattcccttgtaaggtatctaaatgagttatggaaaggaaaggagtttcaaatagacatgctgaattgaccaatgatatccttgaggaagttgtacatgggaaaagcttagcgagagagctgtgagttcaatgacagtggacttacactgggattatcatctagttcctacctttttgcttggcttttgggagaagaggtagtttgtacttgttggtaataaagaactcttatattaaaataattggaagttctcttagagcatgatagtttttggttcagagtgatttgtgctgtgtatggctcttacattggtttgaatggtaatggggtctctattcccccttagataagccttttgaaaggtctatgcttgtaacaaaaggacttttaaaaccagcctaatgttcaaactgggtaaatggtgaaactatcaggtttagactggtttagaatggagcccctcaagactgatttccctttgtatttttagttattttgagttgctgcaggtaagcctgcactacacagataagaaaatggagatggaatttgaaactcgtctgacatagaaggatatagagcgtccatgacaaatcttcttcgttctgtagttgcagtggtgtacagcataattaaaaacagttaaatctttacaactgaactcatttcagaggtcaaaggactcaaatcaaaacaaatggaaaggaagcaaagaagatggtggtagtgaacttcttaatttcctttcttatttcctttaagagctgtgtgatataagtcaaatcggttctgaagcaataatccaaacctaagtcatggtgaaccaaagttacaggttctggatttcccattcttcaactaatatggtgaggtgaatgaccatatcccatgcatcgattatgttaccatgtgaaataggctaaccttaaggcggttacaagaagcaaataaagatgggttggggcttttacctatttaaacttttaaggagggaatgatgaattggggtttatggcacatttgaataaagccataacttcaaaaggcaaaagagaagaaagggagagaaaactgtcgttttttgataagcacacagaaaatattataaatagggaagagacaaactttagtcttactaaggccttctaggagagtctcagttagaatagaaaataatcaatactcacaattgaagagaaaaggagagataaatcttagcatcttacaagaaaatagctgaatctcactatcaaagagaaaaaagataaaggtgaatcttggagtcttattaaaaccttataggagtctcacctaaataattataataataatggagactcatcactaatatttgaaaattatgcaaaaaatatttgtaatttattatattccattctgtaacacttagccttatttatttactttagaaagctttaaaagaacttaataaaatcattaaaaagaaaagaaacccaacctatatagtatctgttatgactttaatttttttcctagaactaaaaatccaccaaataatggcattaaagtataaattgtcatttctttgcaagcagaaattttaaaaatactggaattctcataattagaaagttccagtaaagttttaaattcaaaatataacttcttgaaatagaaagcttaaaagctcagaattttctttgtgaaaaattactagtgaagaagactttctaaattctaaatttgtaaatatgacttaaacaaccaactattgctaactttgacttaagaacccaaatctgcgaaagggcaaaatagcatttgcttcctttttgtgaatgaaacacaagtggttcattcccataattatggctcaaggaaaggccaataaatcttgtgtcttgagttcattctggcttctaagctcgaccccatttgtgaagtagttgactttccctaaaggaaaatgattcctaaatttgacaaaatgcttagtgttgtttctccttcaaaaatggttcccttaacagccatgcaaattttatgcgtaaaatagaccattttcttcaatattgatcagaaaggtgaactctagttaagtttacatgtaaggtgcagtcatatttatgaactaattttcctttaccttgatatgctatcttctcataggccttcacttttaacctctgcttatctttttttacttctggattacaaccccaaaaatctgccagcctgcctataaaagaagagaattgtttagtagatcactttgtatgaggttctatatttgccaataagtttacttcgtgttcttgttccaactaggtagaaagggaaaaagaagaaaaaagattactaaggcagttttttgtggagatcatggacaagtgcctcactctagaatggttgatttgcttcctagcttcttgcaaaattgcatttcctcttttgaagttgatggtagtttatatcctgcaggcttttatagttatgggcaaagaactgtacatgttaataataaaaagattacatacagaaacaggaaaatcagcatagttctggtagtctgcagaaaagggtagttataccttggattatttctacactaagaagttacaagtcatcattcaagtggttttgtccttctacaccttctgtctgttgcttgaaaagtgcaatggtctgcagttttcagtataactataccaaatgcatctttttatgatgcataagcaaactgttgaaagcctatttattcataaactcctctttattgggaagcatgtgacactatgccatgaggtagtctgaagaagaggtcattcagccaaaacagctcaaactggtcttactagctgacatcccagtccttggcccattgactcatatcagtggcttacataatgtaccctgctacctcagacctcaatgtttgttatactgattgccatataaagcaaaggaatattctccagctgctttgtgaattgctaagattattggcctttttttttgaaatagatgtaaatgagataggaattgaaatgtaaattaattgatgaatcttgcctatcccaaatttcttttccttgtaattacaaggggtgtaaaataataaggaaatctcagtccctgtttataggatggtcatcaatcaaatgggcttttcttgaagagttttagatgttggtaaatgtccacaactagcttctcctgttactagttttgcatatattggtggaatgtaagcaagcaaagagctgcttgaatctgtctgcagttattatgtccattccagtggcagtattattcatacaggctggcatctgcttgcatctgtagtttttggtggttcaatggggtcattcatatggggtgtttttactaaattaatttattattatctgctatgaaagagttacaagcatgtccacaatttctccattaaaaaaatattataatcttattgctttcattaagaggtttacaacctaaatgatatttttgttgacaaactgggtcattgtaactattagtgaagttttatcttcaaggaattctttttggcaggctgggaaaacttttactcttctttgcttttgcttggtgtaacatcttcaatattttgcctcatttaatattaggctggttttcccattgttaatgcattttttttttcttggaataagttcaatatatttttcagttaattatatgattaaattttattgcacatgttgctcattgcaatttacaaaaactatatggtattctttagcaattaaagcggaaaagtgaacccgatt

SEQ ID NO: 11030 - DNA, 9567 bp, Vitis vinifera
  Intron number 12 from transcript GSVIVT01029150001 (locus GSVIVG01029150001) derived from phytozome v7.0 (chr-ID chr 11; pos 19110948 to 19120514)
gtcaccaagtaagaatattgacctctttagttatgcttcaatatgtaataggaatttttttttttttgatgggtagagcaagagaatattttaaaaaagaaacaccaacaatgtgccccaaagtatacaatggacgcctaaaggtgcctttaaaagaataaaggggtgccaaatgacaccacctccctcaataagagcccaaccagttaacaaattctactaaggaagaaggacccaaaactacttacaacttagaccaaacccaaagattatagagacgagtgtttcagccctcgaaaagaatgctcctgattttcaaacgatctactcttccattcattccaaattgtctagaataagcatgagggagtagcccaccatgcctttttcccttttttacccatgaaggagttatgccatcataatagcgtatctctgattgaataggaaagcactcaagacatgccaaaaataaaaaacagtaaatgctataaaactcttgtcttgacatagtggataaggatgtgatcaattgattcttcctctaaatgacaaaggaaacatttgtttgtcaaagaccaccctctcctctgtaaatgatccaaggttaggacctttcccatgtagcctcccaagcaaaaaaaaaccccaccttaggcggcatccaagagtttcaaacaacacctgtcagaaaagatatgaatttcctggctcaaaagctatgtgaagggctttaacaaaaaacttaccattatttgacttcgactagatcaccttatcttcctctttccctacacacctcctcccttgtagtcttgtaaagaaacactataatttccaccttccaatcattgggacgcctagacgcgaggggcccaacaacccccttcatttgacaagttcctaacatccgccacccatgccttatttgaaacaaaaatagaaaataaagaaggaaaaacaatacacaatggtttgtcaccatatacttgtccttccaaaatctcatccttcgcccattgcccattgagaaagcaactctacttacaccaaccccatttacaaagaagggctttgttaagcatcgagagattcctaacctccaggctaccttacttttgtttgaacaaacaataaccgaccttactaaataaggctttcactcagggatccctttttcctataagaaatccctttgaattttctcaaaccttaacttgatagcctttggaatgcaaaataaagacataaaatagataggcatactagataaagtgttttgaatcaggggaagccttccacatttggagatgtgctgtattttcctcatagttattcttttgcaaaacctctcctatgctccaacccataccgccatacttaaaaggaacacctaaaggatgacccaagtaagaagatggaagcgcacccaccttgcaaccggactctagagcccagtcttctaagttctctacccttctcattggaattagcttgctcttttctaaattaattcttagcctcaaactagcctcaaaccacatgagcatctagctcaaataagtcaattggttctaagcaagctcatagaagactaaggtatcatcgacaaacaacaaatgagaaacttccaccctttctccaccttggccctcttgagaaggcaactaagagcctccatgacaattacaaataaataaggcgagagagggtcccctttcctcaaaccctaatagctttaaaaatctcaacggagtgccattaacaagaatgaaataccttattgtagatatacaccatttaattcaattgatacacttttccctaaaatccatctttttgaaaatcgagagcaaaaagttccaattaacatgagcataagctttctcaatatcaagcttattgatttatccacattcattgcttttcatcaatgagtaaatggcctcattagtaataagcattgcatccaaaattttgtcttccccctacaaaggcaatttaggatttggaaaccaccttacccatcaccttcttagtctattgggtaatacttcaaccaacaccttgtaaaggtcacccaccaagttgataggccataaaattcttatggtcttccatttaggaattaaaacaaaaaaagttgcattcaggctctttacaaatctacattgctcatgaaagtccttaaaaaaaccacccaatacccatttcttcacaaaatcccaattgaattggcaaaacaccataaaaaatccattagggcttgaagctttatccccacaaaggtctgaaatggcactaaacacctctttctcagagaatgggtcctttagcattgcttcatcttaatcacctaagacatcaagcgacaacacgttgatgccaggtctccaatctcttgattcagacaaaagattctaaagagcccgaaccaccccatccttaatttcactcacctctgatatcttggtgttgttgattttaatctttgctaagaagttccttcttctatgagcattagtcatcttgtagaagaaattggtacttttgtcaccctccttcaatcataactcctttcacttgcgcctttaggaaatttcttccccataagaacccacttcttataactcctctctagcctctttcctagcattcaactcctttagagtcaaaatgctagtcctcttcgtggaatcctagaaaacctcctagttcaaagccatcttctttccaattgtagcattgccaaacacctctttgttccatctcttcaaattagactttaaggctttcaatttttctgccaaaaatgaagctaaagtaaccattgaagtggtctatttattctttttgtataaatctccttgtaaatcggaggttttcatgggtattttgattaggtttgtattttatgggaaggatttctcatccttcttatgttttattatctttaattaatacatctttggtttttgattaaaaaaaaaaacaaaaaagttaccactgaagttgagccccgaccaccaacatcttcgaaccattccttaaaccagatattctcaaatttgaatagggacaggacaaagaggtctttggttatactaaggttattgttaattacacagacatccttgtagtttctgatattaaactggcacctctcatcaaattttgtccctaacactattaggtaagaaatgaaatgatgcaaatgctattacttattataaacaccaaattacaacgttcgaattgacttcttcctcttccacttaaaacgtggttgttttgattttttatttattttttcctagattttctaatcttttctatcctcagtttcttcttgtagtccttaccaaactctaaatcctaagcttatctattttatgcacaacttaatcctttttttttggaaaaaaaagaaggacaattgtgtttttaggatgttcaaaatatgaaaatgagctcaatgtccttgtgagtcataagtgggttgaaagggtggaagattatgcaaattatgcaacaactcatatgtaccttaggcccattattaggtgttggatgccttgaagcacaattgacccttgataaaaagttaagcataattaaaagaagaccttcctttgcttgtaacctttgggcttggtgcaagatgcacctagttcctagtcctctatcctttgtagactttgtggagtgtttgagttctggctaagggggttgttgatgttcctctttgtttttgtgttgctttgaggtgtttttttgtatacatcctgtgtactttggaacactttttccgacattactttttataaattgattttgattacctataaaaaaagattaaaagaaaacctagccatgattgaaacattttcttatccaccaaatactaggtcttctataggggatgtttatttaatttaagttcggttaggttttatttcagaatttatttgtcattactcaaaagttaaattattattcaatatgtatttaatcttaattaattggacttaatcaaactaaggatgttgctactttcaccattacttttaccaccatttttatcattcgcttatatggcaagtggggatgggatataataaaaagtggtccttttttttttattaaattccaacgtttgttggtattcaatcaccatttgtgacctagaaaggtggtaaaaatggtgacaaaagtgatggtatgaacaacattttccttaaactaatttatatgatgatttaataattaattctaatttgatttaagcaagggaaaaaatattgtttacattagcgaacgaatagtcaactaatagtaggcaagggtcccattatttgactaaaacctctggaatatgcaatagaataatatcattacgtgaaggggtgtgagtgtattttttactaatcttacaactgttagtatacttttctctatgtaatgagatgaagtttttttttttcccacttctgacatgcttgaagtttattcattttattttgatttttaggtaaattgtgtttatgtgacgtatggtatgatgtgcaagtcttttcaattttaaaattgtctgacattttgttttaggtttttacccataaaagagtgaattggaaatgttatatttgttatataagagaaaaaggtttttttttttttttgataaccgaggaaccttccatggccaaacccttaggactctccatggggacccaaaccttggggtgctgatcgccccgcaacaatatgagagaaaaagttgtcttattcacttagaaaataatagaaggcatatacacatatatggtctcaaataacataaaaaacaaaactagcccttgttaaacaaaactaccactaataagcctttaatactccctctcaagttgggacatgtatatattcctaagacctagcttagaacatatgataggaaaaaaagattctttcctaaagctttagtgaaaacattgttgttgactatgaaaactacgataccttcttttatctagaaacacagtgctatctttgcagttaaatttaacattttgctccataggggtttcagttggctttacatctagtatgctggtttcagtaatcaaatttaataaatatttcatttgggagaaaagaatctctcctctacaatgtactacaacttcaatgcccaaggtgtaatgcaataacccaagatcctttatctaaaaagtctttttcaagtaactttcacttcttcaatggttgcaatatacagtaatatcacgagtaatattttgtttgtttccctcttgagaacaaatgtgtagcagtcagaattccttctaaaactgcatgatggaagaacagtattaaatttatcaagaggaaattgttttaatccttaaaccatgttgcttgacgcttctttaattgcaaatgaagtgatagacacgtggcagaaacaaaaagaaaagggcattgtatgcaaattggatatagagaaagcctatgatagcatcaattggaagttcttgttgaaggtgttgcaaaagatgggctttgggtctaagtgggtggggtggatgtggagttgcctatcctcagctaaattttcagtgttggttaatggagtgcccgcaggtttcttccctagcactaaaggccttagacaaggggatcctttgtctccttacctcttcattatggggatggaagtgctagatgttcttatcaggagagctgtggagggggggtttttatcaggatgcaacataaggggtggaagtggcccctctttgaacatctctcacttgttttttgcggatgacacaattattttctgtgaggccagaaaggatcatctaactcacttaagttggattttattctggtttgaagcggcttcaggcctaaggattaatttagccaagagtgaaatcattccagttggagaggtggtggagatggaggagttggctgttgagctaggctgcagggtggggactttaccttctcagtacttgggtctccctttaggggccccaaatagagcgccttatatatgggatggggtggaggagagagtaaggaggagactagctctttggaaacgacaatatatttctaaaggaggaagagtcaccttaataaaaagtaccttggctagcatgccaatctatcaaatgtctattttcagaatgcccaaggttgttgttagaaggattgagaaagtgcaaagggattttttgtggggagggggaaatatggagagaaaagttcatctggttaaatgggaggtagtatgtacagataaggataaaggtgggctaggacttaggaagctagctttgttgaacaaagctttacttggcaagtggatatggaggtatgcctgtgacaaagataatttgtggagacaagtgatcaaggtgaagtatgggcaggagggtcttgattggaggcccaaaaaggcaaatggggcggttggagtaggggtttggaaggagatttggaaagaatcagaatggtgttgggataacatgacattccgagtagggaagggcaacatgatcagattttggacagatgtgtggtgctcagaatcctcattgtcccaatgttttcctcatctctttggtatggctgcgcaatggaattcgacggttgaggaaatgtgggatcaaaattctggtcaaggaaactggaacctacactttttgagggacttcaatgattgggagttggagttggttggggactttctccacatattgaggggtttcaaaccctccttggaggaagattcagttctatggaggaaaggaagaagtggtcagtttagggtcaaggaagcttatagtttgttgacgaagtctgatgatataggttttccttcaagaagcatttgggtggcaagagtgccaactaaagttgtcttttttgcgtgggaggcgtcatgggggaaggtgctaactttggatagacttcaaagaagaggacttcaacttccaaatcgttgtttcttgtgtggatgtgaagaagaaagtgtaaatcatatccttatatattgtacagtggttagagctttatgggatattgtttttggtttagttgatgtgaaatgggtttttccaggaactgtaaaggaggttttagctagttggaggggatcgtttgtgggaaagaaaaggaaaaagatatgggatgccattccgttatgtattttttggacggtgtggaaggagaggaatagattagcttttagggggggggggggttttgaacgttcaaaagttaaaaaattcttttgtttgtaatttgtggagttgggccaaattgtatgtaggtgaggaggcgttctcccttataggcttcttagagtggatagcttccacttaaagggaggtgattctttgtttttgttttttgaggcctaagctgccttgtatacttcctgtatgctgtgcggcgttttgccttttttaatgcatatcctttacttatcaaaaaaaaaaaaatttgcaaactctttaacactagactcctaagtaacaaatccaagttacatctaactgatgcagacacctcccaaaattaatagcctaaggaagtcagaatatgtgttgaattaaagtaggcataaatgaaaggtttcaaaataacccatatcataagtttgagtataccccttggcaactgaccaatctatgctcccatctggatgatacttgacaacaaaaacaaatcgacagccaacaacatcttttccctggaggtaagttagtagactcccatgtcttcggtgacttttttcaagttagtgtgatataaagcttcatgataagacataagaatagaaatggaatacaagatgtgaaaaaagcttaaagagtaggagaaagattattagaagacacttaatgagtgagaggagagcaaacacactatgctcacctttcctgagtgcaataggaaggcttgactcatcaggtactaaggcaactgaaatatgcggtgctgttggatcatccattgaagaatctggagaaggcgtgattgagctttatctattttctctggctctagaaagtcttttcctttgatattcttgtaatggtttgtctatccagatgaagaagtatcagtaacaaaagggagaggaacaactcaaactgaaacaacccattgtctaactgtgaagcattaacaccagtgtggatgctatgttagcttttgaatcaatttttgatttttagatgagacgtatacaaaggtttgcataaacaagagaacctaaaaacagacaaagtattgaaagctatccaatgaaatgctaaggtataggttaaacttattgcattagaagagatttggatcatcataatactaattaaaattggaactaaaaaaagtagttgtataaaactgaaaaaagctgttggttaattttcattttaaccatatggaggttgatgtgggagagattgatgatctaattttcttaacatgagatttataaattttagattgaatagtactattgcatttaataaggccctaaatctcactgagataagattgttgagatcttctttcttggcaagatacagtgtttttatttaaatatttttaatttttttcatttacctagaaaaaattgtttttgtgctgttttgtttgagaatattgagaagttgacatgttctttttgttgtattcttccttatcccaattattattgcgatcccaattattattccaagcaccttatgagtggtgctaagagagaggttgatgtgtgcttttcattgttgtctgccttaatttagccatatttccaggatctctttagtgttgtggagggggccgagcggggaagggagacagtattgttggagtgcatgatatacattgtgggcttaaattttataaacttaagcttttcagtaaattggttgtctaacaaatataaacatctcatataagtaaatactactgggtagaaatgctgttggttctttttgttttataatttagcaaacaaatctatatacattgttaaactaccaatgtgaccaaaaatcttaaactgttaggtatgggtcaataatgtgtatcaggtagactaggctaaagccctaacacataaacgcgtgctgtgcaaatagatatatacaccacatgctgcatgaccatcctgtaatgtttgatgtgactacaacagaccgtgctctgaaatgctcgaccattgaggacaagataactaacaaaatgtatatcaaacagattgggctagagccctaactcacaaacatgctgtgtggatatagatatttaccccacatgttgcataaccatctggtaaggtataatgtgacaacagatctctatgaaatgcttgactattgaggactagataactaacctattagcaattagctttcaaattaaaagcgtttttgagtttaggtaaactgctttctatctcattatttctccgatgttctcatttttttattgttcaaaatatgtttttcttgctttgcagattgacacactacttgc

SEQ ID NO: 11031 - DNA, 5968 bp, Vitis vinifera
  Intron number 1 from transcript GSVIVT01015583001 (locus G SVIVG01015583001) derived from phytozome v7.0 (chr-ID chr1 1; pos 5222229 to 5228196)
gacaagcaggtacgtcctttttctttttcttttttcttttttccttttttctttccctcgaaggaattctattcattaattatttatttttaggatatttaaattggcctatcatttagtttttgtattagatttgggttgtttgaaatgataattgattgatgataaattttgtttcgtttagtttcatcaatgtatgacatttgtagtcctttggttcttggagaattgatggaaccaactaaaattgttgacaggtggccccggttttcaattttctcccttaattctgtgtattcttcgtgcgatagcaaaataagaattggtatgtttcggattttagaatgtgcaagcagaaatgcaatagagctaatatgacaaaacagttaaatatgatcattcaagatgctaagttaaggacttcctcaattgttaatataagacttagatattttagaatcatatcttgcaagatctgttggtgtttttaactgtccggggttagtgattgaccactcatatcaaaccaccagaacaatgttcaataaggattggaaacctgagtgcaggtcgatcgtttccaggcatttcagcttttaaagaagccaaaatggttgttactgagattagtgtggatggattgtgttaagactgtgtgaatatcaattagaacatgctagttctcttttatggtttcttttactgaccttagtgaatcagtagtttaaaccatctttgtgggtatcacgattttcaatttgagttcagttgttcctaccgtgtcatcatattgcttttatatctattataatacttcatgggttttttggaagtaaacaggcgaaacatcatgttttgtcaagtctcaactacatattggcctggctaggttaacctgtatttgttagaactatattcctgacctttccatgcagtctgttgagccttatttcaggtttgaaattttctggctgggttgggaaaaaagcccattgtaaggttgggtcaggctgagtttggaatctcttttggcagttggatgtcagatgttcatgaaatatgcggacgtattgttggaagttactgagatttttcccatctttctacactttttatgtgaaatgcaacataatgacctctaggcatttggactaaattaccaatatagcttagtagaacgattgaaagatactgaagtatatgatgtgcatgaaaagagcaaattgtcatgattcaaggcttaatttttttggttgctggtggataaaaaactgcactcaaccattttttaaaattaatttctttgtggctgaaagaatttgtaatcaatacagtggtcagtagctttttgaagcaggacacgggagtggagttgttgttgtatcactctagggttcaatgagatgatactctgttgtttttctgcaagcttgccgtataactgcatcaaaacttgtctttctgtatgcttgtcgtatgcccgcatcctaaatccacttctatctcatgaactactaaatatgggataagggccattattttgaaagtatttcaatctcttctggaatttttttttgttattatctttaattctcatttttagtgggtttcttctgaagtgaggttatctatggtgagttcttttgtttggggtccttccatttgatggtggggcacatggaattctgtctagttctcccccattccctttgtaggaggagaaaggactcctttttcgcttcttcttcttccataacttcaatttgttttttataaaagcacacatgaatacttgaactctctcaccccatattttttttcaaatatataataagcaaatccttcttttagtgatctaagaggtgaggggagaggggtttctttatttatttatattttacagaaggaaatgttaatctcccgtcatttaattgtaaactttatatgtaagataagattaaaatctacatcaaattctgcctatcaaaataagtaaataaataaaaactacatcaaattcatattagtcaattaagtgagatggttcacttaaagatagggctgaagatgaagaaagatcggtgtatttgttcctaggtgttgggatctaaagtaaacagtcgttttccttcaagtggtgtcaaacatgttaaagtcagttgttacaatgtgtgtcaagcagcttctgcatgtcacttagttctcatgttttaggtaatattatatattgaatatcaagaatttttactattaggacatcaaaaatttgaaacaaatattaaaaaaatagaatgactactgtgaaatcacattctttgtgcgttctctcaaggaaaatgccaccatattgaacttagtccagctaagcattattccaaaacacttgtattaacctttaacttttcttgggcaatgttatttgttaattttacatccttgaacatgttatctgactactttaaacttatttcttcttgcctttgctttgtccttgtagtacttccaacttcagcccatagtttttaactcataaaatgtatcacatatcattttttttttttgggtatatcatgtattacaagttttttatatagtaaaaaaattaaatagaaaaaaatatgcactcttatatatatatatattgcaagaacgaattatagaataacatataaccaatttaatgaaagataataggatttaaagattttaaattatatcataccgtatgaaagcattaaatactagagttttgaaaagttcaatttaacaaaaatgtttgtttaatgtataggttcatcacaaaattcacaaaaataaactttttaaatttgtatttataatttttagttccttatttgaagaagcacatgtatttctttgtggtgttgatatatacatttttatatgtcatatccaaagtttaactttccttattcataaatattaagtgaaaagtttttatttcttaattattatcattttcaacattaaaattcaaatcattcaaatagaaattctccaatgttcattttaaggctaaatttatttaacttttaataggagatgtttcaaatggaaactacaatttatatatagtttttcaataggattattttatttctctctccctttcatggtatttctaagcttaccatacattttaaacaattaatataataattatttgagaaagaaaatttagaatttgattttttcttatgtgaaaaataattaaggtgtgtgtatcattgatcatcatatcttgtatcgtatcatggattgtatgatatgcttaagataggatacggattgcaatacgtattgattttcataaaatatatatcattatgtgtattgtaggtttttaacaactatgctttaaatcatattaactttgtatcagttattggaacatgctatcgatatatatgtgtgtgcgcacacacttaaatatactatatgctgtttcacccatatcttggtttactaatttctcccatagaaattgaacaaattgagatgacttttctttcttgcatgctttatatgaatagtatccatcgccttctcaatcttatgagtaaggtaggtaattaaaaataagtaaatattgatgtgtataaaatttgagttggttgcagacattaacatattttttaccattggctagtgcagtacacgcatcatgcttggacttgttaatagtctttagtatttgcataaatggaaatgcttttggtcgtgatagtggtggcaatagcagtgtcaataataaaaaatttgagtagatcttaatttgaaatgatatgcaagcaattccataatatttcctactaatttttataagagctgtagagcatttatttgcaccaaataataataatgataatgtaggggatgaaagagcatgtgatggggatgaaattttggcattgatgggtggtttcttggattgggttcatataaggagtctggaactttgtaaaaggttaaatttgattggttaaaggccagcaattggagtcatgtaaggtcttgaatttaatgttgctgatctttcatttagggtcttaggcttgactttgtgaccctgattctttggtactaaattgggggcagaaataaaactctgggtagggctaggtattgagttttgtcttttgattgataaaaaaatggagcatttcagagacacggaggaaatcgatttaaatgtgaataagcttgaaatatggttactcaagtatggtaggggtcaagaagttagtttggcatcatacaggagatgtttctgggagccaaaaccattttaagcaataataaataagtattctcactgcaaaattgtgtggcaggaaaacttaattatcgaagacagccctaatgttactgtataatcatatatatgtaaatatgatgtaaacataacaatttatagttttgaaacaacaacaaccaaatatctacagtacaaaatccaattaggatactaataataattatatatatacatatatatatagcataataatgcttctgacggggcaaccgactatgcttactcatccatttaacttgtatgtacttcaaacaatagaacatgtgatgatttgtattctgttatggattgggttttctctgtcaggttgggcttgggattggtgttcttttgggttctgttctttagttttgtacaaagaactcctcattcaggttctcaagcccagagatgtttctctcttatctctctttgattttttttaggttcttatttttaaccttgcagtcattattttcatttttaaaactacttgaaatgtaataggcagagcacagtaagagattatgaatttactcccactctatatatttgtgtctcttaaaatgaaaatctgatatgcaattgaagttaagtaaacggaacatgttattaggtggtttcattttaattcttctttaaattaatggacaaaaacgagggtgtattttatttatttcttttatttttccttcttttcctttgcaagaatttccttcctcctgttgtgtattcacctttactttctaatagtttcattgtccttcaaaaggtcttctgttaacaaattggtcttttcatttctaacaaaaatgaattttgtgcccttcacaatactttgtatgctagttggtgtcctttttatatatgatgtctacttattatctttttttttttaaaaaaaaaaaatctatagccttaaaaatcttagttatttattgcacatattcaataatttgcaagaaaagaactggtcttttacttgaggctggtcgctagggttataaggaccaagaaaagctttcaagtgttattacagtaagcaatctcaaaaaggaatctttcttttgtgctccccaattcattcgaagatggtaagtggtcttaacacaatgtgacctagggtttcgcttctataacaaataccccctttcacttccttcttttttagtctgattgattttcagtcttttaaatccaagaagatcaccttcatttccttggtaatgcaattctgggaatatttgtgtgtttcttatcaattagctttccaaataattcttttttctgggggttccgtggatctttcaattttggtgcatggatgtatataagatctgctttggttgatatgccaagttactaactatttctgaatactgaaattatagtttctttgagaaacctgtgtggatcttttccctttcaactctttcttacttaaaccagagaagatcaccttcatttccttgccaatgcaacttttggaatatttgtgctatttcttttgacaattagctctctaaataattttttctagaagctgcatggatatttcaattatggaggatggatttatattagatctgcttcaagttctaatcatttctgaatactttgattttagtttcttgagaaagctcttgaaga

SEQ ID NO: 11032 - DNA, 13440 bp, Vitis vinifera
  Intron number 11 from transcript GSVIVT01011504001 (locus GSVIVG01011504001) derived from phytozome v7.0 (chr-ID chr 14; pos 30090385 to 30103824)
attcagaaataggtgatttgctgaaggtatgaagtaattctaaatattgccttgtgaacaccatgcactttacacttctgtcagcagctgatcattttcatatggtattagagctcttaccacttggctgacccttttttgttatgtgagttcatatatttttttgttgtggggtttaactgttagctttttttctagtattttggcaaagatcaacatttaagaagttcatgcttggttaagttagtaattttggctagggctgccctgcaaaagttgctatagtgttggaaattaaacttgaattaggagctttctaaatattagaattagatttagtttctaaaaattcaaggagaatattttattttgagtagttattctagtttctatttttgagttgtcaagtctcagaaggtttttatatcttattattttgagttaatattttgtttagcgtgagtagttataaataggagattatgtaatgtttgaataagagagagtggtagaagacaacaaagtttttaattctctccaattttatcttccttgtaattagttataaataggaggttatgtaatgtttgaataagagagtggtagaaggcactaaagtttttaattctcttgaattttatcttccttgtaattgtgtgtgtttctctatcaaccccattactcaaccaattaggcttttgctaatatcatgtttgtaattgttggtgaacagtattaatgaattctgatacaactttgtattaggcctataggctattatgctgtgatgagaaagaatgatgtaagtgttgaaagagagagagagaaaaccttaattctcattcatattgttaacttcttacaatagggaaatatatatacaagactaggttgacctaactaccatatatgtgacctatattaagaaaggaaagaaacttgtacactatatacattatattcaacactccccctcaagttggaacatatatgtcatatgcaccaagcttgttacaaatgtatttaatcctaagacctctgagagatttagtgaagatgtctgctagttaatcatttgaattaacaaaacttgtaacaacacaccctaatgtgatcttctctctaatgaagtgatagtcaacttcaatatgcttggtcctttcatgaaagactggatttgatgtaatatgtaatgcggcctaattgtcacagactagctttatctgttcatcttttccaaatctcaattcctgaaggagttgcctcaaccatatgagttcacatgttgccaaagccatagctcgatactcagctttggcgcttgatctggccactgcatcttgtttctcactcttccaggatattaagttacttccaataaaaacacaataccctgaggtggaatgcccatctgagggtgaaccagcccagtctgcatctgtgtaaccaacaatttgggtatgacccctgtcttcatacaacataccttggcctggtgttcctttaatatattgaagaatgcggatcacaacatcccaatggttgtcacatgatgactgtagaaattgactaaccacactcataggaaaagagatgtctggcagagtgatggtgaggtagttcagtttgcctacaagtcgttgatatctcccaggatctcttagaggctccccctgtcctggtacaagtttgacatttggatccataggagtgttaacaggtttacattctaacatgcttgtttcttccaagatgtctaaggcatacttcctttgtgatataaccacacctgaactggattgagctatttcaagtcccagaaagtacttgagtttgcccaagtctttggtttgaaagtggttgaaaaggtgttgctttagtctttggataccctcctgatcactgcgtgtaatgacaatgtcatccacataaactaccaaataaatgcactggcttgaagagttatgatgatagaaaactgcatgatctgcttcactccgaagcattccaaactcttgaacaactgaactaaaacgcccaaaccatgctcgaggagattgtttcaagccatataaagagcggcgtaacttgcacattaaaccagactccccctgagcaacaaaactaggtggttgcttcatatacacttcctcgagaagttcaccatgaaggaaaacattcttaatatccaactgataaaaaggccaatgacacatagctgccatggagagaaataagtgaacagaagcaatcttggcaacaggagagaaggtgtcaccatagtcacagccataaatctgagtataacctttagcaaccaagcgggccttaaggcgatcaacctgaccatcaggaccaactttaacagtgtagacccaatgacatccaactgtagatttaccaggaggtaaagaaacaagatcccatgtgccattggagtgcagagcagccatttcattaaccattgcctgtcactacccaaaatgagaaagtgcctcactagtgcttttaggaagagaaacaaaggataaagtatagataaaggcagaataggatgaagataatcgatggtaactcaaaaaaattataaataggatgaggattacgagtagagcgattacctttccgaagagcaataggcaaatggtcagtagatgacagggccgggataggagaaatcggtgggacaggagctgagtcattaggtacgtcagttgaagagagaggaggagcaacaagacgatgtcgacgatgatgaacctgaagaggacgagagagcgcatctgaagggggggatagatagggaagtggcaatacttcaaaaatgggaaaatattcagaggatgagaagaatggagagtcctcaaagaaggtgacatcagcggagagaaaataacgatgagtgtcaggggaataacaacgataacccttctgaagtcgagagtattccaagaagatgcatttcgtagccttggtggagagcttgtcctgtccaggtgtgagagtatgaacaaaacaagtatagccaaaggcacgaggaggaaggaaataaagaggttgggtaggaaaaaggagggaatgagggatttggtcatgtaatatagacgagggcataggattaatcaagtaacaggctgtaagaacagcatccccccaaaaacgaaaaggaacatgactatggaaaaggagggtacgagctgtctcaacaagatgtcgatttttacgttcagcaaccccattttgttgaggagtatgaacacaagatgattgatggaggatcccatgttgggacataaaagaagtaaagggtgtagaaaaatattccctagcattgtcactgcgtaacactcaaatagaaacattgaattgtgtttggatttcaccataaaatttctgaaaaatagagaataactcagctcgatttttcattaaaaataaccaagtacatcttgaatagttatcaatgaaagtgacaaaatactgaaatcctaaagtagacgcagtccgacacagaccccaaacatcagtgtggacaagttcaaaatgagactttgcccgattattcaaacgctttgggaacaagacacgagtatgtttcccaagctgacatgactcacacgcaagcgacgataaagtggaaaaacgagggatcatcttttagaacttagagagactaggatgacccagacgactatgaatgagaagaggagcatcggtggaaatgcaagttgcaggagatgaaggtgatgtgaggagatagaggccttgagactcacaccctatgccaatcgtcttccccgtactccgctcctgcaagatcacaaatttatcagaaaaagtgatagaacagttaagagtgtgagttattttgctaagggaaataagattaaaaggacattcgggggcataaaggacagaatgaagaggtaggaaagggagaggatgagccaaaccatagtttgagaaccattagctaaagtaacagtaggtaagacagaggtagtagtaatagaagagaaaaggtgtttattactagagatatgatcagatgctccaaaatctagaatccacgggccaggagaaggagactgagtaaagcagattgagacattaccggtctgggcaacggaagcaacaaaagctgatgtggctgcctgatattggagataggcatcataatcactaccagtaagggtgatactctgagatgtggagctcgcagcggagtgaggttgagataacagaggatcagatgactgagcaatgtgggcagtgtgaggaggccgtccatgtaactgataacaatgatctcgagtgtgaccaagcttattacaataggtgcactgaggatgttgtcctcgaccccgattaccactacgtcctcctcaagagttagtctgagaggctaacacagatgaatctgaaggaccatcagtcgacaaggtctaagtagaggagaggcgtaagagatgagcgaacacatgatccaaagatggtactgatggactagcaagaatctgatctcggacagactcaagatttagacggaggccaatgagggttaacaccataaagaacttgtcagcctgtatttgttgagcttcagcaccattagtgaagggcatcaaagttaagaactcctctttaagagacgcaatccagccaatataagtacacagatccatgtcctgctgtctcacatgaataatatcagaaaccaccttataaaatcgttgaatatcattcgtgtataatcctttagcctgagtccaaaatttaaagcaggttttgtaggcacgaagatgatggaaaattttgggatcaacagattgccataatacgttgcataattgtgcatcgatctttttctattgcactttgtcgacatcaggtatagcatcctcaggtgtaacaatatgatcctcataaccttgtcccataaaccagagttccacagacgctaaccaggagagataattctcactaccaatcaatttttccaatgtgatagtaggagatccagagatgacgaatgtaaaaatgggatttttagtcgccatatccacttcacctgagattgaatcacgcttggatcgaagagagccctaaagggaggtcggatcacagttgtggaagaagaacctggtatgtcgggacccaaacaaaggagaaaagtgactggggatgaagaagaggccttcccaagcacgcacaggtctcaaccaaggaagggagctgccgtcggaggccggaggaagctgaaagaagacccgtggaggctgaaatggaaaaaaaatggagaagtagggtttagagaggattgacagaggcttagaagtgtaagacggcgccggacgagcctgctggaagaagctcgacaccggaaagtgggccatgcgggattcaggccgctggagaagagttgcgtgtgggaggcgcatgggtgggtttttggctctagtgctttgagaaaagttgcagatctcctctttgcgctcttgatgatgaggtcagtgtcggaaaatgtcgtcgggaaaaaaatcaccggaaaagttgctggaaagtatcgccggaaaaatgttgacggtgatgagggttttctgaccacgatgtggctgaccggaaagctttgggagatggaaaaggtgaccggaatgaaacacggtcactggacggattcccggaattaattacacgggtaaaccagaaagaataaagttttctcccttggctctgataccatgttgaaagagagagagaaaaaaccttaattctcattcatattgttaacttcttacaatagggaaatatatatacaagactaggttgacctaactaccatatatgtgacctatattaagaaaggaaagaaacttgtacactatatacattatattcaacagtaagaataattcaagaaagtgtttattttctcacaagaatactgatttagtttttactttaactcgatcaaaagtaaaacgttgtttaccaatatccctaaactaacaaatgttcaccaaaagcagcaatcatctagactaacaagttgcatatgaatggaactggcttcacttatgcaggttgttttctctaacttgctaaattctttctactcttatcatatttgaccagctccacagattgaaaagctctggaaagcaaccctttaagaggaccccaccgagctaagagtcatggcaaaacttgacccaaagactatttccaatggagaaacacattctagcaaaaaaataagcttcgctcttccttatagctttccaaaggttcgagtcataagcactcctacctttgccctagagcaccagcccccttctagttccctgtatttccctattatcacctttcttctgaaagctatcacacttaaaggtgaatctctacagccacttccccaataatgccttgttgaggagaccaaggctcctcataaccagaccccctgtgacattttcagaaaaaaaaaatttgctcatttactggatgaattttctttcctaggagaccttgatgccacagaaaatctctttgaattctttccaacccgatcctcacctttctaggcattacaaaagctgataataaatatgaagactaggatgcactacagaaagtaaaatgcaaggagactataattgaaaggaccgtagaaatcactcctagaaaacttaggcttcacacccaagtattctttgcatcacacaaaggaaaaaaaagtggctgctgaaaattcattcattcattgattccttccaaaagactaataaactactatataagacttttctaaggacttattactccttggaagtagacatagtaataatgcaacttgaaaacgacaaacttgaactaactactgaccacattaaagactattggaaaatgacaacaataatgattgaaaatggtaacttataaccattgactaggcccataacttaatttctgaaaatactttctaggctgaacccatattgacttatataaaatcccaactaagcccattatcatccagagagtgccaaattaaagcttgggccttggagcccactcctttgcacctctgataaacttttaaatgtggctgccacttgtctctatcaactctccctggcttaggaaaactcgaccctgacgagttaaaggcatgaaatctctcataaaggtcttgattcaagtgttggaattccccacctatgatctatgtgcaatttgaaagtgactttcctttccatttgacaagatacttttgatagccccctcctctagttgaaacaatttggtgatcaataacatcttcaatttcctcctttaaacgaggagttggtggtaagtgagcattggggccaccattagttataacatctttagtattagaacataaggtgaggtcctcgaagtttacgatgttactaatgcccatattttctggcaaatcaagaacataagcattggatcttgagcattctgtgtgaaccaacattctttgagtgaagtttcttgtatgtacctttgggatatcgttcaggtcttatccttaccataaccatatctctttccttaaaatcaacaaactttcttttcaaatcagcttgtgccttgtaattctcattgctgagagcaatattccttcgaacatcctcatgtaaatcacatatatgcttactaaaagcatcagcttcaacatttggtcgtgcttccattggtaacggaactaaatcaattggcttcctaggaagcaagccgattacgatctcaaaggggctgtgacttgtagacctatttactgtactgttgtatgcaaactcaactacaagaagaatctgatcccaattagtgacatgttcttcaactaggaagcaaagtagatcacctaaactttggttaacaacttctgtttggcctttgagggtgaaatgctgaagaaaaatttcaactttgtgttcaacatcttccataagcttctccaaaaataacttgtaaactttgcatcccgatcagaaataatagtcttgggcaaaccatgcagtcagacaatctctttgaagaacagtttagcaacatggaaagcatccaaagtctttgaacatgggataaagtgcaccattctagagaccacgacaaatatggagtcatgccccctgaaagtttttggcaaaccaaggacaaaattcatgcttaggtcttgccatggttcatgtggcatcggaagtgccatgtacagtccagtatttttcttccttccctttgatagttggcatgtgagacatttagaaatattcttagccacatctctttttaaacttggccaataaaaacgatcttctatcattgcaatcgtcttatcccttccaaaatgacttgctgttcctccataatgcaattcctatatcacttgctctcgaagtgatgtgtcagataagcaaaggtgggtccctttgaagaggtaaggtatccatcatgtagcaaaaaatctggatatgctcccacattcccggctactaaggcatcttatataatgctgaaatctttgcaagaattataatcccactttaacaaatcaaatcccacaacttgtatagtcatagaagaaagaatatacaccactcgactaagagaatcagctgccttgttctcaacaccaaatttatgccaaataacaaaggtgtattctcgtaagaaggagacgcacttcccatgacgatggttaagcttcttttgagagttgacatacttgagagcttcatgatcagaatataaaacaaacttctttggaaggagatgatgatgccaatagtgcaaagcttgaaccacaacatagaattctttatcatagattgaatacttttgctttgcttcatttagtttttcgctgaaaaatgcaatacgatcttcttgactgagcacacctccacttaccacatttgatgcatcacaagctacttcaaatacttttgaaaaatcgggaagttgtagaacaggtgcttcagttagcctcttctttattttttcaaaagcctttgttgctgccttggtccaaacaaattggtttttcttcatacaatcagtgatacgagccataatagtgttgaaacttctggtgaagcgttgataaaatatagacagcccatgaaaactttgtagctcttgcattgtgctcggaactgaccattctaggatgactttcaccttatcaggatctacatctaaccctttggctgaaacaacaaaacccaggaacacaatagctgaggtcacgaaggaacattttttcaaatttatgtagagtttctcttgttgaaggactctcgtaactagtcgcaaatgggacatatgatcttccttagtcttactgtagattaaaatatcatcaaagtaaacaactaaaaacttgccaataaatggttgaagtacttgattcatgaagcacatgaatgtgcgaggagcattggagaggacaaaaggcatgaccacctcatagagactatcctttgttttaaaagcagtcttccactcatccccgggccttaaccatatttgctgatacccactcttcagatctatctttgaaaaaatgcaagaaccagccatcatatccaacatatcatcaaaccgaggaatgagaaaccgatatttgatggttatcttgttgattgcatggctgtccacacatatatgccaattgccagcttttttgggggttagtaagggggggacagcacaaggacttagactttaacgaataaatcccttggacagaagctcctccacttgtcttttcaactctgtgtactcaattagattcatatgataggctggaagattagacaactgagatcccggaataaagtctataaaatattgaatgttgtggagtggggcagttcactaggtagatctgttggagctatatctgagaagtcgtcgagcagttcagtggccttattaggtatagaagaaatgctgccaacatctttcatgctaacttctttcattattacaacatatataaccccattttccttgctttcatgctgaaacttctttgtaagaatatggagagaactcttcatgccttcaacaacttttgttgacttttgaatccgatattttcccatttcaattgcagtcattggtttcaacacaaccttttggttcttaagcatgaagctatatgtgttctctttcctacaatgatgcacatctcgatcataaagccaagggcgaccaagaatgatatgtgccacgttcatagggagcacatcacaccaaatagaatcactataaacaccataagaaagagaaataagacaacgctgatttactggaatagatatgttatttatccatgctaccttatatggttgtgggtgtggcttaactggaaacttaagacgttcaactgtggaggctgaaacaacattcttgtagctgccactatcaataatgagcttctgagcttgattcctgcatcggactaacatttgaaaaatagaagttcggcgccaatcttcctcaacttttggtgctgcaagaatacgtcttacaacagaagttagagaaatgtccacttcttcatcatccaaatcaataggatcatagactccatagtcaaatgagttttcgttttgttcatccttttgtggttctggttcctcttcatgttccagcccaatatgcaagttcttctttggacgattgtatgtcatgtggccaggttgttgaaacttgaaacatttgataccttatgtcataccaatcaaagtactcttcaattgctgccaaccaatcaagaaattgagtagcatccacctttccttcaaaatcaggaacctccattttcgctttctttgtgatatctccaacggtgtcacatgctttatgtcttctttcaagcaatcctctagcccattcagacatagggtattgtggtgcttgaattgcctctttctcctccttgttttcttggttgttagcctgagatgtttccccttgctcaacatgtgatgactcattagtgggttgagatattcgtgtctcaaagttacttagctgaatgtggaggctatcaagctgatccaccattcgaatcagcatctcatcatgctgactatcagttggtcttcctctaaaactccttccagattgtgtagccatgatataaccctcgctttgataccaaaattgatgcagtacaaaaagtaaaatgcaaggagactataattgaaaggaccttaggaatcactcttggaaaccttaggcttcacacccaagtattctttgcatcacacaaaggaacaaaaaagtggttgctgaaaattcattcattcattgattccttccaaaagactaatcaactactatataagacttttctagggatttataacttcttggaattagacatagtaataatgcaacttgaaaatgacaaacttggactgactactgaccacattaataactattggaaaatgacaacaataatgactgaaaatggtaacttataaccattgactaggcccataacttaattttttaaaatactttctaggctgaacccatattgacttatataagatcccaaccaagcccattatcatccagagagtgtcaaattaaagcttgggccctggagcccacttctttgcgcctttgatgaacttttaaaggtggctgccacttgtctctatcagactagagagagtatttttcctcattaagaaagaggttggcattttcatgaaaccagccttttcccgaatcttttgtcaattgaatcccacactgaaagggactaaaactgagcaccttaatagcatttccaaatactttgaaggaaggctactcctcctacaactcgactcattagctagatcctccatatccttaatgttcccccttggcaacatctcacttttcatcaagccaccttacataagaaacttgctctatatctccttcataggaaagcaaagtatcattggcaaagagaagtgtgtgatcgcaactttgtcacccctaggcagatgtaggacaatcctaggatgattgtcaaaaatcaaataagcaggctagatctttaatcttgtaggatttaaggataagaatgaggactaaaaattatgacagtgaggaaaagcaaaataaaatatagaaaaagaaagataaggaagaaaggataaaaaccttagaatttcactaagaccttctaggagtctcatctagaagactcttccttctttcctaaaaccatcaaatcttctaaagaaaatagaacctttcaagggcagtcctctcaactttattcaacttgattggattttgatatgtagattaaaagagttataatagtaatgttgagacgttttgatgtctttggcttatttttcttttcctttgttttgatcaagttttgtattcagggaagaatttctcatccttctcttgtttattctgttgatgaaagtagaagttttctttttggaactagaaacttactttatagaaacttctcatgttaaagtttctaataaagaatacttacttgaaatggaaacttgaaaaaaatattaatttaggtaatataaaattcaaaacttcttttaaggagaattttagaactttttgaattctaaataacactcaatcaactactaactatttaggacactagagaacctaaaaaactgaaaaattacctaaatatccttgaatagagtaatttaagacttttttatttcctatcattcattttttgagtagatcctagagattcatccatgtcataggctctcccactttaaacagttttataaccccccttctgctgccctatgcgagaagcaacttaacactccattagtcgtcgtctcttgtgtctttgggtattttccccttttggttatagaagcccttctttgttggaatgactcccttattgggaaccaagcaaagctgtttggaggatgatccctttgtgcattttctggatcacttgaaaagagcatgataaaaggactttcaaaggagcggagtggtcctgcatgaagttgaaagatttatttcttaagtcattttcatagtcaagcaggaatttgagttctcatatgctaccattttagattttgtagatagtatgggaattggttagcatagtatggtgtttgttggcattttccattgcctgtatacattatgtgtacctgggttgtgcccctatttttgctaggtgccttttaatgtcttctatttacttgcctacaaaaataaataaatgaaatcctccttctccttaaaaattcagcaaaataacaatatttacatcagtttcttgctgcagttgtttgtactactaaccataaggattgggtttttccttatttttatatcaggttgtttttgtccctgattaca

SEQ ID NO: 11033 - DNA, 7730 bp, Vitis vinifera
  Intron number 6 from transcript GSVIVT01011939001 (locus G SVIVG01011939001) derived from phytozome v7.0 (chr-ID chr1 ; pos 2842902 to 2850631)
cggtaagatttggttctgcttattatttatttgtgctatccatcaaagaaaaatattacttgtttgtattgctgctatttctcttgtaaaaactgtacccatagcacaatgtgaacttatatttattttacaaattactttcttgagctttgttcaacattgggtgcgatctcggactatgataattaagttctaataacagattcatagctttatatggttatactgtatgatggtcataccatacaccggcaatattacaaatcagtctttttgtaggtgatattttgcctccttgaattgtaattagtaaatatttggtttttttttggagttctttttgtttcttcctcaagtgtgcaactcatatttcttttctctgtggagcttttctctttgttcttgatcatatttcgtataccatagaaggattgcacttccttcttgacctttctatttaatagaaatgaattggttttgtttttgataaaaaaataagtttaaaaatcagtcctcaaagaatgttgatgcaggagggaatgttggaaagggttgtgagtcttgtgacttgtattattagactattctagatcatgctttaagcacacaaatgatggcataatgccaaacatttggaaagtacatttatccttttgtgacttaccttttcaaatatttatgcctgttttcttatgctcagtgctttcaacttgaccctaaatagacgttaccctttccccttggtgcacccatcctgttcacaccccaacccaacccaacccacccttaccctcccccaactccccaacccaacctccaatccccaaccacacacactaaggcactcccttgatttacttgatcaagaaataaaagaaaagaaagaagaaaaaagaaaataaaataaaagaaatggtttgacatgttgtcaacatctagccttgtttttttggaatgcataggttataatttcatttttaaaacctttggttggaacccaatgaagagtataatccttatcaacctgacatgtgaaggagagtttgtcccttatattatatccaaagcgttgtacatctttattcacaaaaataaagagtaaggttttgtttggttctcataaaatttgagggaaaatacaaaggaaagaaaagaaagatgaaaagtagaaggaaaaaaaaagtgaaggaaaatagaaaatagatttaaagtcaataaattatttttgtatattacctcaaactcatttaacttattttaacaattttatataaaaatttaatatttgaagatgcataagttttctaactaatttaaattatatatgattttagtttgtatttttcatagtacaattaaacatgagaaaataattttttttagcattttttttgtttgtttatacttttctggaaccaaacatagcataagtcttccctaatgtttaggatcactagtcataatattagtaattgaaaatcattggggaatttacacaattttgttgtatatacttatggggctaaggctagatttttaattatgagtaagccttctatgatgttgtttccagacagttccttcatgtggtgcctagtttgtatttgtatcctaaaatgcttgacttattaatcaaatgcctgatttattaataaaaaagtaatggaccttggacatttggtttgatttctctctctagagttattacttatatgacatttaggtggtgtttgtttttttacttaattctaaatagaactgaagaatttctgaactcctttattgatattaatcggtacacaccatacacatatatatacacaaatgactgaataagaaaaaatcaatctagcttaattctctcctaaaattaggaaactaaatcataaggaaatatcctaaatgatctctccttttttattcctaaattaaagtcctaactttggcattatttcaacactccccctcaagctggagaatatatatcatataatcccagcttgcaagttaagtcttcgaagttaggcctaggtaaagctttggtgaggatgtctgcggtttggtgcttggtaggaacatagtttaatttgaccgtctcactagtcaccttctctgtgataaagtgtctgtcaatctcaacatgcttggtcctgtcatgatgcacggggttctttgctatgcttatagctgcctgattatcacacatcatcagaattggagatgaactcgtttgtcccagttcactaagaaccctttttatccaaatcccttcacagattccctgtgcaagagctctgtactcagcttctgcactacttctggctacaactgattgcttcttactcctccaggtaataagatttccccagacaaaagaacaatatccggaagtggaccgcctgtcaatgatgtttcctgcccaatccgcatctgagtatacttcaatgtcacggttctctgtctttctgaagaataggcctttccctggtgtcatttttaaatatctaagaatcctgtagactgcttccatgtgttcctcagtggggctgtgcatgaattgacttacagcactcactgcaaagccaatatctggccgagtgtgtgagagataaatcaagcgcccgacaagccgctgatatctccccctgtctaccggtgtactttctttctcgataccaagtttcttctgactatccataggagtatcaattggtttgcatccaagcataccggtctccttaagaagatcgagtatgtattttctttgagagactacgattcccttccttgatctagccacttccataccaaggaaatatttcaaatttccaaggtctttaacttcaaactcttctgacaaatacttcttcaaattctgtaactcccccatatcatttccagatagaataatatcatcgacatagactatcaatatggccaatttcccggcatgagacttcttgacaaatagagtatgatcagcctgaccttgtttgtagcccagcttcaggactgcttttgtgaatctatcaaaccaggctcgaggagattgtttaaggccgtacaaggatttttggagtttgcaaacctgattctttgccatactttcttcgaaaccaggtggtatttccatgtagacttcctcttctaggtccccatttagaaacacattttttatgtccagttgttgcaagcaccaatcttgattgacagccaatgagagaaggatcctgatagtgttcagttttgcaacaggagcaaaagtctcctgatagtctatcccataggattgtgtaaaccctctagctaccaaacgagccttgaatctttcgactgatccatctgctttgtattttatggtgaaaatccacttgcaccccacaggcctcttcccaactggcaaatctgtgatagtccacgtcccattcttctcaagtgcattaatctcatcttgtactgccttcttccattctgaaatttttaatgcctcttgtattgtgttgggaacctgagtatcatcaagagaagtagcaaatgctctgtaagatggtgataacccttcatacgtaacataattcccaattggatgatctgtacatctcctaacacccttcctcaatgcaattggcaaagtagaatcatcaatgctgggaattaacacctctccagccctatcctcacctatgttctcttcaggaagacttgaattggagtcaatatattggccacatgttgactgtgatccgtgctctaattcttgtcttttcctcctcctgatgtaaacttgtaagttctcattagcaagttgtggggctataggttgaataggcatgggagactggatggtcacgggagaaggaacatttgtgtgctgggctggctgaactgatggcggcatgggtgtggacaactcagtgggcgcgaattgggaaggatttggtgactctgagtgaaaagaaggtacaccctcaagaaaagactcccaaacttgatgttcattcatgctctccccctgaacatgagatttgggatagaagaagacatgttcaaagaaagagacgtccatggtggtgtaaaatcttttgttggttggagaatagcatttgtaccctttttgggttggagaataccctagaaaaatgcacttatttgctcgaggagcaaatttgctacgattttgaggatacacatgaacgaatgccgtacaaccaaatactttgagtggtaaatcagaagaggcggcatgggtgtgaggaaactgttttaagaaaagttgacgtggggattgaaaggtaagcactctggatggcatacggttaatcaaataggtagctgtgagaatagcttccccccagaaataatttggaacattagaggaaaacataaggcaccgggcaacctccaagagatgtctattcttgcgttcggccaccccattttgttgtggggtgtcaacgcaagaacttatgtggataatgccatgattttgaagataagtactgagactactagtaaagtattcctttgcattatctgacttgaggacttgtattttggaattgaattgattttgaaccataagattgaaggtttgaaaaatgtgcccaacctctgacttttctttcataaggaaaacccatgttacccgagtatgatcatcaacgaatgtcacaaaccatcgagtgccagaaatattttttatccgggagggaccccacacatcactatgtactagagagaaaacagtcgaaggtttgtatgggatttgaggatatactgttcgagtatgctttgcaaactgacaaatttcacagtgataagatgctggatttttattgataaataatttgggaaacaattttgcaaggtaaacaaagctaggatgaccaaggcgatagtgtaacattataatctcactatctttattgaccttagaatttgacacagaattgaaagactctgacatactctgagactggacgcaacttgcttgagagacttggtttgagaattggccacatgaaaggaggtagagcccggaacacagttcagcactgccaatcatcttccccgatttcaagtcctgaaaaacacacaagtttggatagaatttagtaacacattggagatcatgaaccaatttgctaatggacaaaagattacaatccaagtttggaacatggaggacagagtcaagatataagtctttagtaagttttatagaacctatcccggcaatttttgactttgaaccatcagcaatatggacggatgaatgaccattacttggcttgtaattttgaagaatggtagcatctcctgtcatgtgatcagaagcacctgtgtctactatccacggcctcattcctcctcgattagcagtgaaggctacaccggtagtactgccactgccaacttggcttaataatttctgtagcatctccatctgctctttgttgaatggactcggctcgggaacagatgtgctctcagagttggcagccacgtgtgctctgccatctctgtcaaactgtggctttggtttccaatcagcaggtttgccatgaagcttccagcaagtctccttataatggcctggtttcttacaataatcacaccaaggcctatcccgtttctgacgatctccaccactactattaaatgaccgagcagcaagggcagaggcatccaatgttggggcaggttgctcttttgatcccatcatcactttctttctactttcttcacgcctaacctctgaaaaagcctccctgagacttggcaggggtttaatgcccatgattcggcctctaacatcatccaattccctgtttagtcctaggaagaacttgaacagtctcttttgttccacaatttgcctgtatgttgctgcatcatccgaacatttccatgagtgagtctcaaataagtcaagttgctgccaataccttgtgagtgtgttgtaatactgagtaactgactgctctccttggcggaagtcatgtagagttgattcaacctgaaacagttctgaagtattttcagaacttgagtaagtttctttggctgcatcccatatgtcctttgcagtcccaaacagcaagaaattttcgcctatgtcattgttcatggaattgataagccatgacatgatcatgctgttttcaatcttccacttcctgaaacccggttctgtagtttctggcatgactgcttctccagtgaggtactcatcctttcctttaccgcaaatgaacagcaacacagattgtgaccactgtaaatagttatggccatttaatttgtgtcctgtgacgagaataggagaggaatcattgccaccaaggtttggaatttcagatctaccccctgattctggtgacgtgacgctggatacttgtgatgatgccattccgtattttgtcatggaccggaaaggtagaagaacacttctcaaggcacgtgcagggactggagttgagaaaaaatagccggaggacgccggaaaatctgatcagaggacccgcggaagcaaaagaaccccaaaagaggcacgtgcagggctcggattgcacaaacaggtaggaagggtggctggtcggcgtcaggcgagcctggaggaggaagcgcgtcgccggaaagtggctcacgcgccctcacacgccggcgcgtgagatgcagtcgccggccggaaaaacgcgcgtgggcggcgcgtggatgggtttctggttccggtgctttgggacaaattggagatctcctccaggcgctccttgcggtgtagaaaaaaaaccgtcgccggaaagttcgccggaaaagttgccggcggtgagtgttttctgacgacgattcgactgaccgaaaagcgttttctcccttggctctgagaacagggactgatgaccggaatgagagagagagagagagagagatgatcggattgagatatggccagagagatttggccggaatgagtgatgacctgaataagaggtggccagaagggattagggtttcagaaaactggctctgataccatgaagaatttctgaactcctttattgatattaatcggtacacaccatacacatatatatacacaaatgactgaataagaaaaaatcaatctaacttaattctctcctaaaattaggaaactaaatcataaggaaatatcctaaatgatctctccttttttattcctaaattaaagtcctaactttggcattatttcaacaagaaccttaatgcttaatagtgttaaatattaggttgtttgtttttgtagtattttatttctattaagtattaaaaagtaaagaaaaaccaatatgttattttttctatttagaaaaagccacatattttggctttttctatttagtaaaaattttataataagtcatgaaaaagtagaaaaacaaaaaacctaaattctgaaaacaaattgctttaagcaaaaagccaaaaaaacaaacaccaccttagtcttcacattcttttttatgttatttatgaagttcctctgttatagtcctttttaaagtttatttttccactatgagtgtttatgatccttcttacacacacacacacacactcatgcacacacatattttttagaaacaagcactaacacatgtctggacactgaatgcaaggcatgctattgaatttattgcttgttcactgtagggaaagcgcaatccccgagtagcagatccaccagt

SEQ ID NO: 11034 - DNA, 837 bp, Vitis vinifera
  Intron number 3 from transcript GSVIVT01029897001 (locus G SVIVG01029897001) derived from phytozome v7.0 (chr-ID chr8 ; pos 1103632 to 1104468 reverse strand)
agaaccagtggaaggaggatttgtccagagacgaggtgatctctcttttgtgcgttagtgcacacacagacattaaatggttcagtgaatgctgtttctgaaacttgtatatcaaacatgcagtagacactagttggacagattcagcatattttaatcatgggcactttcattagctgaattttgaaattcaacccatatttgtgaagagcatgctataaacacaggcactttcatatgttgaattttgagggacaaagcatagattagactgcttagttgatggtgctttatgtcatagcctcacactggaaggttggaggctcagtttctaagtaggaaacaggcttatgtccaaagaataggaagagttaacaaaatgtgaagattatagaagtctatagacatggacttaagacttaaatacatagacgattcattgctgccttctaggtgatagtgccctgtcaactttgaagtcgttcacttatccttgctaaatgtcagatgatattataaaagtaactgcaagaaaatattgaatattatgtggaacaatgttgtttagtctgatgcttttaaacaatttatagagttctggataatatagttgctgttcttagatggtttaaaaatcatatcagtggaatcttagtaatgattttgtagattgagttctagccattattgcattataagctgattggtttgagttttcttagaaatttacatcagtgttttatttgattatttacatttctactaatatttatgcttgttctgtttcattatattgttgtttacttgaatttctccagtatccattgccaggggccc

SEQ ID NO: 11035 - DNA, 5561 bp, Vitis vinifera
  Intron number 3 from transcript GSVIVT01031610001 (locus G SVIVG01031610001) derived from phytozome v7.0 (chr-ID chr5 ; pos 18907333 to 18912893 reverse strand)
aagattttgggaacttcttcaaataatcaacacaggtaaatccctctctttagggtttattttttctcatgctttttctggaattaaagcttctataattcttttttgatggtgtcacagcctttgtgatttcgcactagagagatagaagcctctattgcttatagatatcaactatcaggtctttatgttaatttcccttcattttcttcaacccccaccttatttgacatttcgaatacctcatcctctgtaatttccatgtgaaactttgttcctcaccatctgttattatctaacctacgagtatgcatgataagggcttggaacaaattttagctcattctcaggtgcaaattttagtttctagttcttattatttgttttgtatgctttttttcttttagtttttaatgtgcttgtgatttaatattggaatttgatttatttaatttgtaggattggatatttatgttttattggtacgctaaaggttaggattgtggattatttttctaatgtaatggtagaacttgattttttgtgtggatcacaaatggggttggtgattctaatatgagacagttttacacaatgggttgttctcatttatgggtcctacagtgaggatgttgatcgtagggaaatgaggctactggttcagggatgggagagattttggtgaactgggttccttatagattggtgggttttttagtggggccatagctctcaattaggtgaaagttagatttctaatgtgtttgttaaaatgtttctgtttttggtattaagtttattaaaatttacaaattaaggaatcatttagcaaaattaatcctaagtttctatcaatttattgttctagtgttagacttttagatttttaatcatttgttgttgctctatactagtggcattggttttttttttctcctttatgagtataagagttttcctttttcctaaaattttctagttctttagagatttgataaggctttggttattagatttggacatttagcattttgaactccaggatttgaagttcagtcttataggtttttcagttcttgaattcaagttttcactttaatgaaaattatcattttggatacttagatgtttgtctaagcagtagcagaattttttaaaggatagtgaaaattcatcaaaatcatttagtgggacttttgattttgagaagtctaatccaccatctatatggcaacttattgacaagagttatccattctgcaacttagattagagaaaagaaaaaaaaactagatgttgttaatgaaaattaaaatacctgcaaagggaaagtttgagaaatgatccaactagatggtgctctagaagcataaatgactttcattagtgggttttgatggcaaaaaaaaaaaaaaaaaaaaattgaaaattcaaggaatcatgaggattgtaaaaataggaatctatggcacctcatctatgaggtaagtctacatgtgtataatatttattccatatctattgagttacagtaactttattaaggttacaattgaatctcttccacttttttcttccattcattgaattttggttgatggtttttaacatatgtttctggtttctgtgtttgctctgttaattttatttttcccaaggttgtcattgcttccgtttatgaaatgtcaatttctccattatatatatttgttgcccttcgtttttgttttatttatcttccgtattttgtttaggaaacaaatagatggattctctgttcagtagtggtatttttataataaattgtcttttttttccttgtccaattttaaatgtgtactacaataatagtattggttgatcacaggcttgcatatgagcattgagaaatgttgctttaaggaattaaagctatgaaccatgcatgtttttggtgttaatagtattctaatatgattttagaaaagattcaatggaaaagtcctttcatgatttctatgagctttgtgggttggaaggagagggatttcaaatgagagtctttgagatgaggaagatgtggaagaaggtgagcatttgagagggggttttatgagttttcaaaaatttaaggtgatgtatgggtttggtgaggtaggtaaagaaatgggtcttaagggcaaaataagaggtaagatagaataccccttggtaatatagatagattggaaagtacagggaaatcaagttacacaaacctaaaccttaatttattttctttttctccttttttcttcctcttctttttcctgaatttaactaatctcacaagttttacttctaacatagattgcaatcactagctaatagaggctttttacttgtttaatgtgccagaggatttgggatcttgttactcaagtgtacttcctggtcaagaatattgtgtggaaatatttaactgctacttcccagtcaagaatatggaatggaaatatttaactgccacaaaatatttctgtatttgaactctttgaacaaccattttgtaacttggtagagtatgtcaggggagttttactgtctgattgtcctactgattgcaaaaaatatttaagaagctgtcatataaaaagattatgaaatatgtatcaagagcacaatgatcacaatatacagggttaaaatccttccattaatgctaaaaaaaaaaggtaaaatgacttccatctgtgttatgtttagtgatagcttgggtgtgataaaaatgaagtcgtattgttataattgttggcttggtcttgtgatagtcttggcctagtaaaagaacagtcatagtgctatcattgtttggcttggtctaccatttaaactaaggaacacaataagttatcctaaaactttattttatgttaatgattttggctctgtgcaataattaagcgccatacaatacttttggacaagaggtgacctaccaaaaatatttttgtacagactctggtcatcttttcattccttgaacagtttaccaaccaaaatctcatgatgtatttgttatttaatgttgaattaaggactgttgttttggattatttatctattcattttatgcattcattctgaagctatttccaatcattttctccatgtgaagcaattatatagagatttctatttttgttacttgccagggtctatttggtgaatctgaaaaagtcaagtggcgtggaacatgggttgttaaaactgtaattagaagacaaatttatgatgatcgtgttacaatgtttgttagattatactttctctttcctgttttctcagtttgatgaatttgtttgagttaatgttaaagaaatataatgctagatgatgataactttttctgtgagcatgatcctgattacagagcatttgtcaaaagtaggttttattatgaatctattgtgtggtcctttccataaccttatttatggaattgattaatgatatatcctatttgtggaagcttaatattagtttaagtttagatcattattgtgtgcattgtttgtattgtcaaattataaaatttaacatagaaaattctataatttggtttagaatttgattttgtttagagttggtttaaaatatttactatatgatgcttagcagttagaaattccattggcaaggataaagctaaatagaatttgcattgttgccaaatagttgggatcaggcccaacatattattctctagctctgctgcttgtataaactagtatcaaattaaattaggctacccaatttttaacctattccttatgagtgttatttgtacagagtaggcttagtttttagatttgcaagcttcaagaactaggaaatatgagaagaccaattgtgctatctgtttgttagataacaatattcttgcctatatttgcataatccttgtagctgctcacatattgtgttttattttatctgaatggttgttggataaagttagaagcacaaagtggctgcagggaagctcttggatttaggagattcaaagatttagaattcatggtcctatttgtttgggggcttgttaaataacaatagcttgcctatatttgcattatccttgtagctgctcgcataatcctatcaaatggttggtcagacttttcagagatgcttgaattgattcttgaccattgaatcttttttgtccacacaaaaatttctattatccaatccagcctcttatttttattattcaaactagcctcttcaatttttttctgttttttctatcattgtacaagttcaacgaacctctagcaaaagtagcctcttatttttttattaaggtgctattttattttatatctttgatcagtgtttgagtagttattaacttgttaatcaattaaatggtgctacgtgggatcttattcttattttattttttattttttaaaggaaaagaaaatctactcaaataaataaataaataatagtgtaatggtcttcaaattcaaaacatgaaccccactaatggagtgaattgacatccaggttgcatcgaaaatgcatgtaacagctaagatgagtgggctaatttttagtatttagtattgagttattttatttacatctcgaattttccaatatattgtaaacatcaaagatagttgtattatagagacaagaagatctcaatatcttattatgttttacactttttctttgctaaggatgtcttctaaaattttatttgttttttttattctcaactctttgaagtataaatttttgttcacattatagaatgaaaattgtttttctgttatgactttcaagataagattttctatatcatacatatagtcttataagctatttaattatatattaattttcatagttctcatatatgacttactttttcatcaacttaattatcttatgaacttttaaatgtttttaaaagcatgtctcttatagtataatctcatgatgattgtatagcataactctagtacttttattttttccatggaacaatatgtattttgatccctccacttattagtataaatgttaaggtaatgttattttctttctaagtttagcttttcaatgctttttgtggggtgtatttccatctattagaatttccagtaaaccatttcttaaagttcattgaagttgagatactcctaattttaggagctcaaggacctctcttccttttcacacattttttttccattattaaaataattctgtggtaaagaatgataatccaggttgtagtaaattagaaaaacataaatcttaggaattgacttaaatgtttattcaataattttgtacttttagaatattaccaaagtaaaccaagtggaagcataatatggtacaacaatgaaaattatttatttattttatttttatttttaactttaaagtttaggttagtgagcaagcttgagtagtctaaattaattctatgaaggtcatagttttaataatgtttattggttgttatatgtataatttaaaggttttttttttcttcttttgtttacaggttgcaa

SEQ ID NO: 11036 - DNA, 7743 bp, Vitis vinifera
  Intron number 2 from transcript GSVIVT01029073001 (locus G SVIVG01029073001) derived from phytozome v7.0 (chr-ID chr5 ; pos 11896478 to 11904220)
gtggagctatcaaggttagatatccttggttattgaaagttctttatataagtggaagtcttatattgcatttctaagtgctatgtttaacttgcaaaactttgtcattagtttaatttcttataaattgatagaacagactgcggttaatttttcacattaggagactttccttttccaaaagaaatatcattctgagataaaagctttgtgtatggggcagtgatttctcaactctatttgtttatttattgtatttatttaacttaatattgatgacaaaagggttaggtcaaggaagatatggcttaagcttgtaattcctttccctcctttctttggcatggattcttctccaaaatatgatcaaattgataatttattgttacaaagtgacttgttatagattaagaactattattattgttgacttgttatagattaagaattattattattattaacttgttatagattaagaattattattagtattattattattgttattgttattgttattagtattattattttaagttttctatagttttttttttttaacctacaaaatatggaggttaagaaacaaactgcatatactagttaaaggtataggacattcctgccgttttgaaatacagcaaattgaatatctaagtaattaacagagcattctttatgcagcttgctattaaaatcattatgtgtaatctctgttttgcttcatattttgtagaattgtggaaataaggaataaatttgatagatctagaagtagaaaaagttgtagtgcatttaggttctctagcttactggttgagtttatgattgttattagtttgttgaaaggatggagtcctgtggtgacttcttgaacatcatatgaaactttgaagtcaaaatgattatgagattttgtggtcaacatgtatttatcatagttgtggacaactcattgaaacttatcaattatggggtattctaaattatttgaagaaattccaaaaattgaagttagggaaatgttagtgcacatcaaagagaatggataatagtctaacttgcattctagaattagtttgaaaataatttatgaacaattgataaaatcagagtgatttattatataccttgggacttcttgagtcatagggataagttctagttttctttgcttggtaataggttgaaaacaatttggagttttaggaataatttatcattttcttattgaaaaacaaggattgggtggcatgctttgtgatattcatagtgtcaaaaagcatgtttgttacctccaggtgtgtgatacttttttttataacccaaaacaggatttccttaatgaccccaccaagggcttgtaaatcattaggtattagaatacccactgcagcattttcaatgccaacactcctccataactttatgagatccacttctaacaaagcccaaaaagcctgaataaaccctaaagagaaaccatcgtatttattattttattattagtaagatcccccagagaagaggattatgtccgaaccgatttccaactctatcgcatactactatttaaaaaggccgacaaggaggaagcggggatggcacaagtgaatccgatgtgggacttatgcctttcttttcggatcaaagagaagagaaaatggcaagtgctatcgaattcgaagctgttagcatgttagcgcattttcctcccatttttccaataaatggttcaaatcattttatcgacatgagtgtcaactaactcaggaactacgggaagacccgttcctacggagggctgtctggtaggtaccaaatgtgtaccacctgtaggtaaaactgcgacgccggcccctttcgacgttgcacaaaagccattactttacgttcagctagcactaaaaaggctactcctagtagaagtggtagaattattccaagtatttcagctggaacagcaactgctattgacattttcgattttctattcactcatgatctggcctggtcgacccgatcatgatatttcagtttcaatcccatgcaattttttattttttcatgcttggatagattggggtaccaatccaagataaggtgaaggaggatcttttttaagatagttcaactcttgggggagaatctcatcattgaaggggggacccaatgatagttatttcttgggctgactttaagagtggaggcagaggtgcatgtggtgataatctgatgaggtagattccattgagaaacttctattgatgtgtacttgagatgaagacctagattagctaatcaggaggttaattggttttcttgagtggggttatttccttgactaagtatagggaatttacttcttctataagagtgtactggattgggttgtatgatattattttttcttctttgtttctctctctctctaattataaaagaagatctgcaagttaatttaacataagctttatatattaatttgaaattgagagaatgtttttgagctattagtttttaaaagtatgctaatacataaatattaactttatgagaattagcttctttgcttgggaagcaacttgggccaagattttgactctaaatcaactcaaaaagaggggttggaggattcctaatagatgttacttgtgtaaggaagaagaagaaactagtgaccatattctcatctattgttcgaaagctcgtttgttgaggcaattgatctttgcactttttggcattcaatggttgttgagttgttcagttagagaggtccttctgagttgggtcctttgtgggtaaaaagaggaagaaggcttggaaagctgctttgttgtgtatgttttgggctttatggcgggagagaaataggagggcttttgacaactttgaaagcatgaatcaaacaattaaaaattcttttttgtatctattttgggattgggttagattgtacattaagggtggatctttatcattgttagactttgtggattgggtaagctcacaatagggtgcggtagcaagtttttgtgttttcgcgcctttttgtccttttttcttcgtatatgacttgtatactttctttcttttaacaattcttatttacctatcaaaaataataataataataataataattaactttatattattggattttttttttattttcctaaaattttcttttatagaaattagaacgagtattctaataaataaatattaactttagattgttggaaaaaaaaatttcctaaatttcttttctatataaattagtacatttttgaatatttcatttttaacaaaagataacaaattaaatatgttttatagaaaagatcaattaaattgtgtgcatataaaaattagacaataacaaataacttcatggtataccaaggatgaaaatattagaaactgacgaaatattggtgactagattttacggaaatattagatgcaaatattgataagacaaaaattgattaaaacttatggagattagaaaaactttaagaaatgataaaacaagtaataatatatttcaaaagattgggagagagtttttgtaaaagattgttgatagggtaaaggcaatatatttcaaaagtggaaggctcttgttgatttgaagcaccttatctattttgttgtctaccatatatacttgttttcaattcctatgaaggtcaggttgaggctcaaaaagattcaaagagatttcctatggaaagtgagacattggagaaaaggccacatttcatgaaatgtacagtcttttgcatggataagaacatgggggaactaggcattataagctattgatcacttaatcaagctctccttgtgaggtgagaaatgggtatgagactagattatagaaaactattaggaaagggtgagacctctttaattgtagggcactctttgcagtgggtaatggaaggagagtgaagttttggaaggataaatggagtggaatccttttgtgtatacttttcttctttgtatgtttgagccttgtctaaggaggcttgggtggtggatttatcaaatagataggtgcaggatgtttttgggatctgcatttctttaaacacttaaacaatcgagagttgggtatttttgagacttttttctcaagattgcaagctgagttggtgaagaaggatgaaaatgatatggtcttttggatggatttgaagaacacagttttttctgtcacatatctctattttgttttggagctagggatatcaatttccttcccaacaggcataatttcaaattcatgggtccattcaaagcaagttttttatctttcttttttttttttttttttttgcttgggaagccaattgtgaaaagtattgatgttgaataaacttcagagggaagggtggccagtggtgaatagttgttttctttgtagagacgaggagtcaattgattacaatctcttttattgtgccaaatcaaaggttttctactggttgttattctccttgtttagtgtagtttaagtgttccttttcactctcaaagtaagtcttttaagttgtcatggttcttttgtggtgagaaaaagtaagaagacacaaacagctgctattctatgcattttttaatgatttggaaggaaagaaagaatagcatttgaaaatgaggagtctgattaaaagctgaaatgttcattccaagtaaccttttagcaggggttacattgtacataaaaaaggctcaatgcctttggctaatggtgtagattggttgggcttgtgctgaggtagagagttctttgtgttctctctttcttggcattgctgtttgatgcctgttgttgttttttttttttttttttttgatcagaaatgaagaaaagtatattaatagaggaaaagacataggagagaaagaagagatacaagagaaagagaagaaaccaagagaaggatgagaggtccttcccacaaaacaaaaactgaacaaaagagaaaacacccaactaaagaaaactaaaaacaccgaaaaaacccaacactctcaaacttttgaagcgcaaactgcaatccagttgaattgtaaagcacttagaggaactcctctaaaagctgcaatacaagaggcccaaagagaggaaaagaacataatcaagtcccataacatctcttccgttctccccttatactcaaagatcctattgtttctctcttgccaaaccatccataacaaagtaaggcaagccatttgccaaagtgtcttgcctcttaatgagttccccaagcctttaaaagcaataaccaacatgtcctcaatactccttggaggaacccaagccaaccctgctagattgaacaacttgtgccaaagtccaatggtaacagggcaatgaagaaaaaggtggtctattgattctccatttcctttgtatactttggcatattgctctttggccatatctataaattttattacctatcaaagaaaaaggaaaaaagctgactttttttggggaatcatttaacactgattttgttctgaatttgctattgcttttttacatgtggttactagttgtcaataaccactctaagatatcctaaaaggcttacaatagtatttcctttatgtgcatgttctcgataaaattaatgaacctgtcctatgtgattgcccagaaagtgtagaaaatttgggtaattacttgaagaaataagttgaaggtagtggagagctggagagaattgttatagcttgtagaggaatagggatatagggagagaaaaatacttagtttatctagatttcaatggtctagaatgctgtagaagcctatttttcataggtgagatagggctgactgttgtgaacttactaaatcctgattgttgggcttttatgatctagtggtgaaacccaacaaggtcttaagcttagtatgtttgagcttttataatctatcattagaaattgaaatttgacttaatagcttgatagttaatatatttaaaatttataaaaaaaactctcattctattccacgatatggagtttaaaaccttcaaagaaatttggaaagtagggatttcaatttcaaattgataaataaatacatacaaatagataaaaaaaaaaaaaggagttgttattattattattattatcagcactaatactactactattcactattaactatgaagttttgagtctggtgggggccatttcaaatttgaggttttaagtcaaatagttcccatttcaaaatttctcttcaaaagctttaaaacttaagtataccacattaaaaagataaaagactttggagaggtattaaataattctactgttgacttgatgtcaggtttttgttgctaactgttggacaataaaagtttgaacattacaagcataactatggaacttgttaagttagatcttaatttgattgtgttgggtcataaaaaactcaactattactagcagtttgagccttaaagagcccataatggctagttcagattcacctgtaaaaatgggttttgcaacattctatgccgcctaaaaattcaataaaccaggtttattctctcccaaaacttctattcttgttttcttcctttcagttgttcagtttatttttccctagtctgatctgtaatattttgggcaattagatccaatattggtttaatctgttttctagtgtatgcgcatgcggaggagggtgctactttatgcttattgaagttgatcttggagtagttatggtctattgctatccataggtaggtagggaagcattagtaagttaggatattgtcgttgtcacgagtctctccaaaagagaattacttttctttattaacatatatatatctcaatttatgagtagttaattttatctttcctaccatatatgtccaaacaatttaatttgatatatcttatccctgaaatcaaatatcaatttttatttttgatagacaaaagcttgtattaagagacaccaaaaaaagggggcacacccaatgtatatagataggaaatcaaatatcaaaataatgatgcaaataatcatttccctaaataattgtacttcagaaaatgattttgcttccaattttttttttttcacttccaaattgctttctaaaactcatactaaattaattattatatgctattaatagtttgatcagtctcatcattaattacaaccgaattacgtcaaactgttctcaagttaaaataggttagttctgtaaaattgttgattccaattaacttaattgctgaaaattgtgaagctagaggcagattgacaattataattgggatcccaatcataccatcctgtgtagtgtggcacacccctttttgtactaacaaaaagggatgggcttgaagatgaatgtgttgaaaatgtggcacaccactttatactgagatatgaaatgttgtatgaagtcatctttgagaaatggcatgatgtaagaaatgatactaattccagtctttctctattataaactgtgtaatgaactaatgattgatttttaatgctttcataattgaagttggatgctttatttttttggttgttatcattcatttacctttatatttatcaacaaaatagtggcatttatagctgccggtgattcattctttttaattatttcatatgcagcctggtcattttcaaggccatacttacgacataat

SEQ ID NO: 11037 - DNA, 10453 bp, Vitis vinifera
  Intron number 3 from transcript GSVIVT01037259001 (locus G SVIVG01037259001) derived from phytozome v7.0 (chr-ID chr6 ; pos 16837354 to 16847806)
tgtccaggattatatctgggcaacgcactgtaagttccttcctataaatcttgcatttttttacacggccaaatttccttgaatttttcactttgggaggatgtcaaatacttgtctgcaaaatttgagaatcactcagatgaagattggttgttataacttccacatgatttttttactgcatttattttatttttatgcatatctcttatgtcttacttaaaaattattagcattatccaaataatttttttaattgcttttatagccctttgtaattctggtggtgaaccatgtctatttcaggaattgtccagcatggtactcctataacattctttacaacccgttttgatgcatttagaacaaatatggtgtgataaaataattttttgattttgaaaaggatcctaattccaccttttcacagctaaacttttttgaatctcatataatcaaaaccccactcaaaaccctgcaagctggaagagaagcccaatccttattcctaggtgtccacacactacctacaaacctcctatcacatatcttcctctttgtttcctgaagcatcataatatctagggactctgtaatgcaatttttttttttttaaatcctcctttttttttttcctaaataccaatcctcgaatattctagctaatgatcttcataatatatatatatatatatatatttttttatcagaaacgaagaaatatgtattaatagtagtatatatacaaaagaagcctctatagtagtaagagaaggatgagaggtccttccctcaaaatacagaatctgatcaaagaagaatgtacccctctatagaaaacaacatacaaaaaaatccccaaccatctcaaaattttgaatcacaaattgcagtccaattgagttgtaaaacactaagaggaactcctctaaaagctgcagtacaagcggagtttgtatatcgtttgttgtatcacctcttcataatatcacctcttctgattagtctattgtatttttgggaggattcctcattcttcttttgtatttctttatcacataatacatttgttatttctgataaaaaatgataataataataattttttggttttggtcactgacaacatggatcagatatgcactggttatgtaaggatgcctattttctttatcttaatttgacattcacattataaatgataaattgagggttcttagttaccaaatttttagtgataaattgaaggtcctccattccaacacctttcatggtgggaaaattagggattattaaagaggcacaaatcataaaacaggtcaaaacccatgcacacacagagtatgctagttatgtcaggaaagtgataaaaaaggaaaactagaggcaaaatcagcatggccactccctaagctatcaatgaagtgtgtgtgtgtgtgtgtgtgtattaattcacatctcttgtagccatttggacttttagacctcatgaacatggatttttgtagctctcttaatgctaattaagtttgcacttaagccataaaaattcctccagttctgctctttttagactcatcaaaacaagcaaagaggggaaccatcttccatgcctttttattacccttacccaccaagctaccaggccaaccttgccacatatccttgactgaatgagggagtagccaagccaacctaaacatggaaaaaaacaaagactagaaattgtgagtgcacacactttgaagaaaatatgcttggcccatctcctccctttatttatgccaccagtacctattgacatgattccaatcccatctcatgagttgattggctgtatcttccccaaacgtctcaagcaaagaagaatatttgatggatcccatgaatccaatctgattcctcagcttggacagttttggtggagttatctatgattggaagagtaggtaggctagaaaagaattctttatcttctacaaaaggcccatcaaagataaggattaggaaaaaaaaaggttgtttttcactaaatgatacatccatagtgacaaaaaaccgtttagaagttgggtgatagcacttataacccttttttgtaggagaataacaaacaaagattcatttaagggttcttgggtcgggtttacttctttagtgggcatagatatgtacaaaggctacacacccaaagatccttggggaaagccaattgaaaccatcaaattttggaaaaaatctagaaatcgtttcaatagagctaacattgttaagaatacgagagggtagcttatttatgaggtatgtagtagatatgacagcctcttcccaaaatcactttgaaacattcatttgaaaaatcaaagccctaatgatcttcaatagatgcccatttttaagcttagctatcccattttgtaaagggtatgggagggataatgaatgattcctttcttttagacataaggttaaggtattaattgaagtactctcttccattgtctgaccttattgttaggaccttggcatcaaattgattttttttttgcttgttatgaaaaatgggaaagattgtgctaacctaaacttttgtttcatgagatatacccaagtaaactgagtgcagttatcaacaaacaaaacaaaccaacttaccaccataaacactattaactttagtaggtcccctaacatccatatggatcaaactaaatggaacaaaaattttcttattgttttttgatgggtaaaaaaaatcaatgttttaaaaaccggaccggactggccggttcaaccgtcaaccggtcgcactttcggtccgatttgctctatgagaccattgagggattggacgggtatcgaatcgcttgaaccaacggtcggaccgatgacccggtggaatcggacggttctaaacgaactgaatagttcaagttaacccctgattttgcaaacgtggaaggggggttccattgggtctaaatgttttgggctaaagcccatgctgggccttgtcttattatgacaaggcccacacccatccccacaattttatgggttgagtcttgagcccaagtgatgactttgccttaggtgaggatggcttttataggcatcctttgcagcctgtttcctctcacaattcgatgtgggattgctaacttatcaatgaaaaaaatataaaaagcctctccaccaagagggcttgaaccttgcacctcaggttgtaccatcagaataagacaccactcggctacatgcattttgttatctaacatgccaaacaatggagagtggtttctagaggagcaggaaattagagaaggaattgctaatgcgtttaaagagctactttcagaagatacggggtggaaggcggatattggaagtcttcagctagatcagatcaatcaagaagaggctgagatattggagaggcccttcacagaggaggagatttatggggctctgatggagatgaatgaggataaagcccctggtccggatggttttactttggctttttggcaaagctattgggagtttattaaagaggagattatagaaatgttcaatgaattctatgatcatagctctttcctcaaaagccttaacaatacttttttggttttgatccccaagaaatgcggtgctgaggaccttggagactttagacctattagtctcttagggggtctatataagttattggctaaagtgctggctaacagattgaagagagtggttggtaaggtggtctctaattctcagaatgcctttgtgaggggaagacaaattcttgacgcttctctaattgcaaatgaagtgatagactcatggcaaaaacgaaaagaaaagggtcttatatgcaaactggatatagaaaaaacttatgacagtatcaattggaagtttctattgaaggtgttgcagaaaatgggctttgggtctaagtgggtggggtggatgtggagttgcctatcttcagctaaattctcagtgatggttaatggagtgcctgcaggtttcttttctagctccaaaggtcttagacaaggagatcccttgtctccttatttctttgttatgggaatggaagtgttggatgttcttattaggagagctgtggaggggggcttcttatcagggtgcaacataaggggaggtagtgaacctccattatatatctctcatttgttctttgctgacgatactatcatattttgtgaggccagaaaggaccatttaactcatttaagttggattttattttggtttgaagcggcttcagggctaaagattaacctagcaaagagtgaaatcattccagtgggagaggtggtggagatggaggagttggctgttgagctagggtgcagggtggggtctttaccttctcagtacttgggtttacccttaggggttctcaatagagcgccttatatgtgggatggggtggaagagagaattaggaggagactagctctttggaaaaggcaatatatatctaaagggggaagagtcacttcaataaaaagcactttggctagcatgccaatctactaaatgtctatcttcaggatgcccaagatggtggctagaagacttgagaaagtgctaagggactttttgtggggaggaggaaatatgaaggggaaaactcacttggttaattgggaggtggtatgtacagataaggctaaaggtgggctagccattagaaagctagccttgttgaacaaagcattacttggcaaatggatatggaggtatgcttgtgacaaagataatctttggaaacaagtgatcaaggtgaagtatgggcaggaggattttgggtggaggccaaagaaggctatgggggcggtgggagtaggggtttggaaggagatttggaaagaatcagaatggtgctggaataacatgattttcaaagtagggaagggcaacacaatcagattttggacagatgtgtggtgttcagagacagcgttgtcccattgttttcctcatctctttgctatggcggttcaaaggaactcaacggttgaggaaatgtgggatcaaaattcgggtcacggaaattggaatctaaattttttgagggatttcaatgattgggaattggggttggttggggattttctttagattttgaggggtcacaaaccctctggggaagaagactcagtcctgtggagaaaaggaagaagagggcgattcagggtaaaggaagcgtataacttgctggcgagatctggtgatacaggctttccctcaagaagcatttgggtgacaagggtgccaactaaagtttgtttttttgcatgggaggcgacgtgggggagggtgttgactttggatagacttcaaagaagaggattacaacttccaaatcgctgctttctgtgtggttgtgaggaagaaagtgtaaatcatatactcatacactgtacagtggttagagttctatgggatatagtgtttggtttagttgacgtgaaatgggttttcccagaaactgtaaaggaagtcttagttagttggaggggttcgtttgtgggtaagaaaaggaaaaagatttgggatgccattccgttgtgtattttttggacggtgtggaaggaaaggaatagattagcctttaggggagggagggtgttgaacgttcagaagttaaagaatttttttgtttgtaatttgtggagttgggccaaactgtatgtaggtgaggaggcgttctcccttataggattccttgagtggatgacttcctcttaaaggaaggtgtttctgttcttgttgtttttgaggcttagctgccttgtataccccctgtatactttgtggcgtcttgccttttgattgaatatactttacttatcaaaaaaaacaaaataatatatattagattttaacatatttataatattaaataaaaataatataatattttttaaaattataaaattagtttaaattttcatttttaatatgttcacatttaaatattatacatatttcatttaataaaatttaaaatattaatatgatttaatttgataatatcaaagatataaaataatattattgatttttaatttattcatatatattttaaaatttttataattatttttaattttaataatatataaattacatatttatgacgtcactagtttgaccgcggttcgaccaccggtccaaccagtgaatcgtgaaccggtaacttttccggttcgatgaccggtccggttctgaaaacattgaaaaaaatatattaaaagcgcttgcaaaacgcattggagtacacacgaagtatacaaggacaggtcacaaggcaagcaagaggggagagaagaagtagaaaacctaccaccctacacaataaagccagccccttgaaaccaaccccctcggaaacctcatataacagaagaaacaaaacaattccctcacaagacaattgtggaaccccgttaattctccactttcctttgaaggagcacgaagagctattgtaactaacaacgcactcaagcttccataattccctcttgagacgggaagccgaaatattcttttcgcctgagatcttaacccatcacccttttctttcctccaaattcttcagaaaggaactaatctccttcttgaacctcgcaactagcatccccacaaagttgctgaattgaacaaacttactgggaaggcaaacaagatcctctccctctaaattgctgacatgctccagggccctagaggatcccaactcctcatccctaactgccaactccttatccgaagagttctttgaattgcttcccgcagcctccaacaaacagccatcttgctgtaacatctgaagttgcctcccagaatccaaaatccccaagctaggagagttaggaaacctatttgcctcctccactagagcttaatccgtgaacttcatacgagaccatgacgcttggaagactttctcatcttttcttattatttaaggaaaagacacatggtgatgtttagcatactcacaaacatcacaatggaagttttaaacatttagtttttcaaacatattgggaaaattttcaacaattaaaaaagtggatgaccaagacaaaaaatgggataactgaacttggtccttggttggagtaggatgttctgataaatatgtatgaggggtaggacatcttgtgccacttttagcttcaaagagatacagtcccccttcttttctagtatgtccaatcactttccccataagaatgtcctgaaaaaacattcagtttgtgtaaactttattgagcaatttggatccttagtaatttgaggaataaacaacaaatttattgatagttttggaacatgtaagacatttcttaaggttaaagaagatgttaggaagacatctccttgaccagccataattactaagatagcatcaacattttttatcttttgattttctgggcatggaatgtaactagaaaagacttttgaagaattggtcatatagtccgaagcccttgaatcaatgatcccagggttggaaaactgatttttagaggcactcaaggcaagggaatatttacttgttttagcaaaatgactatgccccataggtttttccagcttagaaatgaactatttaagtttcttaatttcctccttgttgagctccatttctcagccagagctttcttattgctgttttcctccattttcaacaagatttgcgagtgatttgtagccaaaattccttcccccctccctccccccggtaccctcattcccgttgaagaaatttatgggcttgccatggagcttccaacatgtctctcttgtgtgcctattttttttgcaatagttgcactataaagagtctttctcacttgttttcttacctttgtttctactagagtgcaacattaacagtagcgcttccttaatttccacttggttttgagatggctaaagcagatccgtttctagtgcttcccttttctaacattaaatttctcctttaaagattgcaaaggctttgtttagagatgggaatggctctttcccaagaatttagacctttacttgatccaattccatattcaaactagttgagaaatcatacaatctctctcgttcaatgaactcttaatgtattgttgcatctatggtgcacttgattcttaaattttgatattgatcaagttcaagtcaaagacttctaataacattgtagtactcagttatagaaagtgtaccttgtttggtgttgtgaatccttgtctttggttcaaagatttgggttgcattttttaccttagaataggtatgacacatggacacccagatttccttggctgttgagaggaacatgcatgtgcagcttatctctagctgcataaaatttcaaagccatgacatgatttgagtcccacacaacaaaccttggatcacccttgctcaccatgggtctaatcagatagctcaacttccctttgcccttaatatacatctttactaactgtgaccactctagataatttctccattgagtctgaaggatcttgctatattctggaattcagccggtggtgttgactgttggattgtggcttggctcaatattgaggaatcaacctttgaggtgtttgacattatgagtggaagaaagggtatgaagatcaagaaaaagatagaggcaatgaaggcctaagttgaagtggcagtttctaaaagttcagaaactaatggaatatgttataaaaaaaaattcctagcaatgaaggtacagaacgctaagaatgcaagtgattaggacaaagaaaattctagctttgatatcatgttttcatacagatctagaagcatttgtgagaatactttctgctatgtttattgcataggaatacacatgaatatgtatagaataattgtctaaaaactgtctaggaagtaatgcctatggttatgctatcaaagataaataaaataagtgaagaatgctagcaaaggaaaggaaagaatcctaggacttacaattgctacagctcatataagctggaaaaaatcttcaataatttgccacacgagctggcagattttccaacacatggtctaaacccatgtttggttgagatgggtacgcctgtgaaaatagtggtgccatgtgaagagagaacaagaaaggtgtttgggagagaaaaggcgagagagggggcagtcaattcccatcccaaccaacctctctcaataccccccttcctcccctccccacaagcacatagtatgaacacaatgaatttctggaggaaaattattattaatttttttttaataagaaatgagaagaattttatatactgacggaggaaatttatcaaagtggtattttagtttggcatcagcctgagttgatcatatgttgagcttaattttgggacacaaatactgaccaaattcagctcactccaaactcaatcagggtacaatccaaataaattttgggcagatgaagcgggtatcattctagctcagtccaagttacagttgtaatgaccaccaatccctctgcttgatggaagcaagcaaattgcacttagaagcagtctttccctctattttaaatgatagatttgagcattccatttccccaattaaaaggtcaaatgttctaccatttccatccctcagcagtccatcaacgaatgaaatggggaggtagaggaaatggggggaggggggttcttgtgacctggcaaaatcaaaaccttgttccttattttctatactgcattcataagccacacttatgctcacagaaatatatagtgcagattcataagccactcttatccccacagaaatatattgtgtgatgcctggcatttgaacccaccaaaatagttttccagaaaaaaaaatgattttttggactcttcagttggacaaagtgtagccttaagtaaaaatttgagctttcagtttctatacatgaaaaaggtttttctgtgcttttaaatcttgtccattcactgaggaacattgtcatcattaattaagtgatgttatcacctgaatcttgtgtccatgcagtggtcattggtttcttgaatctttcagcttaaggctattaattcagtcttatgagttatatattagccataatgaattgcttgttgaaactacactaatcgaggttctggaattgtaatgctggcattttcaaatgatgactgttagtgtaggagaatctgtttctcaaagattgttctgaatgctaaaaagtgttggtacttgtgtatttgtctccagatttcttgtactgcctttggattttgtgatggcttcttattgaacttttaggttttttgttaatgtactaactcaactccattatcttccagccgatttttcaaaggtatccacggcctgagaagga

SEQ ID NO: 11038 - DNA, 3004 bp, Vitis vinifera
  Intron number 7 from transcript GSVIVT01036786001 (locus G SVIVG01036786001) derived from phytozome v7.0 (chr-ID chr1 9; pos 22566096 to 22569099)
gattccagccacatcttgtctggactcttgaacaggttagatttcttcaacttaattaatcttgtttcttttgtaaaaccataaaattcatattattttcattcttgaaaacagtgcatcagttatgattaagatttgttggtggacctatacattgatcttatatattattgttggtggtaacatgagcaatgattgataacctatagttgatcacactaattttttttttcccctgacctttacaaactcacacaacaagatgcatgaccagacggatacagccagtgtgcatgaggatgagtttttgtatccattggaaatccatgccttgatttgaacttatttcttttttggattccttatgttttaagtttctattctattttcatgtttaaatttggtgatggagccaattgtggccagaactgctctcttatcatgtttaggactatgaataagcatccgtttggtagtgattttaggaagtatttttaacatttttaatacttaaatttttttatcattcaagtgtttgaaatgttagaaacgttttctagaatcactacctaacgcactctaaatcaggtttggtcagaaaaagatgcatatactttgacatagttatgtttggagattattgttgttattatattctattttggaaaggagtaaccagtgtaatcaaaggcgatcgcttgggtcgcctaggccattaggccaggcaaggtagataaaagtcgccttttgaagacctaggcaaggcgacttcaaagaggcaacgtctaggcaaggcttaggcaatcgccttgggataaggcaataaggcatagaggcggtcgcctttgaccatgaattaagattaaacatacttagattataatttcatttaatataacattggattaaacaaagtataagataaaatattatattatcatagagataataagatggagggttatcaatctagtcttgatgaaattaatgacaattttaatttcaataatgactatgatgatgattgcctaaagcttctctagaatgttcaatctcttatttttttatttaattttgctttttagatgtttgaaaaattagaatatacatttagataggatgaatatctttaaacaatatgatttttttttataatatggggtataatatttaacactttcaataattattactattttgttaattttataagacatcgtgagtgatgaaaaattaatagtgttgattgttgaagacaacacttatattggttgaatatcgaataggtaaatatatgtatatttttttatcgccttactatagttaggctattgccttgtttttcgcctttcaccttaggctaaaaggagtcttattgccttgatatcgccttttgcttttgacaacattgggagtaatagttttctatttcttattacccattattttaggtattctttggactcaatgagaccttagctgccctaatattataatagactccattgagttttccttagattgacattacttcatctatggtcgttgatttgtgttggcatatgacaataacatgcccatcaagtaggaagtactcgtatcaactacactgagagcccatttgggagtaattctagttaaagcggtcttagtttgtagcatttttgttagtagtgcttccattagaaacaaatttaaggagaaccactaaatgtttggatataaatttaaaaaaaatgttttgatagtgtttttggtactatgttttatgttttttaaaaagtgattttttgaggaattacctcaaatgattctccagaatcacttcaaacaattctgcaaatttttagaagtttgtcaaacacttagaacacgtttggtagtgattctaggaagtgtttttaatatttttaatacttgaaaatttttatcattcaagtgttaaaaatgctagaaacgctttctaaaatcactctcaaacgcactattagaatgcatttggtagtgattctagaaagtatttttagtatttctaacacatgaaattttttatcttttagagtattaaaaaaattagaaacgtttcctaaaatcactgccaaacagtcttttaatttatgtaaagaagtacttccaatcattaggaagcacttctagctctttcaaaattactcctaaacacgaacctaaaaaaaaagactcctaatcacgctttgaaattggctgtacttttgtcagcatgtctcatggattattcttatgagcagaatatcaaattatagggttcccttagtcaaataaatggccctaagattcttatttctttgaactcattctaatgctcaaaatgaatcaacctggtttttttgtgagtcattttgaaagttctgctgaagctccggctttaaaatggaaatgtctaaatattatatactttggaggagagagaatttgaaagtggtttgtaatgcaacaaatatggagccattctgagtaaattttcagacatatttacatatgttgaggtcatgaatgggttttatgggatgcacatccacaggtgcttgagttagtgcatatttgagaaaccatagaattgccaaattgtgtttgatggtcaatttcaaataattagccatgttgtaaatattgccctgatatcagtgaattctgaaatattaaataataataataataataataataataataataaaggaatgattcaatatttaaatccattacaaaatggtataatacatgtcctcctacacccttttaaagtaaataaaggtgaacctgtttgtgtttgcccatgttgatctcagagaatgcaaggattctttctcagtagttgtatgacattcagattatcattttggataagtttcctactataaagattctgctttgaatagcacttttcaattctctgttattaagtttacttcctctgctacatttttcaggttaatcaaaacattgagaacaaaacacaccaaca

SEQ ID NO: 11039 - DNA, 5214 bp, Vitis vinifera
  Intron number 4 from transcript GSVIVT01009366001 (locus G SVIVG01009366001) derived from phytozome v7.0 (chr-ID chr1 8; pos 7816450 to 7821663)
ttcgagttgcttcaaggtgtgtctttataaattcctaggatccttaatcaattcacatggtgtttagtttcctattatatcctcacactaaaggtcttcttttttaaaaatgttttattttattctattttatttttaagttaaagggacaagtaccatattgtttttctacccattgctcataccttgagtatttcttgttaaattttttatgataggaaatcacacttccattggatttcttattataagaaaccacacttccattgtaagatcggaaggatgaaacaaacaggaataaatttcctccagatgcaaaataaaagaatggccactagtgttaagaagaaagagaaccaaccataactgtgaacaacacacaaaaaaaaaaaaaaaaagaagaaaaaggttgcatagctgatgagtggtttcttagaaatatctccatagttgatgggaacattgttataagtatactttcagaccttaagagagtagctgatgagtggtttcttagaaatatctccatagttaatgggaacattgttataagtatactttcagaccttaagagaggaggaaaagttgaccaaggcttaattccggagaaaccaagtatttaagctccttgtatgaccttaaatagttaatttagctcaagttgattcttagtatatgttatattctttgataggctttttagtatattattttttaagacaaggatggtttaataattttcaacgctagattttgtagattggtttggagctccatagggtgcagatgtttttcgtgtgtctgtgcctttttgtttttggtttcttgtatacatcgtgtatacttttcttttatctatcaaaaaagaaaaaagaaaaaaaggatagtttagtaattttcataaagtgggcttagactaacagcccatggtcctattagagtccttgttttacttgcattgggttagtagtttatttttttgtcctttgtcaattcccttcaccacagaccccacccccacccccacccccgcccctctttttcctatttccagtagcggagggagtcatactcctattagaaaagagagttttgagtcatataaacttaatagtctttagaattgttcttaaattttgagagatttttcaacatttaattagtttttgagaccatggttttcttatttttaggtgtgattacctaggagtctagatgtgattgtttgaggtgtgtttcttcttttttcagtcattcttaatgtatttaccacaatttataagcgtagaaatttctaaacatgctggaaagacattgattctgcatcataagtagttgcttctttcttggctaggaaggctgcttgaaatggatgttctaggatccatttagcagattccttggcaattgtagtttttagcctggtcgtttatctccttgctatgcatgaaacttaccagtttggaatggatcatgggatcaagttaatgattggaattgaattggaccaacttcaaaggaggaggtactttttggaaaataggtgtttcttttgtctctctgaagtagagacggttgatcatctttttcttcactgtgcaaagactcgggttctttggaatcttcttttctccctctttggtgtgtcttggattctctcttgttcagtgaaggaaactcttcttgggtggcatgggttgtttgtggataaaggtcgtaaaaaggcttggcaagcggcccctttatgtatattttggacaatgtggaagaaaaggaatttgatagtgtttgacaatgaggagttatcgatccaaagattgaaaaattcttttgtatagaacctgtggtcttggtctagggtgtttgtagatatgtgccctatttctcttgtgagtttcattgattggctaggttgtaagtgagggcaggtgatgttttttgtttctttccctcccatagttgtgaaagacacgcctagactcggggcggcgcggcgccaccctctgacgccttgcttgaaggtaggcgatgccccttcacgaaggcgccgcttaggcgctcacctccggcaaggcgcgacgcggtcacctgactcgcctctggccaggtacgccttctccttctctttctccttctcttctccagtcgccgtcgggttgtagagggttggggctaagaagccctaatattttttttgggtccaaaacgatgtcgttttggccctttttattttaaaaggaacatgccaaaacgacgttgttttggagcctgttcctttaaaaaaaaaacaggccaaaatgacgccgttttggccctgttttcccttctaataccttttttggtctttttgaacctgacaccactcccaattgtgccctagcctgagccgtgcagtggagaagtgaagaagaagaagaagaggaaaaataggagagaaatagaggaaaaacagccgtgcagtggatttggatttgtttttatgcttggagttctttatttttatgttttttgttgattaaattgaagttttggatgatatttgatgatttatgtgtttaggacaaataaatgattgttaaatttgattatattatataaaaatatatatgtaaattagggtgtgccttactttactaaagcccgcgccttgcgcctcaggctccaggactactttgccccttagtgcgccttgagccttttaaaactatgttccctccctcgttggtttaagcttttagacttcttttgcatacttttggtatactctgagggcactgtttttggtgtctcctctttacattttatacgacttttctttgcctttcaaaaaaaaaaaaatgaactgctttcttttcttgttttctctatggatataatcatagttaatttgtaaaacttattttttttgtttttccattttttcatattgtgtatcctattgtaatttttttatatggttgaaaaatatgcatatacacacatatcgaaagcatgaagtataaagtaatatataatcgatttcatgaaagataagtaggatttaaaaaaataaattatgtcataccatatgaaaaaaatcgaatattaaaattttaaaaattcaatttgacaaaaatgtgaatttaagttataggtttatcgtaaaatccaaaaaatgaacattttgaatttttagtttcaaattctagctagacatatatacttacatatgttgtggatatgtatgtcttttcatgtcatctccaaaattctaatttttcatatttgttatccttctttccccatggaaaataaaatctcaaaaaaactaatatagtatgaacaaaggtttattcatcagttaccatttttcaatattaacattcaaatcattcaaataaaaattccctaatattttttgttagaataaatttaattaatttccaacattgtctttgacaacaagaatataattttttcatgtagaggtatttaaccctctctctcttttatgattaatgtctaacctactttacattataaacaatgaatataataatttcgagaaaaataaaaatgaatttggttttaattaataattatgaaaaatatttgaatgtgtacgtattgttgtatcatttatcatttaccaaaagatatgcttaaaataagatgcaaattgcaatatgtattgatttccattaaaaatgtattgtattgtgtatcttaagtttttaatagctatgagtgtaatataccctcttatggtagaggccaacaaagaggagattgcagatttgctttctaaagttgagggggttgaggggtgggaaagtttgctatgcatctaatgggggagggaaggagactaatttgtgtaagaaacccaaactttgcaaatgaccttggttaattaattatggtggtggcaaggagttagtcctagtaaagaaaggagaagtttttggtcagtctcctaagaagatagattaatgaagcaaagaattatctcttggaatgttaaagggttgaatgattggggaaaaagaaaggttttggaatttttgttttgtccattgagattataagaagttttggtccgtctattgatgcaaggaggtgattttttgggatagtcgaacaatggagttgttggatatggaagtaggagctttctctttgccatgcaagttcacaaattgtgaggatgatttgtttggtgttttcaggcatttattgggttgttctggtagctgaaaggagatttttatttttacttttattttattttatatatttatttatttatttatcttgaaggaattaggcctcattagagggttttgcacagagccttgttacttttggggaattttgatatggtcctattcccccatgaatgcaataattgtttgtcttcaactatgagaagcttcaatggatttatagaagattgtaatctaattaatatcccttgtgagcaggaagggaatttgactcctaaaattttagctttcaaggcccttaggaaaggggagctaaaggaactggtgttaagggaagaggtgcttagaggcacaaaagcttgagttagatgggtaaagaaaggggattgcaactcaaagtatttccacagggtggctaatggtagacgggaagtttatcaaatttttggtgaacaaagaaggagtagctttaggtaatggtaagaaagtggtaagaaagtgttgattaatctaattgaagatactaaggaattaactccctaatttccgagatttgactgaaaatgccagagaattaattccctgatttttggaattgtatagttgtatgattccttgatttctgagattgtattgctgtatatttcttgttttattttgttgatctgttgggtagaggattcctagaacttagtcaacaattcaactgagaatttaacctatttttagtggaagagcaactaaaaaattcaactatattgtcgaattgctgatgttatgttgatcgacttcatttctttcacaaagattgtaacctaattatatgctgaaattgaacattaatggtgtcaagtgagaaatgaggggttgaagaattttctatagcatagacttgatttgtttgtataaatatcttgcttgctgtataggcaattttctaggatgttaatatttgcatgttccctgtaatccagatactttaaggggcctgaacttcttgttgatttgc

SEQ ID NO: 11040 - DNA, 2428 bp, Vitis vinifera
  Intron number 1 from transcript GSVIVT01030113001 (locus G SVIVG01030113001) derived from phytozome v7.0 (chr-ID chr1 2; pos 9975619 to 9978046)
tcggtacggacttcaatcctcatctgtctctctactcttttgctcttcaatttctatattcatcttcatgtgtttttatttttcttttgatttatggtattgttgagccctaagaacttggatttttttatcagttgtgtttttttatgcctgatatggttaagggttttggattgttgttgattggttttgctctttcaggggtttgtccgaaatgaatgtatggcttgcttactggtcgactgtttgtttggatatttattatgtgtggtggatttactagttatggaatggaaatggggtgcgatttttttggcagagattttatccaagttttgggggtttgggggttggtgaatgagattgattgggtgatggatgtatgtcttttgtgggtcaaagtgttctattttgttggaggtggagggagagctgataataaggaaatagtttctgcccagtttatggcctggagatagggtgtacctgttagcgaaattttatcaaaatttggggtttttgggtgggtgaatgagattatgtactgggtgtcttttgtgggtcaaagtgtttaattttgttggaggtggggagagagctaatagtaaaggctacagttctgcccagtttagggcatggaaaggggtggtaattgttttgcaaatttttattaaaatttgggtgattttagggcagctgcccaaggttcagtgttggatgtctcttgtgggtgaaagggtttaatattgttggaggtcgaaggagggctaataatgggtgctacacttgctagatgtgtgatgttctattttttcttaaatatatatatatatatatatatatatatatattgtaacctgatttatttctagtgtctccattttcattattaactgttgttggaacattttgaggagggtttttgtgttattgagagtgcctgttgggtggcctgtcaagatatagctacagtttctagttattgatgggcattggtagtttcttttaagggaagatcatgggtttgtgatggagagaaatttatggtgagaacccaaagaaaaatgaaggcccgtgtaaccatcaatgaatgaaaaagggcccatgattttcatgagtgccatgctgctcagaagctcatgtggtcatcaaattacaaagaagccccaaggtactagttattctcttatagtttctttcaacattgaaatattggagtggaggaggaggaggaggaggaggaggaaggaaatgagtctcctgaattcagtttagttgccaatttatttgatttcagctcatccaggcatcaaaatcacatggtgatagaaattaatacagcgtattttctggtggaatgtcatatattattaattgcttttaccatcaactagtttctatcaacattttactaagcagctagaaatatcttagttttttcacagcttttcggtcaggttcactgatcctaaaggttcttggaacttgagtgcatgccatctggctgcatccagctcccagtgtattggatcttctccaggttgtatatcagttctgtttcataagctgtactttgaaacagtagccagcacttttaccacacattatttcgtaatttgtacccctagtctgaaataaagatcagtttgacccacttgtccaggattaatcatccttcttttccttatttagaaggtgattacccctttaaatataacagaatcggttcttcttctgtcatcatgaacttctcattctctatagaatcttcttaagccagcctttctgggcatttattttgttttatcaggctctgtttactgatttcgagatgctatcatttgtggttgcaaccttagtaattacaaacttatgtgatgacctgtagtattacattgagctgcaggtttggtacaagataattctttaacgtatgcccatatgtatttgttaccataaaaaacgtggctgagttcccacctatagtaagaggctgattgagtctgatcaaactgttcttgacttacaaggatccaactttgattttctacatatcacaacctttttcatgttgtcactattggaaacatccaataatctcctgagtgaaatgaggcatactaagtctataaatttattgttatgcatatctaattgaactgtacttgaaacatgaccttgggcctaccatgtttgctttctttagcatggaagcatcaaaactcaggatacaggagtgtatgaaattttcacctgctataaagttctatgcatttttactttgtcaatggaccatatatatggaaattcgttcttaatttttttttaattgtggctgttttctgccttaagacaactacaagaatcctcaagaaaatgttttgtttccacaggaaaaaggtcaaccattaccaaaatttggtgactg

SEQ ID NO: 11041 - DNA, 20508 bp, Vitis vinifera
  Intron number 9 from transcript GSVIVT01027931001 (locus G SVIVG01027931001) derived from phytozome v7.0 (chr-ID chr5 ; pos 9654539 to 9675046)
attgctgcatacatctctgagacgcaactcctcaggtttgtacatgattctttcttttattttatgtactatatgacatgttttgggaacaaggtaacataccttatgacatatttaagtgctataagtttgttttacatgacttgctgacaattcttcctgtgaatattctatattaactatttttagtctcttttcttagttttatatgacattacctcttaaatagacctaatatttctgtagctctttatctttttcctatcttcttctttgccatcatatatgaacgaattctctataagctgatggattttttttttttgatagactataacctgatggatttcattgtctccataatctcattgatgtgtgaactacccatttcttggatttcgttgtctcttataatctcattgatgtgttgaccacccatttcttctatcttagtcatgttctcttctcctccaccttagaaccttaatttctattcaatgatttcactacttttatatcatttttacttcatatttatctgtcaccttccttgatgagaaagtttggtcattcacttgcattcatttgttttggatttctcttcttctggacactcgcattctttcccgtggaccaattttattttgaaggtcaaaccaaggtttctgcatagtcggttgctaacaaaaagttaatgctaatgacatgttacaattcagatgcctcatggagtttacaatcaaagtggcacttcatatgtatgggttgtggagaaattattgatcatttatttcttggctgcccaatggccttgattgttacaccccaaagtctaaaaccatggtttaacataatatcaaggatctacccataattttagaacttgaagtgtgaattaaagtaaagagtattgatgtttgtggttcaattttctcatttaaatgtctttgagacattgctctttgggttggaaaaaatttcaagtttgtcctatattgacttagttgcgctgaaatttcaccaagtatgagaaaaagatcatttttaaaagtttctcaatttgagataaaaagatggcgtattttgttgatttcaagttggtagaaaaaactaaataaattttgagattttttgtcttttataacttttcttgtgcaagctcttttcatgaatttttttttaataaaagtggtcattttatagctgaaactagaaaattgcattttgatttccttggaatatgtccttgaaagtatttttattgaatttgaatagggtattgtgatatttgcttagtaaactttaatgtaaatggagaaataaattacaaaagtaaaatgaggacatttaattcattgtttacaacgtaaataccaagctgatgttgtctgagaatgatcaggaagagctatgtcagatggaggtagctgaggaaattggcataggtttgcacaggcctgcttgcataagtttgagggtttgggttatgcttcactttgcataggcttgtgcaaggaggtttgcttaggaacccctatccaagttcaggttgcttaggttcttgaggggtttgcgtcatgacacttgctcaagggcatgcgtggttcaatctgctcagaggtttgtgcaaggaaaagctacttaggacctatgcaagttgacttgcttagaggtgtgcacgaccttgcatagacaacctccatccacctttgcacaagtttaattttctcttcattttcaatgccaaatttatttcttcttcattctaaaactcacttgcaactcagaacaagtttgttgaagatatagacatgatccacaaattttaaaatcatttaccatggtcacatttgaaattttgttgatctacccatagttgtgaaatgcgtgactaggctcagggtggcgcgacgccacccttcggtgcctcgcctaaaggcaggcaacgccctttcatgaaggtgccgcttaggcgcgcaaggcgcgacgcggtcgcctgactcgccttcggtcaggtacgccctctaacccctcctccttcttcttctttttcttcagtccgtcgggctgcagagggttagggtgtgccctattttttttttactttgtgggtccaaaacaacgtcgttttggcacttcttaattttaaaaggaacaggccaaaacgacgtcgttttggagcctgttcctttttttttttttaaaaaggccaaaacgacgctgttttgaccctgttttcctttccaacccctttttctggtattttttaacttgacaccactcccgatcgtgccctagcctcagccgtgcagtggagaagtgaagaagaagaagaagaagaggaaaaataggggaaaaataagagaaaaatagagggaaaatagtcacgaatcttccgttacgcgcgcctttcacaactatgattagcaatatggatttggatttgtttttatgcttggagttctttatttttatgttttttgttgattaaattgaagttttggatgatgttcgatgatttatgtgtttaggacaaataaatgattgttaaatttgattatattatataaaaatatatatataaattagggtgcgcctcactttactaaagcccgcaccttaggtgcgctttgcacctcaggctccaggactactttgcgccttggtgcgccttaagccttttaaaactatggatctaccaaaataaagtctttttataagtgatgaaggagccacttctcctgtactcgtttttgcaaatgctcactctcttcccccacaagttagtttctgggagattagattatgaatttcaatcttgcttccattttcccaaatcaaaatattgccataccatctaaataatgaagtccattctacataaattttacatccacattacaaaatagtctgagccttgcctaacttcgcttaggctttgtttatattgcctcgttgctataaaacaagactaatcccgtgtcttagcatattacaatgtccaaacatgatttgcataatggccacttatcacagtacttagcaaaaagcatccatcccaacaattctaatataacatatcatgcatcctggttttcagcccttgttgcctcatctactttaactgtaaaacactttggaaaaagggtgagcttcatgggttagtagatgatgattccattttaaaatttagacaagaatttaagcaatgataatacatagttgacaacatgtatacattttctggtaattcagaacaagaacaatcatatagcccaacaagccataccacctttcaaatacctgaaccattgatccaactaaactttcccagcttgtacacctgtattacagggactctcacccaaagacatgattatgccccctatgaattccaaaaaggatctttccggagtatgttttagttttccaccatagggtattttgcctttcttcttttagggattttcacctagggactgttcccccttattatttgacaaggctgcctaatgtggtgcctttactccattttcctcagtgccttgagaaccttgccatgttgctcatgctacatccaaggttagtttccaagcataacagagtacatatctctgtcatcaacaacaaatttcaacatttcagtcaatatcacttttatttaggacaatatatgcttaaaatttaggggttttcaataaaaaggcataattccaagctagcagttgactcaccttttacctcttgtcatatttcttttgatttaggtatcctaaattctcaattcaattctctatttgcacatgttccagccactttttaaaggattctgctgttctgccgccgccaaatggctacagtaacagccacttatggagtcaaaagtttggtaaattctcagctactatcttcttcaaatttctaagagcattaattctacttaaaaaaaaaaatcaaaatcttccccttaattaactaatcaatctactaattgagtctttaatcaagtaaaagacttattaaatcagtattgcatttttatatagatttaggttattacattgatttcttggcacaaattatttattttagatggtgaagactaactgaccatttcctacaattattgcttctaggttttggaggcagtcgtgggagtagagttctatggtgggtgaccatacttgatactctttgggtgatatgattatagagaaattttaggatctttaaggatagaagtagaccaatggagttgctatggactagatcttctatctcattcttttaggtttttgtctctttcgtgtttcatgggatatcaatgagcatgatttgtttggattggagattgcctgctcttcctgtaagagcctggtgtactctccttcagggtggaaattctctcgtgcaggtttactttaatcttaactttgacggttgctctgtgggtaatccagaatgtcttgggattgatcgtctttcaggaccacaagaatcttgtggttgtgagcctaaaggccttattttctgttgaagaatagtgagactgagatcctttctttattggaaggcttgatcctggtgtggtcattgagctaaataatatagtagttcagggagatttgaccgtggtgataagttagtctttcagtgtaagaaaggacagtggacatagatccctggggcttgtaatactgttagcctgactacaactttgaggtgctccatctcttagattcctcaaaggccaaattttattgtagataaatcagctaagcatgggctctctcatgtattgtgcattgtggggggattgtttatttatttatttatctatctatttatttatggctgtgatcacaaacaaacctttgtggaggattttttgccaccttgacttgtactctttggtgatgtatttttctttctttattttctccttttggatttctgtatctttcttctcatctttttttatgtacaatttttttttttgattggaaaggacacaaagatttattgatagataaaaataagtacaaaagaaggatgaggaatcctcctgccaaagaaagctaaactatagaaaaatacactaaaaaacaagcaaacactctaaaaagaccactccttatggagtacacactgttatccaatcaagttgtatcacattaaggggagtctccttaaaaaccttggaacaataagcccaaagagaagcaaggaaaacaatagagttccaaagatattctgaattcttatcctcaaaaatcctcgcatttctttcccaccacacaatccgaataagagcgatgtttgcagcttgccacaaggctatccccctcttagatgaaccaaatccattaaatttgatgtacatcatgtcaaggatgctccttggggggacccaatccatcttagctaactgaaataacctgtgccacaacccaatcatcaaggagcaatgaagaaaaatatgatcagctgattccccatgcttcatgcacagaatacaaatatccagattaagggctttgtagggtcttctcacttgtagcatgtcattagtatttaccttcttgtgtgccactaaccagatgaaggactgcactttgaaaggaacttgagaattccaaacgaacttagaaggaaaaacctgaggagatccagaaaattgggataaagctagaaagaaagatttaactgaaaaatgccctgaagaagataagggccaaaatctggcatttggaaccgaaggagataaatgcaatccatcgagagatcgcatgaggccttctaagtcctctatctcagaatttgacaggttacgacggaaatttaaattccaagagaaaggacgagtaggaccgagaactgaagaaataggtatgtttttatccaagactactctaaatagacttggatattgggatcccaaaggttggtccccccaccacaaatcttcccagaaccgaattatttccccatttcctaccacaaaccgagtaaacgaggaaaactcctaaaagacttgagtaatagccttccaagaatagcgatgtgaccatctgactaatgtgttagcatcccaaccattggagtgtgaaccatagatgcttagtatgatctgatgccatagagctgaaccctctctagggtacctccacagccatttccctaaaaaagcgagattcctcagagaaatattcccaaaacccaaaccccctatttccttcggtttacacacgacatcccacctgactaaatgatcccttttgccttccccaatccctgaccataaaaaatccctctgcaacctctcgatttttgcagcgactgaagcgggtaacttaaataaagaaagaaagtaacagggcatatgggtaaggcaagattggatgagagttatcctccctccgaaggataggtatgccttttgccatccatctaatcttcttgaaattctctcaatcacaggatcccaaaatccacctgccctggggttcccacccaaaggaagacccagatagagtataggccagccagaagccttacattcaagcgtctcagccaatcttgaaatatgagcttgatccaaattgataccataaatattactcttgtctagattgaccttaagcccagaaatatgcccaaatgctaacaaaagactcttgagagtctgcaagtcttcctccctagtgttagaaaagaagatggtgtcatcggcaaattgcaaatgagataccctagttctgtttctacccaccctgaaaccctccaacatgtttctctcctctgctctcaaaagcatcctactcaatacatctgctactaaagtaaacaaagggggataaagggtcaccttgtcttaatcctctcgatgccttaacccaacctttagtactaccattcaccaatactgcataagataccgaggacaaacatccactcatccatttcctccatttaggactgaaccccttcttctccaacacttgatctaaaaaatcccaccttacgtgatcgtaagccttttcaaagtcaattttaaagacgacaccttcctcccctaatcgtcttctctcatccactatctcatttgctatgagaaccgcatccattattagtctcccttgaacaaaagcgccttgagtagaatggatggtttcatgtaaaacccctcttagacgccctgagagcactttgacttttatcttacagagactagtgatcaaactaatgggtctaaaatctgagattttctttgtcgtactctttttaggcagaagaacaatgaaagaggcattagtaatgggtctaaaatctgagattttctttgtcgtactctttttgggcagaagaacaatgaaagaggcattagtgctttgattgataactccactcctatgaaattttgcgaacactctcactaaatcctccttaatcacatcccaacagtcttggaatactgcaatagtaaagccatcaggccccggagccttgtccctatccatctaaaaaatggccttagaaatctcttcttcagtgaaaggggcatccaaacttatcgcactctcttccgaaataggggaccaatctaatccttcaatactccaagactctcctataggactcgcgtagagtttttcaaagtaaagtaagatctcctctgtgattctctctgcattattcaacactaagcccctttcattttccaatgccttgatgtatttcctatttcgcctaccattagccactttatgaaaaaacttagagttgcaatccccttccttaacccatttcaccctagctttttgtctccaatggatttcctccctcaaaattaattcctctagctccccttttcttaaggctctttgatctaacaattcagaggtgagacccccatcctgctcaatggcatcaaagttagctaaatccttgaggatacttttttttcttttcattaagctctccaaaagaaagcttattccattccttcaatttggctttaacaaattgtaatctcctcatgaacttgtggccttcccatccgtttccttgaaaacccctccaccaatttctaaagttctccttgaaactaggatgttgcagccacatgttctcaaatctaaaaggtgttgggccccacatgaacgggttggtatccaaagcaattggccaatgatctgaggtccttctgataagggtttcttgaatgccttggggaaagagctgtccccactcatttgagtaaagaaaacggtctaatctcttacacacgggggactcttgcatatttgaccaagtgaatgatgcgttccgaagaggtggatcaagcaattcacattctctaataaaactatcaaagtccctcatgcttgaagttagcctagagccccccaatttttctgaacttctccttatgacattaaaatcaccgcccacacaccacaacggaaaagttagaccataaatgtcataaagttccacccaagaatccttcctaagtgagggactatttgaaccataaactgcagaaatccaaagaggtccacagccctccaaggcgaacttgaccgataccgagaaagagcctaataccacctcctccttgcacaacttttttgagtcccaaatgaacaaaatccctcctgaagccccacacgccgggagaataacccaatccttatttctgaccgtccagacactgcccactagccttctgttacacttctccttttttgtttcctgaatcatcacaacatccggattctctaacctaaggaaatctttaatcacccttcgcttattacttgaacccaaacccctaacattccaactgataattttcatggaaaaacactcaggccctaaccctccaaatcaaatccacctggattcaaacgcctatgggcctctattcttcctcctagagtacaccttaatgtccagggagcatagaacctctcgcactttagccattttcctaggggacaggccatcgataagaaagtcttccggtggggatgctgcattaacccccggactgcctgacatcaggttagaagacttcccaggggtagatctcttggacatctggttataaacaactctttgattctcctcctcaacatggacagggatgccaacaatatttaaggtgccaacatcgcctatttcaggaaaaattttaaatttaccttgatttatcgaaggagactgggaaagaaattctgaatttgggagatgaggactagagggactcggtagattcttttccagattacagaagggagaggaataaggctcgggtggctgagaagaaaaaggctggctttcctctaagttttccactctcaaaatttcacaatttccttccaaaatgatttcattacctctggttcttggaatagaaggtgactccgtgactgaagaaccacaaggatcgtaccccgctcggcctgtaaatcctcctttgtcatcttcgagttgggattttcgcgagtccatctctcctcttgacgtcaaggtctcttccttcgaccagctgttgcatatccttggcagaagacaacggaagatgggactctctctgatacctcgtatctgttgagatctcatcctgccatccacttccagattgtggacttcgctaagtggcgctgcgctccgtaggggaaaaggctcgctgctactccgttgtccgtgacggcgagccgcgcttggaaggaagagtttggaccacatcttccttgaatccatcgtcttttccccttgcgtgaagtcttccatctgaaacattggagctttcccctttctcgctgcgctttcttcctctcgagacctacctttcatgccagaggacttcgatcctcctagagattggcccaaccccgacaagcctattgaccttcagcccacagttcgacgcccataactaacatcttctatctttgaaggtgggctagggttggataaagtttgggcctgtaactcatcggcctgaccatcctctccatgtatttcctcgacgtcggccctctcatcgcctgaacgaggatgcgtggttgcttttgcagaggagcccactcgctggagagaagaaggggatgccgctgcgtcaagggcttgaggggcgtttgggccagcgtgaagcccatgactccttctccctctttgggcccttattggatgggctttagtagaagtctcaggcactatgggcccaagaatgttttcttctactaagcccaatctgctcccttcccatcctttctcccttttggccgccatacttgtacttgagcatcgataacgtgcctggggaagaagctccctactgcagcacttattacccctgatactacctcgtagcccctctgcaagttttgtcgtctgagagacgcaacccccctctttcaaccactcgtacttgcagtgggttgtctcggacgtgacagtgtcgtcttcaccctcttctccgatgactgaaactgctattgtatgtttccaggccccgtcttccacctcaagcaatgctgggagcacgacattaggatgcatctccacccacagcttcaccttcgtcaagtccaacagcttcacggcttcccttgctaccttcgtcaccctcccccacttcttcaagatgaatttcagctggtcttcctcccacaagtgaaaaggaaggcctttcaactctaaccaaccccttctgaattttccaggaataatcatattttctcttagcgaccatcttcttaggagaataggccttcctttcactaaaagtctctcctgctcttggaaccattttgctcttcctgctgtactcacaaagaaacaccccttgaaggcggaaatgggatttatagacaccatacctttcacacccatcatcctcgcaatggccttgccttcatgagtccagtcttggactttttctttgcattcacatattacggctctggcccattttccagctgatactggaactccactcctaattccatcctctgcaaccacctctgcgtatgaccgaccacctctatatatgcttttactcatctgagtattgccaaacgtcttcttcaactcttctccgacttgatcagaataatcttgcactgaaagaatcgccctcctaaggactttccatccattacctttatcaccctcagggatgacaagaagtagaggtttccttcttgtagcaatctcggtgattttcatgaatcgccctctattgttgaagcaaatctccatcaaatgaatcttattctcgcccttgaactttcatgtaaatcccctggtattctccaactccacagctttcttcaaatgctccgttaaccaatccacctcctcctttccaaatcctactgatacaacaaaaccacggctcctttctattattgatacccaagttccaccatacgatccttcaaactttacctgaaaatactttttttccacttcaaacttttcaactttgcacttcatcatgcctcctgatgaacccagaccagtattaggaaaaacctctgatcaagttgacaccatgatccttgtgcggaataaatccaactagccttaacaagtcttgcaaaagtacacgtagtaagatgttatggcagttggcttttttttatgtacaatttcatttacctaaaactatcaccaaagcatttcgccacttaaaactttattttttcctttgataacactgattatgccatgcagtctacctcaatcatttgacgttgagaacactcctgcagtcaagaaagggatggaaactcttaaatactgggtttttggaagcatctataccaatttactgactagtcagagattgttgcattttaacattggactcattaatttgaaaaatgtgttgtgagaaattctaaaaaactgtctttctcatttacgtagaaaaaaaatggtacatatttatctagtgacataatcctatttaggaaattcaaaatttaaattggaaattgactctaacattaaaaactagctctaacaacccctataaatgaggaacactcctaatagacaaaaagtttcacttgtcacatctgtatgataattttctaaattaaagggcctgattttcatcaacactcctccttaagctagtgaatagagattagccattccccgcttgcttgttattccttgaaacattgaattgacttgattagaatatctacaaggtgctgccttgttgatatgtaaggtgtgtggattagaccactttccaacttcactttaatgaaatgtctatccacctccacgggcttcattggattgtgagctatgttgatagttgactttctttctcaatataatctcataggatacatacacttgactttgagatcattgagaataatcttaagccaaagtaattcacaaaccccgtgtgccattactctgaattttgcttctacacttgatcttgctactacgggttgtttcttacttctctaagtcactaaggccttgtttgaaaattgttttcaagaacaattttttgttttttagaacaaaaaaactgaaaaacatgtttggcaatcagaaattgttttctgtttctttccgttctctattattataaaaagaaaacaaggtgtttttagagaatttcttttagttgttttccgttgttttttgagagctgttttaaagaataattatacaaacatatataatgattaaaaataaagctatgtatataaaaattatttttaaaacatatttaaaaatattaaaaacaggttaaaaacaattttagattcccaaacaaacttttgtttaataaaacattatagaacagttttctaaaacagtttttaaaaactattttttcaaaactgttttaaaaaacaattaccaaaagacctaagtttcctccaaaaaatgtacaacaacccgttgttgatctcctatccatgatcgatcttgcgtagtttgcatctgtgtaggcttctaggctcaattccatacccttctcaaacaataacccttttcttgaggttcccttgagataatgcagaattcaatacattgcttgaagatgtacttctttcggattatgcatgaattgacccacaacactctcagcatatgcaaggtctggtcttgtgtgagaggtaaattagcctgccaacaagccttcgacacatgcctcgatcaaccatcataccatctatttcccctcttagcttgtgatttggttttataggggtgtttgttggcttacaactcaatgtccctgtcccatttggaagatcagttacatatttttgttaagaaataaagataccttccttcaaatatgcaaccttgattcctaggaaacattttaatttcccaagttcctttatttcaaactcccttgctagatatcattgaaggtattacctttcctttggatcatttcctatcacaattatatcatccacatacaccaataatacagtaacgtcccctaaatctgtatgttctataaatagtctatggtctccttaactttgcttggtaattgcttcaacccatataacactttcttcgttttacatgattttctattttagaaattcattccaaaacctggtggaacttccatatatacctcctcatctaaatccccatgcaaaaaggcattcttgacatcaaattgttgtaaggtccaccctaagttagctgccaacgataatagcaccgtcacaatgttcattttcgccataggtgaaaatttctctagataatcaaccccataggtttgtggatctcctttggccactaatcttgcattataccattctaaagtgccatcgaccttatacttgatggtgaacacccacttatagccaaccgctctcttcccttttggctactctacaatctcctatgttccatttttctccaatgcctccatttccactttcatggtttgtctgcaattctcattactaagtgcctcacttaaggttttagggatgactatggtatgtaattgggtaagaaaactcttatgggcttggaaaatttattaaagatcacaaaaagagacgttggatattgggtacaagtcctagtacctttcctaatggcaatgggtaagtgaaggtcattgttgtttttagaatgaattaggcttataggagggacaaattcattacttaacactggtttggatgattgagtgagcacttggttggaaattggctcttttcttctcatgtaaacctgtagtggttttatcacaatgggcaccgatctaattgatgaagagattgactcagtttctttggctgggttaggcatatttggattggattgatatggggtcatctcagttgaattgggcagatttgggtttggactgatcataggtaattttggctggactggacagtgtttcagctgaagggaaagtgattagagttgagttcaagtagccatgaatccttatcttccatgcttggtttttttccctgaagagaaggatgtgaaaaatagctttgtttttcaacaaaggttacatccatagagacaacaaatttttttggttggtggacggtagcatttgtatccttttttttgtagaagaatacctgacaaagatacatttcaaagctcttggatcaagtttactatgattgggagcatgaacgtgcataaaatatacacacccaaaagtccttggagttgaagtttttgaaataggatacttgggatgaaaagtggagaatacttcaattgagcttttgaaaccaagcactctagatagatttcgattattcaagtgtgtagccataaggagtgccttggcccaaaaagattttggtacatgtttgtgaaataataaggctcgtgtgattgcaagaagatgccaattttttcctttcagccacatcatttttttggggtgtgtcaacacatgatgactcatgaatgattcctttgtgaaaatgaggtgataaagtttgattgaaatattcccttgcattattggatcttactcttttaatacaaatcccaaattgattttttatcatgttattgaatatgggaaaaacattgcttactttagacttttgttttaaaagaaaaatccaagacattcttttgcaatcatcgataaaggaaacaaaccatctagctctggatatatttggaactctagctggaccccaaatattgctatgtaccaaggtaaatggaatagaacactttttattgcttaaaggaaaagaaacacgatgatgcttggcaaattcacaaacatcacaatgaaaactatctacatcaataaacttaaataacaaagggaacattgtcctaagcacgctaaaggatggatgtccaaggtggaagtgatggagccatatttgctccttattggaaattgaagattgggtcagaacgaataaagatgatcggtacacattgttcaacttttcacttgatctctcaagatagtaaagtctgtctctttcctcagcatgcccaatcatcttcctcgtggtctgttcttgaaaaatacgagtgaaaaaaaaaaggtcactttgcaatttaggtctttgatgagtttatggattgaaacaagatttgtcgacaattttggcacatggagtacattctgtagaacaagtgatgatgacaagttaatttttccttgaccagtagctgtggttaaagaactatctgcaatagctattttcttgctactaggacatgatttatatgtggagaattaatgagaagaacaggccatatggtttgtggctcttgagtcgatgacccaagagtccaaaaaggataaacttgaggcacttagtgcatgagatagagaagacttacttgtttctgcaagggagcacataccagtgggttttccaagagatcccaacaaatttctcagattttcaaatttttaaattcaccaagttctccattaatagaactcattgtgccttggggaggtcgatcaccattcacaaaattagcctatccacactgctgccagcctttcacaccaccaccccaattgaggccctatggtttatcatgacatgctttcttgcagtatgagcaccacggttcttctttgttaaagttcttcattgactcctgtcttccttgctccatgttaacattttgattcataccatttagctcgactcctccacccgatttctttacaatcatggatgatccatccactagttgtggttcaaccatcacccatgctttctttgacgcagataatagaaaacacttcattaattgatggtaagacttctttcctgagaacttgaaccagaacttgatcaaattctacattaagtctggctaaaaattcaaaaattctctccctttcaacaaatttttgaagcatagcagagtctttgctgcacttcatttgaatgttttgataatagtctacctcttgccatggattcttcatcacattgtgatattcaataactgactgagtaccctgttttgtagttgatattttaaccttcaattcataaatttttttttttttttttgattggaaccttcaattcataaattagggcaacatcctgtattttttagtatgttttctgaacagtttcccaaatttcatgagcagttgtcaaaaacatacatgttctgctgatttcggctaacattgaattctataaccatcacatagtcaaagaattctcttcgtcccaaacagtgaatcttggatctttaggtttcaataactaagtttcctttgcccttaaaaaacgtcctcacttgttgcgaccactgtatataatttcttcctgttaagcggtatgcagtctgaaaattttgaaattctccagtcatggttctaggatgcttccatgggggattctgtaggattgtttgatggggctggttgatgtctgacatatcgtgcattgacaaattcagaaacagatcaacaaaatgtagaaaaaaaaaattagagaggtaattaaggtcaaagaatgagtttagacaggttatcaatgacaatgaaggctgaatatttcccagagagcaaactgctctgataccatgttgtgagaaattctaaaaacctgtctttctcattcaagtgggaaaaaaatggtacatatttatctagttacataacactatttaggaaattcaaaatttaagacttatcacagctgtatgataacttcctaaattaaaggacccgattttcttcaacaagaagggtgataatgacgggaagaggggtacttcacgaaactatccattctactcaaggcatttttgttcaggggagacaaatttggatgcagttctcatagccaatgagacagtggatgagaaaagacgatcaggggaggaaggagttgtcttcaaaattggctttgaaaaggcttacgaccatgtgagttggggttgggattttttggatcatttgttggagaagaaggggtttagtcctagatggaggaaatggatgagaggctgtttgtccacagtatcttttgcagtcctagtgaatgaaaactctaaagggtgggtcaaggcatctagaggtttaagacaaggagaccctttatccccttttttgttcactttagttgcagatgtactgaacaagatgttattgagagcagaggaaagaaatgccttggagggtttcaggatgggtaggaacagaacaagggtgtcccatttacaatttgcaatgataccattttcttttctagcactcgagaggaggatatgctgaccctcaagagtgttttgctagtgtttgggcatatttctcggctgaaggttaaccttgacaaaagtaatatttatggcattaatcttgaatagaatcatctttctaggttggacgagttgcttgattgcaaggcttctagttgacctatactctacttgggtcttcctctgggagagaatcccaaggctcgtggcttttgggatctagtgattgagaggatcttgtgaagattagatgggtggcaaaagacgtatttatcttttggaggcagaataactctcattcaatcttgcctcacccatataccttgttacttcctttccttgtttaagatttctgcctcagtggcagtaaaaattgagagattgcaaagagattttttatggtcagcggttgggggaggcaaaagagatcatcttgttagttgggatgtagtgtgtaatccgaaggcaaaagggggattgggatttgggaagatttctataaggaattttgctctcttagggaaatggttgtggaggtgccctagggagggttcagctctgtggcatcaggttattttaagcatttatggatcacactccaatggttgggatgctaacattatagtcagatggtcacatcattgtccttggaaggctactgcacaagtctcccaagagttttccaagtttactcagtttgtggtaggagatggggaaagaattcggttctaggaagacttgtggtggggggaccaacctttgggagttcaatatccaagactatttagagtagttacggataaaaattttcctatttctttaattctcggctttactcgccccttctcttggaactttaacttttgccataacctttccgattccgagatagaagatttaggaggcctcatgcagtctcttgatcgtctacatttatcactttcagttttagatatgagatcctggtctttatctccttcaggactttttatagtcaaatctttatttctttccttatcccaattttctggttttcctctagttttccctactaagttcgtttggaattctcaagtccctttcaaagtcaagtcctttgtctagttagtggcacataagaaggtaaatactaatgacttgttacggtcgagaagaccctacaaaccactttgtcctgatatttgtaagttgtgcatgaagcatgaagaatcagtagatcatttttttctccattgctctttgacgttggggttgtggcatagattatttcagttagccaagacagattgagtccccccgaggagcatctttgacatgttgtctaccaattttaatggttttggattttctaagagcgattgttttatggcaagctgcgtgcatcgctttaatttgggtagtgtggcgggaaagaaatgcaagggtttttgaggataaagcaaggaattcagagaacctttgggattctattcatttccttgcttctctttaggctttttgttccaaggtttttaaggggattccccttaacgtgttacaacttgattggttagcggtgtgtaattccgatgggttggtctaatttagagagtttgcttgtttttactttgtattttcttgtatttgattccttatagttttgtttttctttggtgggaggattcctcatccttctcttgtacttcctttttatcaatatatccctttgtcgtttcctatcaaaaaaaaaaaaaaaataatgagagattttcttatgtgggcaaaagtgctttaggagaagatatgactgcttgatgctctttctttaggtttaatatcagcacctaaatcattttctagatgctctcccatggaactacggagttctaaatccttaatgaatttgacacatacctcttattttctgaccagcttgacccatataggatgtcatcatcattcattacatcttcttcaaacactgtccagatcaaatattcaatttattgcttcttattctttgtgatttaggctatttttgattccttgaaagtactaaagaaaggaaaagaaaatgcgaaagaaaatgattttctcgtgtttggtttactatggaaaatacaaaagaaagtcaaagttaattaaaattaattagaaacttatgcattgcaaattatttaatcttcatgtagaagaagaaaagtgagtgaaatgaatttgaagaaacgtgtaaaaataatttattcactttaaatcaatttttttatttttctttacctttccttttcctctatttttcttcttctttttttttttctttccttttcattttccttaaaagtttccaagaaccaaatgtagggttaatatccaagtctattgtggcacctattcttttgtttagttttcacttcctcttagtcatcattttgtgttgaaggatgcttcatccttcctctctagattatttttctctcaatatatatcctgtttttttttttttttgagataaagaggtatttattgtagtttaaacatttaagcctttctctatttgtctttagtgatccatatattcttttcttcattgttagaatgattattgtttgctttatcatttcatttcaacgagaatggttctaggtttcttgttgatgccagtcagtgtatctgtttcttcactataatagaggcttcttaacaggtacttgtcgttggggagaatttggtgagggagga

SEQ ID NO: 11042 - DNA, 12271 bp, Vitis vinifera
  Intron number 5 from transcript GSVIVT01009302001 (locus G SVIVG01009302001) derived from phytozome v7.0 (chr-ID chr1 8; pos 7111754 to 7124024)
ctggccaacagccttctgttactgctgacattccagtaagcgttttcttcatatttcctacaattctatcttcttgttgtgctcctttgttgattttgatctgaatcatctctagacaaaagtcttctattcatgcaataagtcctaaaatttctctactagcactattttataagatggcacattgttgtatctccatttttttatttcccaagatgactcttgcatgaccagctaccatatttccttatatatatatgtatgtatgtatgtatgtatgtatgtatatatgtatatatatatattttaaatttgtgaatttaaattttgcatattatagatggagttgacctttattctgctgtaatcttagttgaagttggtagaatttttttgtcacaacaatattctcatcgtagattaaactgtttgtttaatgatctaagacacccttggttggccataaagacttctcatagaataaggctagccaaaaaacagtagattctatcactacaaccccttaagttattatgtgggaaacagataaggttggaacactttcttcagaaggagtttacttgctattgtgcttggttttcaagcatgagaccatccaaattatgatttactgaaaggcccattgatgtgaattcaatgtctattttaaatttagttgattgtttgggttctagataataagaaggaagttttttttcaattgttgtttggtgctccttgtatctttcctgtgagccttaatgcatcctttttgatttgcgatgttaatatagatatttgtttgcctgtcaaaaaacgttaacaaaaacaaaaaaaaaaaacgttatgactgtaccaaaagtgcaattattgtagaatttttctacagagatcatgttaatgataacattttacatgtgaaagccttagcactgactttgcttctattttttttttttttgataggcaaacaaaaaccatattaatagcgcctaacaaaaagcatatcaaagtacataggatgtatataaaggacatcaagaggtgaagtaagaagggaggagacataaaaaacattaagtcccttcatgaagactctaattaatctataaaatccatcatggacctccatccatgtacctcttcacccacagcacgatattacaaaaaacgtggatttaagtgtttgatatggcattgctttgctttcgaatgatttccgtttcccctttcataaagaccgaaacacgtacaacaggataaccctccaaacttttttcccccatacaaaagaagcatgctgccctaagagggtttcttttactgaatgcggcatcattcttgcaaccttgaacagggaaaacaccaaatttcataagaccctagctctgatacttatcaaaaaaaagaaaaaaaaagaccctagctctgatacaatgcagaaggatgggattaactaactcttcatcttctttacaaagaaaagattggttcacccagggtatccttacctttgcagtagggccgaagtcaaaacctttcccaagaagctttctaagcaaaaatctccacttttgctagagtcatcaaatttcaaatagctcccattggaaatgtttcttgccttgagagagtgtagaaggatttgactaataatttacccttctttgcatccattcatgccattatattttcgtaaattcagcacacctctcctgaaccttgtcaagtgtcaaagttccaattgccatggatagtaggtactcataattagtaacccatacttctcctttgctgacaacctctgagttttcttgagcttcttctgtactatcagtaactcctgcaacaacaattttgactcttggatttctttgggaaaggagtgaaacctttctgatgcaactcatggaaaaaatcaactgtttttctgttgctgagaataatgttctctccttttacaaccacaaacataaaacctaaatttgttttctagtttcaacaacttcatttcaagattgtccaacagaactaactttcttttctcatgaaattcaagtcttatgtgaaagaactcctctagaatctgctcaagtgttacgtatttcgtgatggtgcaatttgagtcaaacaggtgcatgtgttacttctggagattttagtggtgagcttgaatttatgcaaccatccctattgctatttgattttagtgctctttcatttttctcctttgctatggttttagacataggggagcaactcttcaaactttcttcttcttttggggtccatgctagctcaagggggcattccatatcaaggagcgaattatctactctatttcaaagagagtgtaaatcatttggccacaaatgactactttcaagcggtgaaggaggacgtgatcaatattttctttcttctcctttactcatatagcatctattcgacatattttgtcctcttgttttgagttgatctaatgtcaatatccatacttaaatggcttccgaagaaaaaagccaactcttgatggaaccttatttttgatagatatagaaaaagatatattaataagagacgccaaaagagtgactcaaggtatataatacctatacaccccttgccaaaacaataaaaagaggaaaaggaataaccaaacagaaggggcttaaacaacctcaacaagagcccaaccaatcaacaaaactaaggttagaagataattatctataaacaactttgtctttagccaaagagagtgaacacaagaactttttagtctctggattgaaaacatgtcatcattgaaggccattctattctttgcattccacactattcaaaagatgtgtaagggagctgttctccaaaccttcttatgttttttgcctacaaaagaaccatgccaaccgagtagagtctctttgatcaacgaaggaagcacccaagagactgggacaaagaaaagagcagctcccataaaacctttattttgacatagtgaataagaaggtgatctatggtctcttcattctcatggcacataaaacatctatttgctagggctcatcctcttttttgaactagatctaaggttaaagctttaccccacgttacctcccaagcaaaaaagctaatcttaggctacacccaggagttccaaatgcttcttgaagagaaagaaatggagctgcacgattgtaaggcattgtaaagagatttgatagaaaacttgccactctttgtttcggtccaaagtatcgtgtcttccacattcccacactcttttcccatgcaaccgcacccacctctcaattattaaagggtctatggaaacaaggattccattcctccttccccccttcctcccttcctcccttttgtcgaggaatcctaaatatcctccatttgtgcctcatttgagtcagctaaaacaaacaaggatgagaaggacacacacaaaggagaatccccacatcacttattgttccagaatctcaccttccatcgattagccactaaaaaagagatcccatcatttgcaacatcctaatccttatcactttccacaatccaacaccatatacctttctcacctctcgagagcaccaaccctttcttccccatattttcctccgattacttgattctaaaagacccctttcttattcgcaaatccttaattccatttgcaaaggagagccttattaagagttgaaagacacttagctcccagatcccctttcttcttatctaagcaaacaatcgctcattttactagatgtggtttccgctccaaagccctacctccctaaagaaaatccctttgaatctggtctagtgtcaatctaactgaccttggtatgcataacaaagacataaaataaatgggtaaggtagacaaagtactccaagtttgggtttctttaaaatgtactgtctcttccacataaccaaccttctatggaactactcttccacaccatcccaaattgctattgatttaaacagtgcatccaaaggtaggcccaagtaagtgaacgggagactacccaccttacaaccaaactcataagcaaagtcatcaatattttccaccctttcgatgtgaattaattcacttttatctaaatttattctcaactccaaaatggcctcaaaccacttaagcaatcaacaaagataggtcatttgatcctttacttataaaaaagaaaaaaagaaaaaagaaaaaagataggtcatttgatcttgggaggcttggcagaataccatggtgtcatcgacaaaccaacaaataggaaatctaaaccctttctccactcgttcccttcacttcacctcactacccaagaaaacccctccatccactgccctctccaagaggcaacagaacgcctcaattgcaatcacgtattgggcgagagaggatccctctcccttaagcttcttgagctttaagaaaagcctatagagtaccattgaccaaaatagagaaacttactatggagatgctccacttgatccacctaatccatttctcccaaaatctgattttttttgcataatcgcaaggaggaaataccagtccacatgatcataggtcttctctatgtcaactttgcacaaaatactgcactcattatttttcaatattgaatcaatggcttaattagcaataaacactaaatctagaatttgtcttccctccacaaacgcctcttgggccttagacaccgcttttcctaccacctttcttaatctattggctaacacctttggctagcctcttgtacaacccacccaccaaactaataggcctaaagatccttaagtattcaacagcccattttgttagaattaaaactaaaaaggttgcattctagcttttaacaaaattgccatgctcatggaaatccttgaaaaagctcatcacctcatccttcacaaaatcctaagagaattgcaaaaaggtcatagaaaacccatccgactctaatgctttatccccattgaaactcaatagtgcaccaaaaacctcctcctaagagaagggctcctctaatcttaaaaacatcatgagcctctaagctctcaaacagtagctcatttaacctagggttctagtcccctagattaaaaaatagatactgaaaggctttaactactccttccttgacaacattttcctcagagtgctaagaaccattaatcttaatttgtacacataattcttccttctatgggtattagccatcttatgaaagtaattggtatttctatccccctccttcagccacacttccctaaatttttgctaccatgaaatctcttatgataaaactcatttttttaatcttccctagcttgctttcttgcttccacctcttctaagggtagggtattcgttttttcctttgtatcctaatggactacttgattcaaagccatagccttcctgacttcagttttgccaaaaacttctctgttccactccttaaggtttaactttaaggccttcaattttgcagctagaatgaaacttgaggacctgctaaaattgtacccctcccactacatttttagaaggtccttgaagcactcctccttcagccacatactttcaaatataaaaggaaatgggcctctcctcggtcctcccccatctagaagtaagggaaaatggtcagacataggtctagggagaacatactgcaaaacgatcaagccttgacatggattgattatttaaaccacctccaagttaaggggcccctgcaccaacgacaaatctttcaactttaagtcctcaattatcttagagaacagtttcattgatgaattcaatctcgctcttttattgcactgtccatgatatctaatcatgttaaaatcccctgcaacacactaggggtcactccaaagcccctttataacccccaattcaccttaaaagcaatctctttccctcctctaggttgagccataaacccttgtaaaaatccaactgcaatcatcctcgtgattcttaaattgacacgagatggagaacttgcccacttccatgccaaccaatcgtaataccctattatcctaaaacaccccaattcctccaacatctccccttgagtccacaacaccccactctaagaatctccccacccttagattgcgcactagctcacttgacatctttttagatcttggtttcttgtgagcaaactggatccatcttatgcttcttaatcatggcctttctcaccttccttttgtctttgtcattggtccctcttacattctaggataatattcaatccttcatctagaattggatgcgttgcccccctcccccctccccccccctctttcttctcctcctactccaaggtagttcataggacaatccgactttttcaattttgtttcaaaccttgaggactctgatatttctttcttctaccagccatcttccccttttgatatttcctctctttcatccttttgagcaaggtcaaaatctccccatccaaccccttcgttggcattcctaagcgatggataaacttagctaaacaactagaagaccaacacagtagagtctattcccactccctccactagttcgccccacaaatccttttctgacaaggctcccgttacctcctcaatagcccccaaatccatacccaaagaacaagagccttccatttccctccccatccgccaaaatcacccttaacggatctagtgttgcctcccttcccgccttgtcccacaaccaacatgagacgcaccactagtggtaacaagtgccttttccaatctagagagagaagaaaaagaagaatgatcttgcttccccaaaaggaaaaatgaataagaaggagttgggtacctggaagtctcttgcaaaagtgcttcgttagtgagatatgaacatcgtatcatcgacgactgagttcccttcttgttgctaaacctagagccatcaaatcattctttgtcagtcctccactcctctatgaatctagactctccaaaagccctagcctcttttatactcccatctttgttggactggcccacacccatggatcttttaagacgccgctggcttgatccacttcaacaaacgaactaggcctccttacctcttgttcctccacaacccgtcccaaaccaaaacccccttgggctaaaggcctacccgcctttctcccaaggcctgtaaacccctaggcttccgttccactcaaaactctagccacacttcctcttccaccttctttctttgaccttcccacaaacgtagaatcagaattattagtgtcaacatcctttcttcacaaaaattctccacctccacacgacatggcagccattgcacactgcaaatctggctgcagttgtttcactctaccacccgctcgtgtgtcacccctccatcatccctaacctccaatgcctctcccctaccactcctaaacaatgggaccatttctgatacctttggtggagcttcccaccatagtcatacaacaaaacaaaatgaaccaaccatcacttgtagagaacctgaccactaaaccttctggaatcaccaagatcctagcccattgaaattttgaaaaaacaaagtttcttcatccactgcaataaacccccatagttgtctcgatctttttgaacacctcccaactccaaaaatgaagcaggagacccactatcctcacccagacttccttagtgagttcacctttttggaaacaccccacttctatgccccacctctccaagtgcagaagtttctccttaaaacattgaaaccctcttttcaacaccctgtttgcctctgctttgtcctcaaactcaaagaaaaggaatgcacctcctaactttgcaatcttcactcccccttttaggttccaatggaatctcccccaactccttaacaacaacaaatgtagaactgatattgaaggctttccccacttcccaaccaaacaccgatccaattgctccttcgtacttagcaaatcccttcccctcaattggagccaaactacctcacttaaccttcttgctttcgctttcaaaacattaacaaaggacccttttgctttctccataggaactttgctactgctttccaccttaacgacgaccgatccaaaggaaatcttggaatcagtaagggtaactacacctagagaattgagcttctcaactaaggtggcctaccccttaaaatacctttaccttcagggaacactaaacgatacctccttgctttcatatcaacaacaaaggatgaacgttcttgcttcatttgaacgttgtttgagcctaaacttcctttttccatcttcccaacttaaaacaaaactcttactagattccccttgatggaactcctttaaatgaagtaaatcccataacatctctttcgatctccccttttcctaaaaaatcgtagcgtttctctctgatcacaccatccacaacaaagtgaggcaaacgatttgtcaaagtgtcttgcttctaattgaattccccaaacctttaaatgcaataatcatcatgttcacaatactccttggtggaacccaagccaaccctactagattgaagagcttgtgccaaagcccaatagttaaaggacaatgaagaaaaaggtggtcgatcgattctccatttcccttgcatagaatgcaccattgaggataaaggaatttgtagggttttcccaactgcaacttgttattggtatttaccttcccatgtactactaaccaagcaggggccttaaccttcgaaggggcttttgaactctacaaaaacttggtcggaaggaacaaaataggatttgagaaatttgataaggccaagaaaaaagatttaacaaaaaacaagcctgatgaggacaaagaacaagctcttgaatctgccacagaaggagagaaatgcattgaactaaggaaggatatgattctttgaacgagttcaatttctgtatcagtaagattacgacgaaaattaaaattccaagagagtggataagaattgccaaggataactaagacggtgaggtttttttttatagaaataactctctaaagaccagggaattgagagcacaaagtttggttaccccatcatagatcttcccaaaaatagattctctcctcattccccaccactaggcggataaaaagggagaaatcctggaaaacttgaataatagccttccaaggacatctgtgtgaccatctaaccaccatgttggcatcccatccattagaatgtgtcccataaatacttgcaataaccttatgccaaagaccactcctttcttttgggaacctccatttcccaaggaagtcttcccgaaacccaaacctctcaacttctttggccgacaaacaacatcccatctgataagatgatctttcttcccttcccttgccccagagcaaagaaaatccctttgcaatttctcaatctttgagactattgatattgggattttgaaaagagagagaaagtagtttgaaatgtgagacagacttgactgaattaaagtaatcctctcccctagagacaaaaaacctttttccatccatccaacctccttgatattctctcaaccactggatcccaaaagcctattgtctgtaggttctctcctaatggaagacctaaataagacaaaggccactttgacattctgtaggatcgaagccaaactagacaacaagtcttgccttgtattaatacctgaaatgatgttttttttgaattgatttttaatccttatacttgcccaaaaaccaaaagaattagcttgaggttttgaagatgttccggagatgctttagagaaaaaaatggtgtcatctgcaaactatagtaaagacactctagtcctatcctttcccacaatgaagcactcagttaacccaacttcctctactttgatcatcatcttgcttagaacatctgctactaaggtaaaaagaaaatgagaaaatgggtctccttgtctcaaacctctagtggccttaacctaaccctttgcatttccattaactaggattgcaaaacttattgaagacaaacaaaccctcatccaaggtctccattttgggatgaaccccttcctttctagcacatggtctaaaaagccccaatccacatgatcataggccttctcaaaatcgattttgaagaccactccttcctctcccgacctttttttctcatccaccacttcattggctttcaagacaacatccaaaatttgtctcctttcaacaaaggctccttgagagccaaagattatttcatgaaggactttgcgtaaacggcctgataagaccttaacaattatcttatataaacttgtaaccaagctaataggtctaaaatctaatattttaaaggtttgacttttcttgggcatcaaagcaatgaaggtagcagttgtactttgatttattatccattagtgtggaactctagaaacaccctcataagttcctctttgatcacatcccaacactcttgatacactgcaatagtgaacccatttggatcaggggctttttccttattcaattggaagactcccaagtgtacctcctctttagaaaagggcttgtctagccaaactgcactttctccataaatagggacccaatctaaaccttcaaccctccaagaagcacatttggatttggaatagagtttcccaaagaaatttacaatctcttctgaaataatttcaatgttgcttaaagtcaccctcccagagaccaaagacttaatgaacttcctgctttaccttccattggccactttatgaaagaacttagaattgcaatctctttctttcatccacttgaccctagatttttgtctccaatgaacctcttccctttaacaacaaatcctctagctctcttcttcttaaggttctttctaattacagatcatgattcaagttcccttcttgttcaattagatcaattctacaagtccgaaagaatgaaaattttcctctctcttaaatctccaaaagccattttattccaatctttcaactttgatttaacaaatttgaatttcctcttaacttgtgaccttcccaaccttcaaccgaacattcttgccaccgagcactgaaattgtccttaaactcaagatagagcaaccacatattctcaaacttgaaaggagttggactccactttaaaggattagtttccaaacaaattgggctatgatctgagttccatctaggaagtgcctcttgaagactttgagagaagaaaaggtcccactcagatggaaacaaaaatctatccaacctcttgcaaataggaacatcttgcatgcttgaccaagtaaaagccacatttctaagagggggatcaaacaaaccactctcccttataaactcgtcaaaacgcctcatgtttggtgttaacctagaagcacccaatttctcagagatcctccttattacattaaagccccctcttacacaccacattgggaaagttagaccatacaggtcttgtagctccatccaaaaatccttcctccacaaaggtttatgcggaccataaagttaaccaaaaagaaccttcttcatcagaattcaacttcacagttacagagaaagaccctaacaccttctctgtacactttaacttattagaatcccacataatcacaaccccccctgaagccccacaagcaggaagaacaacccactctttgcttcttcctttccagacactacccacaaacctcctatcccaaatttctctctttgtttcctgaagcatcacaatatctggatttggagaaccttttaaaccttacaatgcctttgaacaatataataatatttttaaggcaataattcaaagttgatttcttttataaactattggcagtcaaacatatctttagagtatgctttttgttgtgtcatatgttttgttagacatgcttaagatatgatacatattggtgatacatgtcattttgcctgaaaataataccatatcatttattataagttgttgaaaactatgggtgtcactaacaaagtaagaagggaagtaaaaaatgaacctaaaaaccttgtgggaggtcttggattttttcttgttacaggcagtcaggcatcatttgcatgagattttagttactattagctttattattttctttttgcttgtctgaatctcaggcgggaa

SEQ ID NO: 11043 - DNA, 4745 bp, Vitis vinifera
  Intron number 1 from transcript GSVIVT01023598001 (locus G SVIVG01023598001) derived from phytozome v7.0 (chr-ID chr1 1; pos 7827831 to 7832575)
agacggtatgttccatatccggacacgagagcataaaattctgtggagataatgagaatgtctcttgaaatgttaaaatatcaggaaatgagccagtaactccaaaagaaagaaggaaaaagtaaaagaagctacttaagagttggcacattagcaatacaaatctgttgcttaatatggtgcttagtcttgaatagggaaaacccacaaacttgttttgatgggctaataaaactttattgaaaatcactgagcaactcaagtacattggatgcatatgcatacaaagattgtctaggcaaccaaaagcaaaaacaaaaaacaaaaagctatacaaccacctaaaacccaacgaaactctaatcatatcccttaaccagcaagagaggaagtgtgggaggatttctttcgttttcaacacctaaaacttcaatcattttcccaaaaagaaaaaaaaaatcataactattttcttgaggtaggtgtttagaatttttactttaaaattctaactaagcatgtatacttatgtgttgttgatatgtatgtatttaagtgtcgcctccaaggctttagcttttcatgtttgttgccattccttctcccaccaaaaataaaaactctgaaaggaaaataataataataataataataataataataataataaaaaaataaaaaaaaaataaaaaaaatattaatttaaagttcttatttaccatcctttacaatgccaacattcaaaacattcaaatgaagttacctaatatttattgaaaaactaaacatgaaaaatattccatgttgcattattttactgaaaaattactttactttcaatatttttcgtgtctttgacaacaattatataagctttttcatgcattatcattttacctctttcctttttctgttcaagtacattttaaacaactaatgtaatcattcttttaagaaaaaaaaattttgaatttaatttttcttaaaaactataaaaaatagttaaagccatacatatcattgtatcgtgtacctattgtgtattgtatatcttaacatacacttaagatgacatatggaccaatgttgtatcatatcttgtatcgtaagttcttgacactctcactttaagatactcttataataacatgcggacccatgtcgtatcatatcttgtatcataactttttagcaaccatgcttcaaacctttaatcccttgaccagagagtcttggttaaaaagggccactttcgggaagtttaggtatcatctgtttattggatcattgtttctgaccaaaacgagatgaaatcattccagttctctgaatttgaaaccttggtggccaacaaacattccttctggaattatttatgaaaaggttagtctagatcagtcactggctcatttcctatttacatgtcaaggggctgggatttgaactttgtgttctttgttttcagaatgttcattgcatctatggtattaacatgtcgcatattcaggaaaataactttaaatttttataatacggcttacccctccattgagcaggttctgtaatgcaaattataaaaatgtaaaacaattaatttgaattttgaaatagaaaatcctatgtgtcatcattggtttgcttgcactattccttctcaagttctggtgtgcctaggaacctaggtgttgaggttgtttccccagagatagttaaggttgaaaaccaacctaagtgttgaggagactgccaaaacccagcccaatacaaccttgagtagagatgttcaactcaacctcgtgctaggtcaggctagataagactgattgggctactcaagtgataattgatttttttagcgcatatctcatgttaaaaccgaagtccaaacatgcagtccctcataccactgaatggtgcatgctgtcaatgaaatccgaggaagaaaattttctgtccgtcaaatatcctgtctatacatacaaagatcacaggacaatttcatgtagctttccttttgaattttctcattaaacctattaagctccttccaaatgcacaaagcttagcaaaatgtgcttgtcctctgtgtcttcctcttttcaatcttaatggactttttgtgccagctagagaacgtctcactcaccctctcagcaccaaaaatatcgagccactgagcaggggagcaagaggcagtcaacagtctgattgtccttcctgaacataaaacaccaattagaatagtttatcgaattaccgccagaaaaataagtgactttggagagaaactttggtgttttgaacaacctactctggaggcctaacatcctctccccagagcacagccctgaattcattatcttttgcgatcttctatggcgaaaggtccaccttatcctgcttacttaaacaaaccagtatacatctgccacctaaagggcatcatccatctccaactcccaatcatagaacttggagataatccttggaagccaaattgaacacaacaatgggcaactgtagtgcctctattgtctgcaattctgactatttctgacaatttgattttcaaaggcacctcaccacactgcttgtcatgccaaaacttcactttttgctcatccaaaaccctttctgctttgggagggttgaaataatttgcatcaaaataatggaacttgcaatgaaaataattattagtttattctcaaaccacatgaagtcatcggaactagatttcttatgctggttgtaatgattaaaaatgtccaattgtattggaaaccagttattattatttttttcttcacatctaagatctaacatatctatattctaaattcgcaattgtttagacacgatgtggtccgagtccggttcaacttgctcaagttgtaaacctatgttagtctatgttttggtgtcatgcatatgcctctgcgtactcttctcagtgttagcagactaatacaaaacatttgtttctctgtcaaactctcattggacatggaaactttgcccaaccaacctttggctgtctccttgccactcgctgtccatatttgctgatagttttgtatcttcaaccatcacaagctgagtagttaaaggttaaccaactaatccattttcagaggacttcagcaaagtgatttgataaggcttgtaactgaatctttgggtctaacactgttcgagttgatgtaagaacggcatagaaaattgtagcatggaacattatgtccttatcaatttattgtttcaaatacacaaacactggattttcctggacattttggaatttagtttttctttcattacagaaaggacctaataatggagtgccctgcccttgctacactcacgtcattttctctaggaattttcattctgttgttaggttattaggataaggtcttgaggttatgagttacactcacaatttattagaaaaatcaaataaataatttactacatgaactttacactaggcttgggaagggaacacaacatacagagatggacgacaggcaaaaggttttctaatgaatttctgagtcatgtagaaaataagcgaatctttcttgtatttatttttactgggttgtatttaatgttttggccatagcatcagtagtgtttcatgctgacttgaattgatcatctatcaactaagatctttgacaaggctttctgagtgaaatttagtatgctttgcttgtttttatttgttttcttttttttttccagataaaggtatgacttgcttgttttagcgaaattttcttttcatctttggctagatattggtttttttgggctttatattaccatgccagatctttctttgcatgaatgctttgttctttatctttcttattctgtttgtaatttgttggtgagaactttttattagtagttttgtcattgtaactgtagcaagttgcttggaaatgtataatgggaaatttttttagccatagttccatacattctatgacattttacgtttgacatggaaaatcattcaactgcatagggggctcctagtatagcccctatgagaccattcctaggcttggctaggcattttggaaaatacaatagtgaggtaattagttctcattgtctaaccttgatttcagatatgttagcgatgcagttctttcttactgaagatgttggatccaaccttagatttcacattacacttctaaactgatctctctactgaattcttgagctttgtacttaatcttccttgttgtaatgacttgcttttgagctgagcttgctttcagtgcaaacttaatttatttcttctgagttgctattgatttgcaaggatgacatttcatactacttatttaggcaaatatgttgcacattctacatgattacgagctatttatagggtttcagctttaaagctgatatgccattacttaaatgggtaaatatcaacagcttatggactggtgtttggatattcggtaataatcatggttgtctatgaatttattcctcactcaataatgctttggtttgagacactccttgctgtcattaatgctgttatatgctgttttatggtgtttttccatgttgatggtcactccttgctgggaagtctacccctctatgactgatatatgcaggaggttcccatgcagagttttcattttcatatttattgtttcatttttatttttaggtcatctcgaagggcacaagtgagcaaggaa

SEQ ID NO: 11044 - DNA, 6055 bp, Vitis vinifera
  Intron number 1 from transcript GSVIVT01032008001 (locus G SVIVG01032008001) derived from phytozome v7.0 (chr-ID chr1 3; pos 23597816 to 23603870 reverse strand)
gtcctttcatctaatcgttttctctacaataaatagttaataatagcatataatttacattttacaaaataaaggcatttatatattattgtaattacatggatagctcttgatatattggtatacaagcaaatttctcttaaatagagaattttgtatccctatttcaaaatagctttgatttttacaagaaatagcataatctatcagaaaaacctggcataattttaatataaatttataattacatagatatctcttgatatattggttggtgaacgcacaaatttttcttaaatagaagattgagaaaccaattaacccttattaatttgtaaaatagctctcgatacattggtgtatgcacaactttcacttgaatagagaatatgaaacaaattaaccttttaaaatttataaaatattaagtacaataatatatatttgttttatggttaatgactaaaaagaagcttgactaggtatgggccttggatcttgacttgacttgatctaagtttgatttaagtaatatagactaaaattgttaatgcttgatcttagattaaatatgctacaaacttgatttttggatgttcaaacttattcttcaagttttcgaagatttgtaaagtttcttaaattctcaaagtggactctctataattttttttttcaaattttgagagtgtgttttaaaagttaaagaggtcctaaaggttaggaaattctctttgatgttatcttcaatgtttttagagataattattattattttgataattgtctttgaattatccaaaaattgatattaataattattattaatagtactatatttcaacataaggcaagtccattcagtaattgaaaaccaacagcagtgctgaggtacaagcccattcagccattctccattattgatatccggtatatgcactctacaattatttgcactttcttttcgcctttttctggattcaaaaagattttgagtgtgtgaaaactgtcaagtactccatttcttggcgggagattttgagaaaaatatagtaatctaatttttttttaaatattataatttaaaaaatattttaaaatttacaacactttaaacaaatatagttgaaagttatttggaggggacaacttcaattaaatcttgaagttgtctttaccaaaaaaacaactttcatgtttaaaagaccaattattttgaaaacccagaaccatgtgaaagcatttaaaacatttacatgacaacattttgatagatctttagtaataatgaaaaccaattattgatattggcacaattggaaaataacaataaatgcaatgaatcaataaattaatattatgatcatcggtagggtaaattatttaactagcgaaagtaatgtttatgaatgaactgtgtaggcaactcaaaggagggatattgagatagcattggtgagccattggatggtgcatactctaacgaaaaaattgataaaagggcagctataagagtccttgatttcatgtttggatggttctacatatttaaaaaaaaaaaaaaaaaaaaaaaaaactacatccctaaaccttattaagccataattaattaacttattatatgtggcatataatgtaagcatatagatgaaatttgcaccattgtacaaggatgttatactaactgtacaaggtaattgttcaattggacaagacaaatgtcctaattgtacaagacaaatgttctaactatacaaggagtatacaagattatcctttgtgaaatatttcaatcaatcttagacaactttttttttttatcttgccatctaagaattgcacactcttagggtacatattcttttattacacactcatcttatgccctttacttaactcgtatatgacaattcgaatacttatcccactaataatgtttgagagaaaattttgtttttccatcttccactattttttgaaccaaaccaatgaaaacatgattaatctacctatgactacatattgagtaggggtatatggaatttgagtcactgtacaatatatttacactaagtgtacatgataaatatactaattgtataagaatatacaaaactattatttgtgaatgattttaagtgattctgaaagacttgtttgtttatttcccctaaccgaggatagatgacattccttacacacattggttaaacatgcattcatttcatgcattttatctaacttgtatatgatcattttaataggtacctcacttatgatgattataaaacaaaattatacaacaattttttgtttttgttttttttttaaaactaaaccaatgcaaatatggttaaccgacttattgtcagatattcatgagatgatgtataaaatttgagttattgtactagggtattacactaactgtataagacaaatttactaattatataagggtgtataagactattttttattaaggatttcaagtgattttgaaaaacttttccattttttttccactcgaggatttttcgacactcaaattctctcactcaagaattgtttcgaattttatttttaaatttcatcatcaaaattttataattgcatattttgtttttgtagttttatcaatattctttctttccactatacatatttttttttttttgtgaaattttatccaaatgaatgtatatttaaaattataatcaaatttatcaatttttttttactaaaattatttttaattcttttaatatatttatactcatttatttaaaaaatgaaaaactaaaagataaattctaggagttgattagtaaaattttcatttacttagttatttatctccaacaataggctaggatggattagagttcgttaggcaatgatttaaaaaacacttttaatttaaaattatttttgaaaaaaaaaactattaattgattaaaagggatgaaagatcccaaatttataaaactagtgtctcccattttttaccaattttttacataaatatcttttaatattttcattatttacatgcatgttttaaaagaaaaatgttatttttgcaagaaaaaagtgagtatttttttttttgttaaaaaaagtgggaggttaaatttgtaattttatgttttttttgttccttttaatcagttatccaaaaaacaaaaatttaagtgtttgacaaattttaagaaatgtttttaaaaattgaaaaatcatttatagtgttgaaaaatcactttaaatattttctagacaaacacttgattaataattcctctaaaaacacttccacaaaaaaacaatacttcctttaaaaacactataaatagaaatactgttaaacatactcttaaaaaacattgaagagtatttttactaaaaacattgaagaatatttttacttgaatgtttttagtggaagtgttttctcaaaaaatgcttttagaagaatcacttatcaaatatatatatatatatatatatatatatatatatatataaacattataggtaatttttcaaacttacaagtgattataagtaatttttcaaaactacaagtgattacaagtcatttttcaaaactaaaagtgatcttacaatttttacaactattttgtacattttgccaaaatacttgaattctatttggttgctgtttccgaaaactattttatgttcttgataaaaaaaaacactcaaaaacacgtttggcaattgttttctatgttttaaaatttattctccgtgtttttaatttggtggttttagacaacaatctcaagttattttccctattttctacactggttcaccgaagaaaaaaaaagcacaaaaaaaatcatggaagacaaaaaaataaaaaataaaaataaaattcatagataacaaatcacaaaccctcaaaaaaaatgtatcatacaacaaattcaatcaaatcccaaatccacatagagaacaaatccacaagccctcaaatttgtgttctgaaaattttcttttccaatttccttccccaaatgagaaaattgatcaactacagtgttgttgatggtgacaatgctacaatttgaacttcacacgggtaacaaaggtgggtaaatatgtgtgtgtgagagataagaggagtggggaaatgaaggtgttaagatgaaagaggaagagaggagtgtagattatgttaaacaagagggagagattgtgagaagatagacggatgagagagatctcaagaagaagaaaaatgtgcaaatggaaaattagggtaaggggtaggtctgaaaaaggggttaatttttttttttcctaatttttttatcaaaataaaaaataaaaaatgattaaaaaataatttctatattaaaaaatgcatacaatttttaaaattataaaaattaattgaaaaatggatatatatttttttatctttaaaatattaagttaatcaatataattttttttaaaataaataaacatgctaaaaaggctttatatttatagattaatttaattatcaaattattttttatgtttaaaacaaatttattatttttattttaaaaattagaataatcggaaaggatgttagagatatgagatttagtagaaaataggagataaaaaaggcaaatagttaagaaaattttaaataaatacatccttataaatcttaaatccttgaaataatatttattgccagtatctatagtaataaaatattattatgtactagaaaatattatttattatgtcataaaaagaaacaagatttgaaatgtttgcaatttttttttgatgaacatgttgagcaacaactaaaaatgtaaataatactttagaaacttttacattatacaaaagttttcaaacataatttttttcataaaaacaatcgaaacccattttaagaacaattctgaaaaattgttttttgataaatgttttgaaaacattgttgaaaagtcccttaaacattttcaaattacttattctttatatataaaagaaaaaaaaaatagtaaaatgattttaaaaaaacatgtaaaaataatctactaacttcaaatttatttatcatttttttcttttttttcttttttattttcttttccttatcttttctttcaaaattttcatgaatgaagcgtaggttaatccatactagttatgtacataagattaattcatctcgtaaagagttttcaaagtaagtatataaatgtagtactctatgattaaattgctcgagtagaagtagaaccaattttttcagaattggaccggttgttgaatcggaaaagttaccggttcacggttcattggtcgaatcattggtcgaaccacggaactggtgatgtcataaatatgaaaatttttatttatatattattaaaactaaaaataattataaaaaatttaaaatatatatgaataaattaaaaatcaataatgttattttatatctttgatattatcaaaataaatcatattattattttaaattttattaaatgaaatatgtataatatttaaatgtgaacatattaaaaatgaaaatttaaactaatttttaaaattttaaaaatattatattatttttatttaatattataaaaaattttaaaatctaatatatattgttttgtttggcattttagataatgaagtgcatatagctgagtggtgtcctaggtagactattgtaccagaggtccaagttcaaaccctcttggtggaggtttgttatatttaaatgactcctataaaaatcatcctcactgtaggtaaagacatagctagtcttgtgggctcaagactcagcccaaaaaaaaggttggggtgggtgtgtgggctttgtcataagataaggcccagcatgggctttagtaaaaatcatttaaattcaatgtatccttccatgcttgcaaaaggaggggttagtttgaattgtttggttcgtttaggcggttgaattaagcttcaattgaggttgcaaaagttaagccacaaactcaaacattcaacctaagaa

SEQ ID NO: 11045 - DNA, 2811 bp, Vitis vinifera
  Intron number 6 from transcript GSVIVT01022283001 (locus G SVIVG01022283001) derived from phytozome v7.0 (chr-ID chr7 ; pos 18190125 to 18192935)
ttgtcaaagaaggagctggatacatcctccacagggtaaatgaactatgattgtatttccatgttaaaatttaagagggaatgcttttatttatttatttattttattttatatggtgtgtagttgtgtagctttctgactgtaaatcattgtcccaatatacttttaatacttttgttgatcatccattgcattctttgaaattgatgtgattaatgatcatgcataaaatccttatgtttatatggcggctgcttttgtcattactcataacagtcttgtattccatcaaaacttctggcttcctttcttgaaattgtagtttacaaggttctttatctcactacccatgtattgttcacaaattgaaagaattctcaagaatgtcctgttccatttttctttaggattgactgcagtattgccttaccctacatttctagcacatatggttccatgtctactgcagagttgttgtaggtcatgatccatgtattctcgtatcacttaacacagttgttttcaatcttcatctggctcttctagagtgtttgtaaaaccatgctagattggattgttggcatttcagaaccatgtactggtcctaattccaggtttttggggtgcctctgatttgaggatcagcgtcttgtaaaataatgaaagaagataagattcgtaatagatgatggtccatttgatgaatttctgttaatagtttaatatactgtttctctccctgcattacaccatttgcttttgtaacttgattcaaactattctactgttcttcctgttgactggaagtccttttgggttgtgctgtactctgatttttgaaatattgatttcagccacatcaagtcatcccttcctacatgttagttcttcctcactgtggtgactttggttgatttgtgggatggaggtttctcttatttatgattactcatcttggttatttcatggatgcaacccttttagtggagggtatcttcttcaaacttttgctaattggatcacataacgttggcttgctgtagaatcatactatgtttgtttttggacaatcatctggtagaatttatgtcttctagtacttactcttgcatcaggtagttgtatttcaggaattcatgtttgtacccatggtcttggatgttgtctactaataaatccttgccaacaggaagaacattttccctctgcattgtcattcacatttcactagagagttaaaatttcttttgattctggaagaatggtatatcaaagtgctggaaatcttgatatgcaaaaataatgagatttaaagtgacttaaggcctcgttttagccagggggttctttaggtttggcagaggttgcaggcttgtagcgttcttaagcaagagtttccttcttcagtctttgtcatgggcttatatagttgatataatctggctgcattctcctttaaacacatggagagctttttttccaccacagaccgtcaacacccaaggcacccccactcccttaacctgatgttttattattttgtttacctataaattggtattttggtcctggacttccataaattcatattaaatgtatgcaacatccattcatacatgattgaatttctcccaggggaataggtggacatttacgtacctgtcatcctttcagagctgggagtgggtatttttggttttaattaatttggaaacataatcaaccagtctccatgcttctgtttaatgtgtgttgccaaatgtaacttctgccggatacctgtcatcctttcagagttgggagtgggtatttttggttttaattaatttggaaacataatcaaccagtctccatgcttctgtttaatgtgtgttgccaaatgtaacttctgccggatggaattgcactaggttctctgtttccactgcaattgctaggctatgagcaatcatgtgaatttttcttttaccgaaatatcttgataccaagtgatgtataaaggatactgtcaggtcagagtattaaaggatattgtcacctgacaggatttgaatgtttgccaaattgagaaagaaaatgaatctttaaattggaaaagatgtagtttctttactgtcttagacatcatatgaaggaacatattttatgtgtagagaagatatttgtagatcaatatgattggagttgacttaggtataagaaaattgactggtatccttgtcaatagccttgtgtacaggtggagctaatttcaccagttatcattggtttgtgttgtgtgtgtatattataactatataatatataatatgtatttttacagctaagacttggtgaagatacaacaagatcaccacaatatagcaagggtgatatatttattttcctatagtatcatacacatgaggaaaacagaagttgaaatcagtataaattagagaaccattttctttcgggcgtggctaaaggtgtattttacaaggaaaatgcagaggacttgtgtttcaccagtttcttgtgacttgtcttagaatggacattatttgatttgtttttcatggattgtgactgtagctatttcaaggtctgttttctattttatttaatttcagagtacttttgttatttgggactaacagagttaagtcccaggaaccggaagcattactagaagttgagccactttggttgtgctttagatatgattttcagtcatttgatagcaatgcagtaaccactcaatcatgccttacatccttttaatcctgtaatgcaggtaccagcctcctattcctgttgatcaagtgaaac

SEQ ID NO: 11046 - DNA, 3996 bp, Vitis vinifera
  Intron number 4 from transcript GSVIVT01027600001 (locus G SVIVG01027600001) derived from phytozome v7.0 (chr-ID chr1 5; pos 15140769 to 15144764 reverse strand)
caaagaaaagggttttctaaatttctcaccggacagtatctcttaatactactgtatcatgtgtatagatttttgtttgtatatctttttgcactaaaacatttatacatttccagacttaattctaaatagaacttaaaactaaatagtatttaatggtattaaatattaaatttatttttttaatgttttatttttattaaatattaattaataagtaaaaaaaactaatagattatttttactattcaaaaaatctaaatattttaattttttatttagctattatttttaaaaaatgagtaataagttaatattttaactttttttatttaataaaaaatttaaaaaaatgagtaataaataagaaaaaaataataataaacgatatgaaccctagaaacaagttgcattcatactaaaaatactaaaattgaataatttaaacgccatgagtgatcataaaaattaatcttattcttaaaatcacttagaataaatgaagatcttttactcgaatttttttgtataaaatattctatttctaaaaataaagaacatatcaagagcataccaaagttttatagcctaatcaagttgcatgcttaagattgacataaacgatatgaaccctagaaacaagttgcattcatactaaaaatactaaaattgaataatttaaacgccatgagtgatcataaaaattaatcttattcttaaaaacacttagaataaatgaagatcttttactcgaatttttttgtataaaatattctatttctaaaaataaagaacatatcaagagcataccaaagttttatagcctaatcaagttgcatgcttaagattgacatgggttataagtctttataattctgcaataaaaaaaaaattggatctactttgagaaaataaatagatccaaacgaaacaatcaaatttgtttgacaacagccaaataggatggaaaagtttattgagcagttagcagcatactacattatctatccttattttccaacttgatgtcatgagatggtgggcaatgggcattgggattttctaccattttctaggatttgggattttctatcttactttctatttgttgatgttacatatgatgatgggcattagaaataatgatatatttttacaatgggagggaagaaagttgtgaaattctttgatatatatatatatatatatatatatgtacttttcttaactttgtaaacaatttttaatagacaacttctatacttttcttaactttatagacaacttttaaaattgtgaagacccttttggattacagaacgaataatatgtatacatttgggtgtgggtcttgtacttacaaaaggtatcagagtcgatttttgacccgtgtgggatttgtttgtttgaccccataattttgtgggacataatgaagatgttgtgtttgcatgagagggtatttatgatgtttgagtgcgaatcgatacaaagtggtgttagatttgaataatcttttgccctcattgatccaagaggaagtaggatggaagaagataatgggatcctagcactaaaaagaatttttatatgttaattcaattttgttttatgcactaaaaatactttattttataaagatttcaattttaattaaaaaaaaaatcaacgtattccttatgaatccatcattcttactatgatgttgttcatttaaattaattaacataattaaatacattaaaaaaatgaaacataccatttttttatctaattatttcttttaccaaacttcccataataaatcttctaataatcacttaaattgtttcctgaatgacttaatattgttcagtgaacaagctagcaatgattctaataatcatgtttaatccttaataaattaatgattatacataagcaaatgaacaagcactctttgtataaataaagtacttaatttttaataaatgtatcctaaagtgtaatacaatgtttttgtctagatgtctaagtatcattaaattgcattttgggattttcttattttccactttcaaccacatgtttgaatggacccaaaattccatttgccctactttcaaaatgtgagtaggggggaattttgaagaaaccatgcgctgccaaattgtgaaaggaaaatgattcattcacccatcatgatgaggtattattacaaaactctgagatgtttaaaatggtaaggtcgcttaagcttacaaatcaacaaagaaggttggaaaattctaggttattgaatcgatcttacccatgaaacgtcattgaaagtacatgaaaaaatttagaaaagcataaagtgacgaaggaaataaatcctttggtttttgaattgttgttgtacactattataaaagaacgacaacatgtaacaagaaaataagaacacacaaatttacatgaaaaaccttatatgagaaaaaccataagtagaaaaaaagaaaatccactatatcaaaatttgatgtaaaatgaaagataatcgagcgactactgcatagacataaatttcaaaaccctaaaggatcgggtcaatccgctaccaatacaaaccctctaaaaaatctcataatttttttatcacatatgttgcactgtgaaccttttggataaaaccaaatagaattcaggtcatcaaactctaacatacataataaaggtcaagtcaaccaatattatagatagttactcattcacttaatgaataatttttatacttattcaatttgtattaggttaccatgtaacaaagagattcttcatgtatattgaagacctaaatatacatgtttatgacacagattaatttatcatattttttatgtattccaattcttaggagtaaaacccttatgcactagagttatattaaataagaaaataaaaaatcaataaataaaaagattagtttactcttaatgttagaattccaccttcaagtcgccctccaccctgtcaatcttaccacaaagatccatccacaatggcggcaaaaatgtatagtgcaattaggcttcagacaactctacattgattccataatgggacccgacaaagaaaataatgatatgctgagctcgaaagaaagaaaattttgttgcttaaagaatgcttatccgtgatagtggtacttataatcttatctacgtaactccaggatggtggtacttaatatcttgttaagaactaatcaatacagcttgttttattgagaatgccaccttggccctaaaacagattggaccaaggctcaaacacatggaccaggacacagtgggttaatcccatatttaatttattcaactctcagtaattcatattgttggaatcagtgcaacaattaatggcgaaaaatagaaaaacgagaaagaagaatacgaagattttaacatggtttgactaattgcctatgtccacgagaatagggaaagacgatgttcactttgttaaaattagagttacataaaatggtatttatactaacccttagaaatgaaatttcaaaaatacccatgaactgtagcgcgggaagcgttgccccccacacccccaacctattgttcaccatcacaacaaaaaaaagtagaagtttgaatgacaaatgtcatcgctacgctctcgttctactctgcttcgctccgacattttacccttttttcttcatgtcttttcactcaaatatgaatcacatactactacacatgtaaaatttaaaatatttagttgaaatgttagacccttccaattcaagaaaataatcaaatagatgcttattttatttacacagtggaaattattatatacatatatgctttggcaggaatctgatttgatagggcaacccacaagacaaaagcagagggaaaagagaaacagagagagaaatctgatatgatagggcaacccacgagacaaaagcagagggaaaagagaaacaaagagagagaacagagagag

SEQ ID NO: 11047 - DNA, 4677 bp, Vitis vinifera
  Intron number 3 from transcript GSVIVT01010488001 (locus G SVIVG01010488001) derived from phytozome v7.0 (chr-ID chr1 ; pos 21020827 to 21025503)
ctgttgaatctgtacttcaacatccaatacctgaggtacatagatcacttgttgcaaatgtttttgttgactaagatgttttctagtttatgcattgatacatccaaggaaataaactttaaggtgaccatttaatgcaaacatttcatggttcacaaggcctggttatctttgaaatgttatctaagtttccattcatgttgatcataaatgagaagattgattatggagaaaaatgaagatagagtgtattcacatgcatgaattgtatagaaataagaaaatatttgattcctttgtgaaaaattggaaattaatttatttggagtcataatactattccaattacaatatacatgtagaaagaattgcatcaaatgcaaagatgaggcatctttcacctagcaccgaaggccttgaaccaacatttccagatggaggggatggcaagttatgtattcaagagtttagactagtattgtcatgaccttgttattacaattttaacacgcatctacacaattttgagtcgtcacccgttatgaatgttgtgaacttctcatgtcataacttgttgacattgtgtaggtatttgtttgctttgagctcacaaccctcactaatttaaaatgcatttaaacaattcagaagcatcaccttttatgaatgttaggaattacttcctttcaggggatgtgaggtgtctcaactcactctcccatacatatctatcaactcacggctcatgaggtgcttgaatctacacacattcccattgaggattaactttgatacaacctcattactcattggcattgtgtagatatcgttcgcttttatcccactacccttatgactttaaaatgcatctatacaattcaggggtgtcactccttatgaatgctagaaacttttccttcctatgtgatgtgggatgtcacaattcatcctcttatactagcctaatagctgcattgaacgatggctcacgagttgtttgagtccacacactttccaattgaggattgaatctgataccatcgaccaaaccaattggttaacattgtgtagatattatcccctttgaacccactcatggttttaaattgtgtcttcacaattcaaaggagtcatcccttatgaatgctaagagcatttcctcccctaacaatatgggatatgacataacatctatgattggaataaaaaaagcttaagctttgagcaaatttggcaaagaaaacttacttgaataaaggatagaattaagattgatacaaatcaaactaaggaattaagcataaaaaatatttcgttcatcatttgtggttgtgaatgactatttttttttttttcattaggatgggaataatagttggacacaattgttggtagtagggtcgagatattgtcattgagagggcttagtggatccatgatttatgttgtcatgtcctatatcacttagggggggaggagtttttaacatttataagtggcaatgcctcaaaattgtgtagacatgttttaaagccatgaggacggtgggcccaaagcaaacaatagcgaaataatgtccacaagtcatgacaggtggtattagagttaatccttaattggaaaataggtagactcaagcaccttctgagccatgggccaatgggaacgttggacccatatggaagtgtcatttgtgatgccccatatcactttgagagaagaaggtcctgacatttaaagggagtgatgcctttgaattgtgtaaataccttttaaaattgtgagggtagtatatcaaagcggacaatgtttacatacgatcaagagattaggatttatgacaggtggtattagagccattctcaatgggaaaatgtgctaactcaagcaacccataagccatgggccaacaaagatgttaagcctatataggagggtgagttgtgacatcccacattacctagagaggagaagttcttggtattcatgagagacaacacctttaaattgtagacacattttaaagttgtaaggacggaagacctaaggcagacaatatctacacaatgttggcagtaatgacaggcatctttgttcatcaatgagttttgcataatgaattactatcgtaatgtaggtaataaagaagagaaatttaattagggatgaaattgacattttcatccatgtatttcactggaaagagtaatctttagggtcatgataggtttgaggaagtcttgaatattgaatgcttatgattgcatgtttctgtatgttgtccattaaattcatactagaatagatgcaaaactatgacatgtttgagttgaataaaaaactctatattctttgaagatttaaaataacaggtctatagccccattaggtagctcaatagtagtaccttctggtaatgaacaagaagtcccaagttcaagtttctttggtctgtaaatggtatgggtggaggggcaagcacatgctacctgaagtttacttcactggcagttttgataaattcctccctttgattttttttaatttatttttaaataataataataataataaaaaggaaaacagagaagcttaagatctcttaactcttatctctaccatagtgagtagtaaatgatgaggtaaaagatgatgatccaatgattcaatcagaagcaccataatatatgcacttggatggattgcaagactggttaaagacaactatgaggagagactgcttaaccagtctaagtagaagacaaaccataacagaaacagttatacctgtctgagtagaagtaaaaccagtggtcgatgtatcctcagaagcctggagtgttatagaattcctcaatttcccaagtagaaagactaactgaaacttgggagctagtaaatcaggatgtgtgattcctaatgttacattctcacttcaaagcatataaaatatttgttttggacatgacaagggcttaggtatggaatattgatctgacatgtcggtttgtcatttatgcacctgataggtgtgttcatagaggaaaagggaaaaagggaattagttcttaattaaatataagttactttagactttcgtgatttatttcattgttgcatggatatgagtaaagtatccatgctgaaattcattgttaggtatgtaaattttagcctaaggtatcgagtgtccaaatattggaatgaggttacttgcaaatgtctgtctcctaagattgattaaaactaatctagttcctaggcctgacagttcccaaggtgaaattaatcctgctgacatcagtagattgcatgctaatgggagtaggcagttgatattgacattttttttttttttttttttttgataaccgtggatgtcggggtcagcttacgcacacctcgactaatctcacggggccctgaagttaacgactaagtaaacctccagtgaccctgaggggactcgaactagtgaccattggggagttgatattgccatttctccatattttcctttattcttcccactctgagatcaatttggtttaggcaaaacaaacactggaccatctcctaccaaattatatttcccttaacagttcaattatgtgtaaaaaaaagggagggtcatcacatatgtacaggaggagaactaatcatcttttcaatgctgccaatgagaaaaaagttgttgcaaattgaaaactattgagagaagtgagaaggtcaagaaggatatgaattgtgtttacaaaatcatggatcagctgaagatatatttctccatacacctgaatgattggattgggtctttgttgttttagcagtttggttaagcccatgaaatgatgataaatacatgaatgatgataaccagcaagcaagagaaacataatgattgtaggtaagatggtagctaacagcctaacagtttaatgaatacacaagcataagccatcttaacctcccttcaagtgttggtggctaatttggtttcaagtgatatggctcatggcctacaaggctttcttaacaagtgcagggcagggcagtcctcgaggccttgcttaagtggcaagggtttggggctgaagggaaaaaattgtaccaagcaaaaaaaacaaaaaaaaatagaaatgtttgacttctgagagagaagaactagcaattcataatgaaacatgcccatagttgagttttttaatgtggtttattcaagatgattctgggacattgaatttggattggcactgaccctgaaaggataggatgttaacctcatctcccaataattaggcttgatttgtaaatttgtaatcattttgacctataaggatgcttgtaaaactttgattttctcatggccacttggcaagaaatccaactattgttgtggagagagaattggttgacattttaaatgtactccataggctgcaaatggaagaagttgaaagctgcagggtttcattgttattttttaatggtaacaaagttcagaatttggtattgttttgagaaaaccttagtcactctgcgcttcttttgaagataaaacatgattgtttatgactatagttgctgatgtactttcagttttccaagagcttaacttgtatcaatatgcaaatccattttaacctaatgtatgttgtgatttttacaaacagggcc

SEQ ID NO: 11048 - DNA, 2952 bp, Vitis vinifera
  Intron number 2 from transcript GSVIVT01020867001 (locus G SVIVG01020867001) derived from phytozome v7.0 (chr-ID chr1 2; pos 794743 to 797694)
gatcaatcaggtatgcctcatttttctaactattgattttatgatgaaattggcatgttcattcaaattttacaatcttacgcaatggttgcaaccaatgaaaaagctagtacctacaattggggtttagaactgaagattcaacatcagctaacaacatggatacaaaatctaatatcagatggcatgggtaacatggcatagattataaaactaaaatttgcaaagtaattatcaagcttttaaataggaaaaaaactacagaagttcacaaagtaaccatcaagattttaaataggatagaaagaaaggtttaaaattggaactatcatgtacacaaacacaatcaagttatgatggatggaatatgtatgggggtgaatatggaagctaggtttcgtttctgaccaaaaaagaaaaaaaaatatggaagctaggaactatgctagaattgcagacatcaaatcctgcccatgacaagcccaccatatctcaaaattttgagcgagcatactgggattgagatacaagagaaatgctataatgatcaacaaatgagtgtcaggagaactatgaaagtaaacccaaggatgcaaagaaaatttaaatgtaggatccccagatattatttcctagtggaatttaggcaaaaatttaaaatattgaggatcaatgcaagaaagatccatattgacccaatgatatttcaaatgaagtctaaagattgaatggtcttcgctcattagagtgtttgagaaccactttaaaagagtagagatgctaactgtgaaataatagtttcaactatatcaatataggatcaaatgagatgtcctgagttatatttatggggcaagaagtctaatgtcaaacagtcctggctcattagagtgtttaaatgagatatcctgtgtgacatttacagaacatgctatacaatgggagagtggtccagatttaggaacagagcaaaaatctttagaacacgagtttgttttcatggcagggacatcagatatgaaatgataagtggtcttcatcgactattaaaaggcatattattgactgcttaggaaatctactgccgggatctgaaaagaaaagagtcctaacacaatataactgacaacctcaaggacatttccagtatcttattgaccattgcaaggacagctgggaagaaaggcgagagaattcagttataacagcataaaattagagacatttcagtttataattttactagtttcatatgaaaagattgttcaggtataagatgaggtgcatcagagaaggtcagattcacaaataaagcggttgtacagttaaatgcaaaactagaattgtggaagaacagtatcaatgttaaggatccataaataagttcagacaaaatagaatgccagatcacaacttcgctaacatgtcaggttaagatgggcagatggttaagtttgagagctattagataccttaagagtcctatctttgattttagctttgattgtacagaattaacctttcagtttacacttctcaaatctagctgtattatataccattcattgtgacttggaggaaaaacagctatattttaagagaacttttttgcatggtaacttagtgaagcaattctacatgtgtcaaacagaaaattttgaatgcagggcaaagaaaattatatttgcaagctaaatagaatgtaaaagttcctgtggtcttctgcaatagtaaaatgccttttgacatattcatgattggacaaaaaatacaaaattgagtaggatgaatctcttcttttgaaaggacttgcttaagtgacacttatctaaaagaaattctgtatgtctatcacatacttatcactacaaaacttattttggaaccatcaagttggagtttcagttaagagaggaccatgggaggaaatctcagatactgctaaaaagatcttagggttggttaacacaaattcacttccacatcaatgataatagcctattagaagtcgtaatgttaagcaagagaaatcttcaggtttataatctcaacaaagaaatggttgaggaatactctagatgccactatgttgctgctggtttcacttgtcaaaatgatgcattaagcttggagtctagccttgtgtcatatataagttcctatcatcaacagggttttccctataaatatgagagtacaggacacacatctctcaactttgggttactgagaaagtggaagagtacaaaagaaaataaaatttgaatttttttctatcttctgttttggcatcccaaaagggttttggctaaactaagacaaatagtttagatgactagctttgcaccttagtttccttatagcccaatatgctactgaatatgatatagcttagtgcaaaccttcagtgttctatatttcatgctattgcatatgtatttaacaagaaaagagtctccttaatcgcctgggaatattggtataaattactgtgctaagctttagtaaagtaaccaggcagctgtttgggatttttttttcacaggtaccaaattcaaggttcaaacaagaaactgaaaaaaaaaattatccctaaaattttcagaggttacacatcaattttgtagcaggttccggtaactataatctggagtggacagtattaccattttctcttcaaatgttaatcaaactggcagccaaattttaccctacagtggcatgaaaactaaaagggatgaaaagacaacagaaaacaaatttattcatatttttcattaatttcttcaaaattgttacttccagatccactgattatatagcaagtttcatttatttttcttttcctcgattctgttgagcatcattattttcttgaaacttttttaacatttatttgaatattccactgttgcagcaaatctgagtttgttatatacaaactaaaggaga

SEQ ID NO: 11049 - DNA, 8002 bp, Vitis vinifera
  Intron number 2 from transcript GSVIVT01015862001 (locus G SVIVG01015862001) derived from phytozome v7.0 (chr-ID chr3 ; pos 18554612 to 18562613 reverse strand)
taatattttggaactactttattatcggtaagaactttatcttactctttttcccttcttttataggtaatatatttattctctattaagattcattattatatagatgcatttatgaaacattgatttgtattccaaaactttaactattatcttgttttctatatatgtttcatgagactaaggacaaaagtttcctactatcttttttatgttgattcattccactttttattttttaaattgcctattaattatgtagctatttagttatatttatatttaattatatacaaggcttacatatgaagagctgtagaagataacttttggaaggtaacataacagattgttgttttatcttttcaaatttgataaaaaaaatgcatcattttagttaacttgatttttcttagtgaactaaaaatagaaaaataaatcatattagttggtaatagtgagcataatgttatgccatgggaaatagatttaaaaaaaaaatatctaaaggaacaagtgatgaataatgggttatcatatgttaaggtcaaaaaataattttgaatgtttagtcaatttcaacattgtttgttcaataattattacaacattttttataaagatttgagctattttaaaaccttaaaacttatttatccataataaaaaaattaaaaagattataacatttgtccattttattaaactatatccaataccaattgatttatgcattagtacaattattggtaatgttatattcagccatccatgtagaatcttcatcaatgtgtgagataattcaatatttaggtgatgactacaaggaatgaaattgtggagtccttcctccctcattttttgtatttcattctcttgattcttagataacatattatggacttccccatgagcttggccattagacttttagtttgagaaacattatggaggacttctcttgaaatacaaaacttgatctatgaaaaaacattaatttttctttgttttttaaacccatcaaatctattagctaaaaaatcttgtgtgctcataaggaccaactattaaggtgaaacttcattaaagaaagattcataaaaaagactgggcatgaaattgatctttgacacacgtggttcaaaagagtaaggatttttcaaattataaattagtgattcttgtgacctatatgcctttgagtttgatgtaactagcatataattacattcttatacttctagttctctaacatccttcatggatgcaactttcatttctcaactaaaataagccctatgctcatcttaaataccaaacctaagactttgcatattaattatcaaattagatattagcaaatcaaccttttttatagaaagcattcattaaatccaataggtattaaatatattttgtcttagcaaagtcaagagttactttttcctttttgagatcatgagaattgtgcatcttaaagtagggataattatttacctcatcatggatgcattcctctattttttttttcccttaagagatcctcctcctcttgatatcaaggattttaaccacttatatttaatctaacatttgacattgaagtcaagaagaatagaacaagtatcaagaaagaatgtatattatcttcaatagtcaccatccccaccttaaaggttgtaaagtcagtatttatatctacttctcaaatctacaaacatcaataaaatatctaaaatattgaacaataaacaagtacaattcactaaaacaaaataacaaaataaactattgctatcaaaaattttaatacatcatcattgtggtaacaaaatttcgatgaatcgtatcatctttcaagtgcttgttttaaaatgtgtactatgtactaaacatggtttcaaaatttctagtgttggtctaaaattggcaacttcaaaagtaccattcctcatgactttctcaagtttctcataccacaaacacaccctagtaatcacaaactactccttaaaacaccattttcatggaatcaagctcaaaaagaaaatttgcatacttatatcaatattttggatgaggcgtcaaactagtattacaatttcgataattaggtgaagtaatttgttccaaatattgttcaatgagtatgttgttgaagtgggtattgaatctttgataccaagtcttacttgcatcaaatttgtatcaaagtgttgtcaattgtaattgctaaataacaccaagacttgatatctctaaggcctctattgaaattttgatgagtcatctcatgtatcaattttgtttcaatataaaccattgggcttcgaaattcttttgttaacaatccttcccttcacaattttcaacatcaaaatacacctttaggtattgatttggatttagcatttcaactatgcccttttccttgcctttttcatattttcttatggatccaagcttctccaccttgctttcatcattctcataactctaaattgtctttgatacttcccaccaagacctaatccttttttttattttgcattctacactagataaacatattagtacttaaattggaacatagcatacgtttatgctaaaacaaaatgattatcacttaaggtatataaaaattcatttttagcatatataaacatttatttgagagataatcaatatgttttctctaatatactaaatagtcatccaagtgtttaatttgagttctcatcattgttccaaagaaactctatttttttcttagaaatgttgtgaattatgtggattatagagagtaaattttcaaaaatgtgagttcataaagtacttgagtttaggttcaatttaactagcatatatttgtattcttgtgttcaaaggtctcacatagattatcactttttgaacatcattccccatcctttagggcttacttgaattagtaaaatcttatatttcattgctagaaacttttatttaataaatcatatttttgttactcaatcctataattgagaaactataaactttggttgatcctaatagttcctcatctaggattcatttagtaaataatatagtaggactattcatttttctctaagtttttcaaggctactatgcatactttcatatcacatttgacaattttatggcctagtttgttgattcctttggatcttttttttattctacttcaaactaattgttctatctatgaaatatttagtggatttttgtttccttaaattgatcgatatcatgtctcattatagtcacctcattttatcatatagacttgccttcatatttttagaaaaccattatttgatattttagaagtaaacattcaattactcatttattgcacttaacattgtatgtaaataaattgtatttttatactaatttctttttttttcctctacattattgcattatgagttagatattcaaccaaaactgctaattaatgaaaatcaagccaaattaacttggattacattgttgattgatttaacatttttatattaggattggatattgaagatttgtcacagaaaaaggatggatgttgtggtagttgttctttgacgtcttggccaaggtgattgtttgataatgatattttcaacatttacaaataattgtatttgtctttatttcatacttcttataatactctacttagtttagagtaacaattatgtggctagatcgaagtttacttggttttgttaaaatatgtcttagatatatgtttgttttgtaaattaaaaatgcattaaattatgatgtgatattatccttggaggtagagtgaggcttgagagagagagagggagagagagagagagatttcattatatgtatttctttatttcctattccttatgatgttctagttagttcaaattaagattttgagatatatttaaacatatgtttgtttgatgaccaaaaagtactttaaatttatgtgtaatcttcttcttaacaagggatagaagggaaggaaaaagaaaataatgtgagaaaaaaatggagtgggagagagaaatagagagtgattttttattatttatgataatgaaattctaaactagtcaaaagacaaaaaaaaaaaaggatacttttatttgatatttggtggttcatggttgcttgtgacaaaagtcaaaataaagataataaacccttaaacaagcattactttttttgaatgtgttttatctaggtacctctacttatctttggaataatcatgtcttcgagtattggattatgtgagacttaagttatgccatcttgaagatcatttcatctaattagaaaacaatagtataggatttttcatagggttattttaggccattaagatcaagctagtatccttggaatcaatccaaataaagaagaagacatgtttaacatgaacccacccaactgatagggtgttagaattcaccttaagatggtaaatgaaaaggtcaactcttttttggtagtttcttcacttcttagaatccaaatatgtaaggaagtaaggcttattatttggaagatagtccaatttaatagtaataatttgatgttgtaggagatggtctaaatgggtcaaaccatataaatcattacatcctttatgattattatttttttcttttttcttttttaatgtagtgcacaaggtacaaactctttagtgatgaggatgtcctttatggaaattaatgaactcatagagaaaatataaaatgaaattctaatatacttatatgttatcaatagagttagggagtttattaatcgctcttaaataagtatactatatggcagagtccctaaatataaaaagaagttatagataagaatctcagtgagttgagtattatccacgaggagatggccttagaggtataggggaaatggaaagctttgaaaagtgagcaaaaaattttaaggtgaccctatcattcaattgttaacaaaaaaaatgttgataaattttcttaaaacaagggtaaaagggtaaaacctaggtgaaattaaaatgaaattatatttgaaaagatttgcgaaagttctgatgattgaggggtccctttagctcctttacttttatgaaaagacccttaatcaaattaagacaacttagattacctacaagtattctcaactagaaggttttcaatacaagctatttttaaccaatctataagtctcacacttgtgagttacacctttatatgtatccttaaagtttccactacttatttgtttgttaaaccattcctttaggagctcaataagagttgtcttacattgaaaatggattttgactattatgcacttgagatactcttaaagaggctcctaaactcaaatttttaggcatcaagaaccaatgttctaatcaaagcaaggaagtctagattacaagctaagtttatcaccaaacacctaagatttgagaaacacttcatggacaaaagaatggtcataagggtctctttctcctaaactagattgccatatgcaatgggatgtcgtcaccaactctaaaataccttaaataaaataccacattgggagtgtgtttatcacctatcatgcacctaatatgtgattttagccttattaaatgctcaacttatgacttccatcacttataaatatcactaagccaatgataaattgtttctatttgaaaaaaaaatgctcaatcttcaaatatatagaagaattatactaaagactatcttcatcatttcaatttaataaccattatggttttaaggagtattgttgttgatgcccatgaaatatggcaaaaatactttttcaatggagaaagttaaaagctaattttgaacttcaattagttgagaaaaaattgtctcaaagtagaaggcataggtgattttggttgctaaagggagaatataaaagaagaattatcatggtgaaagtaagtttggatcataattgatgtctagagaaacaagtacttcaattattataagaaaaaatgcatcatgaaaaactatgtagagcacaatggacatgagaaggaagcttaatcagttatattgaagaatcttctcaaaagatcatagaaccttgcctatataaaacgttgcatatctaagggcacaaaaaatatttaggtatacttacaattcaagtcttgaatcttaagtagtatctttcatgaaatcttactctacaccattataagaacaaatattttagcaaatcaagttcaatatttgaatggtaaaacatcactagtctgaactccccaaagttgaatacttgcatccactagtcatttatgaaaataaatctagaacatctctcttcacaggcctttaggcaaattcataagtaccaagtttgatgttgctacaatgtctaaggatttcattttgttactctaagaatggattatgagatttttatttctctttgaaaagaatcctttccatgtcttttgtctcaaattggaaatataaagaagaattaataaataggggaatataacataattgtatctcaaaattaatatttgtaggaaggggtttaatctaaaatagaattctagatttttgaagatataaagtttgcaatcattttaggttggcatgaattaagaagcttgtgtcatccactattagattggttaacctaattttcttgcaagatcgacaatgaaaaatggtcattagtcaaatggtaaaatcttttatcctatcaatccaatcaagagcttaatcaataaggatgattttttataatcttatttttatcaatcctaattagttttatttgatggatgtttttttattagaagaagttgaccacatagatgtaaggttcaagtttggatccattttggtgactagatatggctttaaggacaacttaacgtggtggagatagaatttgcccatggacaataatggttccatccttctacattgaaccaaagcaagtctggaaatttatatatcattctttcttagcaagcttcccaacccactcattaaaccaaggccctcaaaccatcctattttacttagtataaggaaaaggtaagctatctatcaagatggaccaagaccatgttaaggacctcaagctttattatcgagtgagatggaactaaaacatatagtttatatgttcttagtcacccttgaaagaaatgtaaaatatgagtttatcaattgagtgactaaattcttcatgatccttgttgtgaatatatcctcttgatgaggtaactaggtgcttactcttcatggcctcttggaaaaatgttgattcatataaccacttttttgagaagtgatgaggatgataattgaaggaacccttgatggagtgagaaggttctaatgagacccaactagtgaaggttaattaggaggatctaaccttggcatacaaagtacacaactaggattatgggatcgccatatatgcatgtctatgtttaattatatcctcatatatagatatatatacatacacaagcacatgttcatgtatgtcgacactttacctttcactttaaattaattatattattaaaactcaagattgaagtattaaagatcaaatttactcttttcaatttacaactcatgttcctgaaacaactaccctctccacgtgtatctattattggaaagtcttactttaacatttttaataacaaaatttgacttcactttaatgatagtttgttcatagcttatgtcaacataggaggttgaaatcttgacttgtgcttgaattcatagttatcattgtgctaggatatcttaatttgaaggccatcaaataagttgacttttggattgttttatgtacttaaaaggaatatttaattttacactagcattttgtttatttatttatttaataatgtgaggagcatgagaatgcaggaacattgttctacctatcggtattaaaactaaag

SEQ ID NO: 11050 - DNA, 3753 bp, Vitis vinifera
  Intron number 4 from transcript GSVIVT01026457001 (locus G SVIVG01026457001) derived from phytozome v7.0 (chr-ID chr4 ; pos 23263902 to 23267654)
cgttatgcttactccacgccttccttctcacctctattagtgctcacacttgcatgtgtgtgtgtaaccggctgctcaaggtataaaccaaccagtaggctcgtagatacttctattaatatgatgatgtgatataatttttccatatgctataatttataaaataactgatcatatatgatactttaaaacttcaagataaatattaatatttatgtacatttatttgtgtgatgaataccaattgattttaggatatctttatcttagaaggagtaacaaataaaaacaaagaatttttcgaatgctgtatatctttcttaaagatagaacctttttacattgagaagaaaatttgtacaagaaaagtttaaaattacaatcctcaagattggttatatataattaaggtatgtatagcaagcaaattcctaaaatcatgcaatgaggtcaagtatggaatctaattaaataaaatctctaatagcatgccaaacaatctctcgaggtactatattggatgccttccctctaattgatgctagggaatggacaagtatcaatttgtcaactaagaattgatgtcctatcttcgtttaggacttcataaagatatcaataaatttaaaactctatggaagcatgaggtagtgtgatagtatgatcggcatatgcatctcaaatgtagtgacagtccgcttttgtgtttagttcattcatgaagaataggatttacagtcattcgaatggcactcacgttatcaacatataaaggtgtgggatttggttaaggaaacctaatacaaatagcatttgatgaagccaaataattttagaataagttgatgagaaagctctatattccgatctataaaagatttagacctttatttatttattattatttttcattttcatgaaacaagagaaccaccaacatatacacatgaacctatattggaacgttgggaattaggacgccttgcctaatcaacatcattgtaagctttgagaataagaagtgatccaaccttgtaaaatatcccatgataataagtcctaagtaaatagtgaattatccttttaactcctacaagatgtaaatgatgaggttgatgcataaattgagactcattaaattcacaaaataagatatgtttgatatggtaattgtcaagtaaattaggttcctaactaacaagatgtaaatgatgaggttgatccataaattgagactcattaaattcacaaaataagatatgtttgatatggtaattgtcaactaaatcaagttcctaactaattgtcaatatgtagttgaattcaaaagtaattctccatccttatttgaaaatttcacattcatttccaaaagagtatccataggtgttgaattctcaagtccaaccaaagcaatcaaatctttggtgtatttatgttgattgaaaaaaatatgtgaggtgaaagacaaatttcaagtcctagaaaataagtaagactccaagatctttcatatgaaaagcgaaacgtaaaaagaattatagctcttgaatacgatgactattagtccaagtgatgataatatcatcgacataaataagaggaatggtgtaccaactataaaacaatgaagaaacgtggaaagatcattggaactatggttaaaatccaaattatgtagcgagtggtgaaatttagcaaacaatgcacaaagagcttgtttaagcccataaatataacatcaaagacgacatacatgagttttagaaccatatcttactgtggaccctccattttgttatcctagcacatgtcctattaggtatttgtttggtactttatagcgattttttggtgtcccattactactcatgtagcttatctttttaaaaataagttataaaaattataatattttaattatttataaaatatatttattttaatgtaattaaaaaatttaaaataatttttttaaaaaaattaaacaattttttctttttttaaaaaaaactaaatgaggtaggatgggacgagtatgagaatttctcatacttgccccacgttgtttaatatttttaatggggggaggatgaaaattatttccattaaatgggctgaattggaatgagggcgacatctctcaaacttgtcgtgtcatccctacacaacatccttgccttgcattccatgatactatgaacattctgtgacactatgaacatgtacatatacaattttacaaggatgcatattaagattaaggtacaataagaggcaccaatgtgactacaattatttgagttagctctatgcctctctccatgatattaattttgttattaaatcaatggttgtaaaaacttattttaattcattaattaattaggttctaatattaaaatataacattatagttgttaaatgcaaagttataataaaaataattaaatctaactataaaagcatattaagtcttaaattagatttaaaaaaagggaggaaaagaaaagcttaactataagagaatcattaccatataaagaacatacatgtacgagcaagttaaatttccctactatattaaagaagggcaacaaatcatgactaatcatgttacatctctatatatatcttatttctttatatttaaagatctcatttaattgtacgtggatcccattaatttaaatttaaatataatgtttttattttatatcttggtttaactaccaaatttaatagaacttacattaaaaatagaattgatctagtttagttgtcaattgatctcattaattcaatctaaatataagtttttattttatattttggtttaactacctaaattgaatcagacttatcctattaattcaatctaaatataattattttttattttttattttataacttggttcaactacttaagtttaaccagacttacattaaaagtcaaatttaatatccatatattgtatttaaagatctcgttcagtagtcaattcatcacattaatttaatctaaatataacattgttttattttatatctttgtttaactatataaatttaattggacttatattaaaagtcgaatcggatccccttaattcaatctaagtataattttttattttatatcttggtttaactaccttcatttaatttgacttatattaaaagtcgaatttaataaccacatttttgtaaaaaaagatcttgtttagttatagtcctcgatgccattaattcaatctaaatataatattttattttatatcttggaattatattaaaggtggaatttcatatccacatcataagttatcattgtataaatgcatatttccatggatttggtggtatagtaactttaatataaagttaatgttaaataataagattgtcttccttaataaataaaaaaacaaacaaaaaaacaaaaaaagttgagtaattgggaagttgacagctggtaattctcttaattcaatctaagtataattttttatttaatatcttgttttaaacttttaactacctaaatttaatgtaacgtactttaaaagttgaatttaatatcttttgtatttaaaaatctagttgtcaattgacagctggacgtaagtgcttttccaagtaatcaaaagcaatccaacgtgtgtacgcattgaaaagccagctgttcaaaaattacacctcccaataaatgtagaccaaaaagccgccaactgtggaatcgcttttgaa

SEQ ID NO: 11051 - DNA, 4606 bp, Vitis vinifera
  Intron number 3 from transcript GSVIVT01018326001 (locus G SVIVG01018326001) derived from phytozome v7.0 (chr-ID chr1 5; pos 11005673 to 11010278 reverse strand)
tcttgacctaattttggacgttgagtcctctcgtaagcatcgtttctatgtttagctttaatcactttgaaatgatgtctttgggttatagctctaagataatatgaatactgtgttgtcaattttcttttgattttgtataattgaacttaagtttacctttatattaaagcatgcaatttggtagtactatttgaaaacagagtagcaattttcttctatgcattgttgttaaaaacttatgataaatgatatgctacaatgatacaatacatttttttttttttatggaaattgatatgtatggtaatctgtagcttaagatgcatatcttacaatacatatacgatatgtgatactatgatataacgatgcatacaactttaattatttttcataattttttagaaaatcaaattcaattattatattaactgtttaaaatgtacaaaaaaatgtttgaaattgatcataagagaaaggaagggtcaataatcctacataaaatgcgacattcttgttgtcaaaggccatagtagaagttagtaaatttattcttacaatgaatattggatatttttcctttgaatggtttgaatattaacattgaaaataattatacacgtgtctgtgtgtgtatgtgttggacaaccaattttccttaactcttaagcttttaggatttggacctacattgtatattgctactccaatgttcttcctcacatgtgcttcctttgtgcttatatgcaggcctaataaattggggaaataaagtggccttttttttaggcttaatagattgcggaaatatgaacacatggtctcctaccaaacaaggctctaatgcaatgttaaacaactgattttgcaaaaagcttaagtttgtacatatgactagttaaaatttggaactaaaaatcaaataaaaagattttaaagtttatttttgtggattttgttatgaatctatttattaaattcatattttctttaattgaactttttaaaactctagtacttaatgatttcatatggtatgatgtagtttaattctttaaatcctgttatattttataaaattggttatatattactcaatacttcatgcatccaatatatatttacatgtttgcatatttttctatttattttttactgtataaaaaaacttataatacatgatatacaaaaaggaaaaagcaaaatgatgcatgatatgttttaccacttaataactaaacttcaccatgaaattagtaattttaagatacaattacaaaggtctggttctaagcatgggaagttaatttcacatcaattttccataatccactaagaaatgtactgcccaagaagagttgctgccctaaatatttttattgttatttttatttaatatccttgcaaacttcgaacaaacacattctttaagaaatcactcaagtgatgatgtgagtagaacattttgaggagaataatgagtggtatctaacaagattcctggattatagataataaagcaccaaactacttaaaaatattattgacatctgattactcaggaggaactgtttaaggacttccgcaatttgtttactttaatgtatgtttcttactggcctatttagcatgtctgaacctttcatgcatcaatcaagatgaaaatccgttgaatattaaactgggcttgccatttttcttgattgtatatgttagtttatgcctcatatgaagaaataagtccaatccctagtaaagaaacatatggaatcattccaaagttggtcgctacagaagaaagccaaaaacatgggaatagtcttctcagtcctaaaatctggctttcaaatcaaccttggaagcataggtcatatcttagtactagctttgaagtgtctagaaaggaaaacctccttcataagagggatagatagagatttactgactgcatctagaatgctcatgaattaggcattgaaggttcgtagtttaggtcttcaacagccaacattttaaccaaacaagggcattcttttggggtgtcatacaggtgcttctaaaaaatttcccgagctcaagtaagctgtcatgcaaaagaaagactaactacataaagatgaaatctaaaaagtggccaaacacaatttttttaactcaacattgtcaacctcatacaggctaaaagttgtcaagttgattccaaattttaatctcatcaattttctaaaagacaaggagatcaaacaaaagaataattgttcctaatattaatttgtttaaggtaagatggtgatgttttgggccaatagtttcccaaagaaacaacaccgtgtgtaccatggtgctctccttttgacgcttttagtaatactatatccatttatctatcaaaaaaaaaaaacaaaagtttcctaaagaaacgattattgaggtttcttttttaatcaggaactttgatgtagaacactcctaggtgctgtggactaaggcttcattgattttgtattcaaggcagggaacaaggaataaaggttatgggattgggaaaaatataagaagtgagaaaataaagaaaatgtataaaagaggaaaattttagaatctcactaagacattgaagcattaaaagacagaagattataaaggaaagtaaaaggcctatgccattttaactcttcctccaagccatgatcaaacttcacactaaaagaattatcaactagcaaaagatcaatagaccaagcaaaaaaagatttgagaaacgagtcctttgccatctgctctaattactccacaatagagtttctattgttacattctttttaaacacaccaaaacatggaaaggaggtcattgttaacaccttcctttggatgaaccctatgataaaccttttactttgcaggaacacttgagaaaaattcaaacaaggaaaatagtggatatcagaacatgcacgacttttcataatggatgggggtataattaaacattgtctccccttgcacaagcagcataggttaaataagaagcaatctacacttacgagtcgattggttgtcctaaacctccttagttggcaggaaatagataggaaatctccaaaggaaggaaattatggaaggatttgacagggaaagaaacccattatttttacacctttttgccaaactatccttactgccccataaacaaccattttttaaatgtattgaagaatcaaactagccatctccaattcccattcatgaaaactcctatagatacaagtattccaatggccctaatccaccctccaactcatatgatcactattctaacagttctgttagaagatatggtaaagaagtagggaaacaatttcggcccctgcacaaatatttgttttagacaataaatgaactcaatgtcttcaaatggcttcccccaaacctgctcagaaacctccctcacctccctggaacaccaatttccattcacgtgctgaaaattaccagtttccatccgttcacctgcatacacccactggcacttactcagtaatccagtaccaaggatagaaataattctgattttgaatccactcttgctcttacttggggaaatggttgcacacttaattaagtgctattttctgacccactagaggtcacatttaatcttcctcgggtgaatcttcaataccataagaatcacaaggaaatgaagtaaattggtaaactggagaggatacttttaataattgtgattctccctttttggccagtattgccttctacagaaggcaagctccttcttattgaggcatagaatccatgctgaatgatatcttatggaccacccaaatggaggcctaaataagctgttggcttactgttcacccatgcaacaacatgagctcattcatgtcagcaacatccccttccagtatgagcttactcttccctagattttactataaggcaagacacctcattgaaatgaagaacccgcctcaataattcaactaatctctctagcttgcaaaaggaggaaagatggattattgtggtgacaaatggtcattggcttttttcataatgccatcctccaaatgtggcttaaacttgagatgtagggttttgatgaaaggtggggtcggtggttgtgtgcagattgaataaggtgggagcatatttggttattcaactatttgccctacccttgccaaaagaagaaagattgattgttgttttcataatgccatcctccaggtttggcttgaacttgggatctggggtcttcatggaaggtggtcttatagaattcctagtagagatgttaagtttgagacacattctctctctctctctctctctccatatgtgtgagtttgcatatctggttcacacatttcctatataaaaaaatttgatactccctctctgtctgtgtgtacaattcctatataaaaaaatgtatagcttgttgatatcgccatattgggtttcatcagttgtgcattccttagaaccttagatgttgattcttgactacatttgcaccatcaaaaataccttctgactgttcatgtaaatctcgactttctgtgcttttaggtgat

SEQ ID NO: 11052 - DNA, 2736 bp, Vitis vinifera
  Intron number 5 from transcript GSVIVT01022933001 (locus G SVIVG01022933001) derived from phytozome v7.0 (chr-ID chr1 2; pos 17842645 to 17845380)
cacattccacgcattgtggtggacgaccaagttctgtaatgaaggtacttattctgtcctataaatgatttccttctaaagaaagtaggctgtgattgaagctttctagtcataatattaatatcttttattatttgtcactttcctgtgctgaaaaaatattacaccaatttatgtcatggcaggcctaaataccaattttattttgatccataataaataggaaaaatattctttaaattttctaattattataacaatttcttgctttctttcagattatctgtatgtctcgactctggcactgattcaacatgtcatcacgaggaatattttaagactcacttgcttaattagtgccatgaaaaaatgatgcttaaaaggcaagcatctcttcaggtctagatttcgtaaattgagtaattttgtggacattgagtttgttttcactggctaatttgctgaactgtcatgacagattttttttttcccatccaaagactcatgagttgatactcccctcgaggaactacagaaagctggactctgttggagagtaaagtatgtggcatgctctatgattccaattagtaagacatttcaattgctttggtttacctttctcagctacaaattacaatattcataatctcacatgcattaattcttcaggttctctgaggctgcatctgtgttgatatcttagttcttctctagaaacaacaggtatattttgattcgtacttttcataagctgacacattgtgtagttccatgattttcaaaacgagataaacctatcatggcaggcctttgatcctagttttctcaacaaattcaagctgtctagaaatgatccttccaatgggaccattttttcctgtgagttcagagtcatgattctctttctggtagacagtggcagagatttttttttcccatccaaagactcatgagttgatactcccctcgagtaactacagaaagctggactctgttggagagtaaagtatgtggcatgctctatgattccaattagtgagacatttcaattgctttggtttaactttctcagctacaaattacaatattcataatctcatatgcattaattcttcaggttctctgaggctgcatctgtgttgatatcttagttcttctctagaaacaacaggtatattttgattcgtacttttcataagctgacacattgtggagttccatgattttcaaaatgaatactaaattctactgaagctaaaacaaaaatcttactgcctgaggttatgtctttgatgaattttattcactatgtagggaataaaaccaaattcccaacccgtgagaaacaaaaaattagagaaaaacccatgccaaagaaaaaacaatcacacgcacaagacagtatttacgtggttcggcaatttgcctacgtccacggagttgcagggatatcactattatcagggaagaatacagagtacaacctggcggctacaatattctctatatatatatagcacagcaaccctaccatactaaaaaaccctaattacaaaaggtggttccacaatgggctaaacgggcccaacaggcctcaataaatctcccattaaaaaaccatgcaatattattcgggtcgggtcgtcaaaccggatcaaacaaaactaggctccacaaagcccaacacactatgttcatacggcctccgagtgacctagactttagcatgtgccttagtgtacacattgttttcatctctttcagctttaattgatctgcagatgttcagtgtaggcaccgctcatctcctactcatttacatgattgccatggacctttgtgctttactttgttaatgataaggtaatcataatagtacattagttgagcatggctgcaaccattttcatattcaggcttttcttgtgcttacaaatgataatgtgagcttgaattttctgtttttaaatttgtgattctgaggcagatatttggagaaaagagaaggcaaaccatattcaaagtcatagcactgtagagtatgcttttgttccacccaagtccaagtcaattgagttaaatcttattaatacttctaggacacaggttcaaatcatttgattttccaaacttgatgacagcatcaaattctgctgattaccatgtgaaccatttttattttcagatggtggtattttgaatcttcagagcagttccaggaggaagctagctttgccaaagcctccctgtgcaatacatgggcctttggttgcaagtgagatttgaggattttattttatcttggaagacctcaacagatttttttgagttttgagctttgagctttgagcttttactcccaagtatgtgcaaagaagaaagaaagcaataataaagattggtttactgaagttttatatggaatgagacccaatgaaaaaaattgtaactattggtttttcagccttgaacagtatagttttgtttcccattttgttctttgagcaatgtatttgtagaatcatacattttgaagttactactgattttgtgtatatacatacatataaatgatgttctcttcttgattcatatggcattttcttctttggtatatgccgaaaagtgacaagtttgctctagggttttacttgaagtgaggttagatatggttttttttttttttttgtgtatataagtgtttacatcataggcaaatcacttccaatctag

SEQ ID NO: 11053 - DNA, 2655 bp, Vitis vinifera
  Intron number 6 from transcript GSVIVT01018991001 (locus G SVIVG01018991001) derived from phytozome v7.0 (chr-ID chr4 ; pos 18016988 to 18019642)
tcagtgcatttggagtcattgtcacaaatcccaaggtgacgcctcttttgattttcccttttttgagaatatatacacatatattttctgttatatggaaccagaattggaatctctccccatccccaccctaacctcttgcctcttgagccaagcctcaggggtccccttccattgacttttcttttgttaagatatctgaaagtccagaaatcaaataaataatcttcgtgcaagaaattcttaaatgcatgttgtaggtttaaaaccattgttattcagcttattagcttatggtgtatgttagcatagacaattacaccaaggatctgtatttgttcataaatgctcctcacagatgagaaatatctggagataacttgatttctttttctttggccactgtttgtcactgtcatctataatgatagtaattgataaatcaacaatgtcagtgacatggcaattttatgggtaaggatcaaaagagggtggcccctctttgcttgtttgctacatatggaagaatgcaataggagaatcctggatggcttggagcaaataaattagcaatgaaggactgtgtttcctcagatctctatttgcttgggttaggggttttgtagctcatgttgtgtagctttatgcatgtcatccaaattcgtctgtggttgagccagaaaggaataactgttgctcatggtgtggcttcaccagtgttctgttcaaatttctatttgatttatctagccagtagggagtaattgtcactcatgatgtgacttcagaagtgtgccatgcaagcttctatatggttcatctagccagaaaggaattaccagaatcaatgagtttataaatggttggtaagaatccactagggagatggtgcatctttcattccatgtcagttgcctttgctcatataagcatttctctgcctcttatctatctaaattggaggataattgctccctgctctccttaggtttctgcttgcaatctgcttccttgtgactccataaaaagttacttgtgatgctggtcccatggctatcctaggtgaacttggtgaccataggtatggggaatcatgaaaataataacacttccctttaaagcttttcactatgataaggctaatagggtggaatttccatgtagtgagtttgagggcagtgacaaaattgggaatccttgacagaggcaatggacatttccagagtaatgtgtttggacttatgatctacgaatctagatgttggacttattagataagaattgcagttagattttggacaaaatttatgtgctgtattagtctttctatatgctgcagattctttgttggtcttgttttgatcatttcctggagtaattaaagcctcttttgtatacagtgtactctctgctctgagtttcctaaaatttgtttgtattaaggaaaaaaattgacatacttgaagattttgttgttggatccttctctcatgcatcttgcaattctcttttgtttctcctttttttttccttagtttgttatattataatacattgtcatgcatgttactgcttttaggaaatagcacacacaacacatgtgcaggaattattgttgagaagagttaagaaatgtgtggagttgaatgtgaagtttgtaaaagtgtgcatgtaatattgttgagagaaactaagaaatgtgcgggagttgagtaataaaggttgtaagagttgtgtggaagagattctcatctttttatttggatttagaaaatctcagtggatagaacgtttatttagatttctcttaattaatattaaattacatgagaatgatatctttcatatgtcaattagggaaaatggatttcagaggcaggaggagagactaaataggacaaacactttctctgtgatacagatttgaaactgctaaccttttgatggccatgacttttgcaatatggatctcttgtatcctagagttttataccccgctttagaaggtggctccttcattatccatgtagatgagatagtacaacagttgttttgtgcttcatactgggatgcattaggagctcaggactcgataggatggagagattatggggtgtctatgaatgctccattggataattcttccattgtgtatttatagtgagttgtgggtcagatactgtccaaacttgtgtttgctgcatatctgggctaaagataaaatcaaagtgcttgtgtaaattgtcacttgggttgacttgaatttgaaaatctttatatataaaccatttaagaagttaaatttgattttgtttgacagtaaaaaatcctgaaactacttaaatgcattctttcatgaccatattttctataccatttagcatggtcacattaacattcaattgatcatatggttcggaacgtttatatgccttaattttgattccagaggattgggatgtaactgtgtaaataacccatttaatggtgggctctggtctcatccttgcacatctcatgcatcacaaaaattgtgggcttaatgaaatgtattaaaaatgcacagggacaatttcatttgtgttctgtgctgactaaaatgatgatgcttctttgcaattgaatatgacgtttggcacttctccttgtcagata

SEQ ID NO: 11054 - DNA, 4826 bp, Vitis vinifera
  Intron number 2 from transcript GSVIVT01025280001 (locus G SVIVG01025280001) derived from phytozome v7.0 (chr-ID chr6 ; pos 2483300 to 2488125)
ctgcagcagcaaaaggtaatatcattttcctttatggcaatcaaactacaataattttgcaaatttagtctagactatatcattattcagcagttcattgttatctcattttccaaattccactatatgatttttgttttctggatgagcctatcttgatcaaattcagggtaagtatggaggagtcctacttccttgtctcttatgatatgaatataccacaccaattcatcacatatagatggtgagattccattgatatagaaccaattgcaatagagttattggagggtcccattggattgcatctagtgggaattgaacctatgaattcaccaattatgagttgaacactttaatcctatactaattacacctgtaactttaatgatccaattgttgaatcaaatgggacctgtaataattcctatcagaaagagtagaagtctttcgaaaaacattgtgtccttcattcatatattggatctcatcaaaggaaaatgactcatttgaaaaatgattttctttttttttacaaaaaatccttctgtcctatcaaaatgtaatgactaaaaaagcaatatatgtgtgtgtgcgtgtgtgtgacttaggtacattggccaaaatggaatgagatgatgcattagggcatcctacttgtatgtgaacctgggattaatcaaggcaccatttgcagataatgtaagaaaggaaaaaaaaaaaaagtgttatcaatttcaaagaattctttgcttaggtccagagtcgagagagagttatgaaagctagagtgttccattaagtatgggtcccccgcaaattcaggaaaaatgagcgggaaatttgttggggagtgttcaagaagtgttgatgttaattagaattctctcttggaatgtcaggggaataaatgataaggacaaaagaaaggtagtaaaggcctttttaaggttacaaaaggcagacctagtttgtttgcaggaaacaaaatgcaaactcatgtcggatttggtagtgaaaagtttgggttttggtagatttgtgaattggggaagtgtgcactctagtggacaggcagggggggcatcttagttttctaggattgcagaatgttgaagcttcttgagatggaaacagggtagtattccattttgtgtcggttcaaaaattgcaatgacaatttcatttggatatttaccgttgtttatgggccagtccattattctgagagagaactcctttggtccgaacttagggatcttaagggtttgtgaagtgatccttggtgtgtcactggtgatttcaatgtggttagactgcccaatgaaaggagaaattgcctgaatttgtgttcgacaatgaggcgtttttcagaggtaattgatgagttgcagttgagggatctgcttttggttgggggctcttacacttggtgtggaggtttaaataacagatcagcatctagactcgatcgttttttggtctctgaggactgggagagtcacttctccaacctttctcaaagcttgttgcctaaacccacttctgatcatgctcctattttgttggatggaggaggaattagaggcaaaaaaaaaccccttttcgcttcgaaaatatgtggttgaaagtggagggcttcacagacctagtcaggaagtggtagtcttgctacaatttcagcggatcctatagtcacattcttgcttgtaagctaaaggctctgaagcaggatctgaaagtgtggaatagagaggtgtttggaaatgtctctttgaataaaaacgtcgctcttagttagattggtttatgggacgccaaggaaagagactgtggtctctctttaaaggatagtgaggccagaagatgggttgtggaagagttcagcaagtgggcagtcttggaagagatctcttggaggtaaagtcaagagaattgtggttgaaagaaggtgataaaaattcaaaaaaatttcacaagatggctaatgctcgaagaagaaagaattttctttcttctattacagtggatggtaggaagttgactgaggagactgagatgaaggagggggtggttaatgcattccagaatattttgtcagaaaaaggggattggagaccaagtatatcggggttgcctttttctttcttggatagtgttcaggcggggctccttgaggatgccttttctgtggaagaggtccagactgcagtctttggtttgaatggggataaagcccctggaccgggtgggtttactttggctttttgacaatcttgctgggacatagtcaagcacgaagtaatgggcttttttgctgaatttcacagttctggccgttctgagagaagtttaaactccacctttattgttctcattcctaagaaagggtgtacagatgatttgaaggattttcgtcctataagcctggtgggaagtctttacaagattctagctaaagttctggctaatagattgaaaagagtggtgggaaatgtgatttcgaactcccaacatgcctttgtggaaggtagaccaattttggatgttgtccttatagcgaatgaggccttagattcaagactaaaaagtgcaaagggtggaattatttgcaaaatggatattgaaaaagcatatgatcatgtgaactggggttttttattagcaatcttggataagatggggtttgggactaaatgggtgaattagatgaggtggtgtatttcttcaatccgtttctcaatcttgcttaatggttctcctgtaggttttttccaaagttctagaggcctaagacagggagatcctctttctcctttcctcttcattctagcaatggaggcgttgtcttctattttgaagagggcttcacaaggaggctttcttgagggtttcatggctggtgggagaggtggtgagggtgtgggtgtttgtcatcttttatttgctgatgacacactagttttttgtgatgcaagcaaggagcgtgtggaggtcttaagttgagcttttatgtggttcgaagcgatttttgggctaaaaatcaatcttcacaaaagcgaattgattccaatgggggtggttcctaattttaaggacttggctagggtgttgggttgtaaagtgggttcttttctttcttgttatttgggcctgcctttgggagctgctttcaaatcatctcaagtttgggatgtagtggaggaaagatttcagaaatggctcgctttgtggaagagacagtatttgtccaaatgaggaaggttgaaagtaataaagagcactctttctagcctcccaatttactttatgtccttatttatcattcctcgcaaggtgagcctaaggttggaaaagattcaaagagacttcctatgggggggaggagcttctcaaagtaagccgcatttggtgaattggtgtattgtttgcatggagaaaaaggatgggggcttaggtatcagaaacctttctaggctgaataaggctcttcttggaaaatggtgtcggagatttgcttcggaacaagactctttatggaaacaagtgattgtaaggaaatttggagaggaagatggacgttggtgccctggcgattcaagggagagtcatggagtggggctttggaaggcgattaggaacgggtggatggagtttagcaaaagggtggattttaaggtgagggatggtagaggagtgcggttttggaaggataggtggtgtggagaggattctttggaagaggcttttccaagattgtactctcttgcctcctccaaggatgcttgggtagcttagttatgggatcagtccgggaatttgggatattggaaccctgtattcacaagacttaacaatgattgagagatggaagaggtggaaacttttttcagtaggttacatggtcatgcgcttaaaagggggaatgaagatgtcatgtcttggagggtttcaaagaaagatttctttatagttaagtctttcttctcatcaagatttctttacagttaagtctttcttctcatccctagctccttgcattggtagagagttcccttcaagcttagtgtggaatccttgggttccaaagagagttagcttttttgcttgggaggctatctggggaagaattctaactatggatcaactaaaaaggaggggttgggccttaccaagtaggtgctatttgtgtaaagcggatgaagaatcaacaaatcatgtgcttattcattgtcccaaggcagctatgatttggcatcttatttttgctctttttggtgttcattgggttttgcccaattctatcaaggaaaccattcttggttggaacggcacctttgttggaaagaaaagaaaaaaggcatgaaatgcagcccctttatgcttattttggactttatgaaatgaaagaaatagaagaatctttgaagacactgaattagaagatcaagctattttacggtcttttttgtacatgttttcggattgggttagggttcatgtagattgtgcttcatggtccattttcgatttcattgattggttgggttgtaagtaagggttttcttgttttttcttcccctttggccttgttgccttgtatacttcgtgtatactttcaggtgtacttcaagctttctttatacaattgtttttacttatcaaaaaaaaatttaagacatggctttgtttagcaaattgacagatgatgcataattgtcatgctttaatttgttccctggtatttttgttttgatcagactgaatacacttttttgttttctctgacagccttatatccagctcctgcttatactacgccacca

SEQ ID NO: 11055 - DNA, 10341 bp, Vitis vinifera
  Intron number 2 from transcript GSVIVT01035657001 (locus G SVIVG01035657001) derived from phytozome v7.0 (chr-ID chr4 ; pos 3060989 to 3071329 reverse strand)
gtaagaatccaaaagttcaacttcttgcactgacggtaagctctacaaaaacttaatctctttcttgactatgtaaatttgatgaatgggttgattttcaaatttctgttttactgctctgcaaatggccttaatgtcattttaacattgaaactcaaaattttcattaccagcaatttgttttttcattttatcctaggtttctaataatccttcatgccttacaaccatatgtattggactaattttcactcaagattactcaacattttgtcatttgaggttccatccctcaatcactgttgaataattattgtttgctgttgaatatttaaacctatccaccattgatatcttgtggaggtccatgtaactaattttgcacaaactactattttacaaataattctaattttattttatttttgcatatggatgagttctcccaacttttctgtatatcttttatgtgggaaaactgagtggacattcaattttgttcatcaggattttatgcatcttctattggtagcaactcttgttgttcatttttatgactgatgtatctattggcagacaatgatattatgttattttctgacatggcgtcagagtcaattaaatctattgaaataggctaaatggagaaagtgattatggtaggacatcttgcatttgtgctcaacttggactgatgttggaactttagttcatgattaggttacatgaagtttaagaaggatggaccaagggctaattctggcaagcttaagaaggtcaagcagggcttccagcactagcagtctagtagaaagaatgacaacaacgatgaagttttcgttgatccccttatacaagagtgatttcaaggtctagaggagaggttttgggagttgatgatgctctattggttgaaatagcagggtttgaaggaaagccaatctctttgttttggggaggggtgtcccatttttcttcttttgtggtttctcaatggctgggtctccaagtgatggtggtaggcatttgaatcaactcttggaagacaactgtggttgagagtaaaaatctcagtcgaaagtggggctttctggtgggtctttgggagagggaaatcaactgcttaggatattgttcaaagatggttctctaatgttgtggatgaccctttttataaggacattgtagtcagatcagagtcagagtctcccaagatgaagtttggctgctgttcaacgggggaagcgtatcctttagatgacctctttaataagccaactgatttcaatagctttgtggggatgcaatggtgggttttgaaaggagattatctcacttttgaggaagatagatgcaaggagagggcatggagtcaagatcttaggggggaggaggaagccaaacttgtcttcctgtttcaagagggagatccaaaatttggagtgttgggttaactacaatgtctcctttgttagttaggagcagagggaggagcaatgggaattatgctcttgtttcatgaggatttcaagctgagtcgtttcttggtgtggtaagcagtgggagcttgagagttggctggggacaaacttgattttctggggtgttaggtggtgtgtctggttggttttcctttgttgttctctttgatttcttgttgcctatgggttttttttgtatactaagtgtgtacattgttgtgccctttcatatggcttttaatatattctcatattttacctatcaaagataatgtggttgtttgctttggtctggatcctacaatctttttgaacggctaagaccaattaatgtcaaaataggtggatgaaatctagttgattcatgacaattagtccagtagagtggtaaaaccttataagtttgtagtggtgacattggtatgcctccaatcccacaagctttacaagtctcatgctccattttgtcagccacattgagtgactatgactcagacttgttataatgcctctaagaacatttatggtcttaatcccactatgttatataaaccatttgtttaatgaatagcagagaaatctaggtgggttgcggcttttagtccattgggttgtataacttatgtgcttattatagaaattttaacaagctaacactaaggttagacatctttgtctagaattttaaggcggagattatgggattcgtttttaattcttttatggttataaagccttttcttcaaagattttttattggaattcttcaagtattagaagttctctcacatagttttttcttttagataattcatattttttagatgctttattttttgaagtttctctttgggttgtggcatttagtccattgggaaagaagtaaaaagaaaggcaaaaaaacttttctttgaatcaagagagattttaaatagcatttttattgaataaataattgtttacaatctcaggcatttattgtgttaatccaaaccttatatacacatgaaagcaatcttaatcataattgaattattcctaaaatagaaaaacataaaatggaagcttaagtaaagtgaaaaaagtgacatgataaaaacctaattaaaatagaaaaccttaatatcagaaacctaattcaatgactttctattgctaaaccaattctatctttaatgcgctaaggtggttttgtatgtgcatactttttgaatgcttctggatcattcttcttctctccattaggttaaaagaacaatgcatttaaaagcaaattcttcataaccaaaattggtttctccatccctcaaagacaattttgcgctttttccaaatataccaaaacaaatagaaaggtgtcaaacttctaaccaccttgattgtaataccttgaaaatgccatttctcggtaaagtctctttacaaagccttagagttggacttatcagtttctttcctaatgaaaataatttggaactcttgtgtgcaaccaaaagtaagcttctttgcttaggaagtttcatggggaaaagttctaactttggaccaaattcaaaagaggggatggactttagcaaatagatgctatttttgccaagcacatgaagagtccattgaccatcttcttttctattgtgaaaagacaagggatgtatggaagttgctctttactttgtttggagagtcttgggtgtttctttcctcggttaaggaaaccctcttgggatggaataggtcttttttgggtaaaatgcgtaggatagtttggaaagcggaccctttatgcttgttttggtcagtttggaaggttaggaatagaattgtcttcgaagatggtgtgatgtccatccaaatgttgaaagcttcttttgtgtatttactttggttagagactaaattatttataaaagatggtccttcgacattaattgatttcattgattaggtgggttcccattgagggaggggttgttttttgtgtatcttattggatagttttttgttttagatgtaagggggtgagtgtctctttcctatacatctttggaccgctattttagcgcttcttcataatacaatacttttacttatcaagaaatgccttgaaaatgccatgctaaccatataaaattgattagggaaaaacttaatacatctagtggttatttttgtattgtgtttattgaacaaccaaatttcctaaaagtttaagcttatagaatttgagcccataatgtatatcatgcactttaacattctcatgcatgtgtaatcttctttggacttacaagtgggcttaataaattaggtaaataaagtagcctatttttgggcttactaaattgagaagataaacatgtagtgaagttcgaatacatgacctcctgccaaatgagactctgatatcatgttgaacaaccaattttctacaaacttaaacttgtaggatttggatctataatgtatatcatgcacactaacaatgtcatcttcttttactatagttttgatgtttgagaaagtttcaatgtcattgggctcaagtttgtggaggggggttgtgttgttaggaatttcaagggtcgaactcttcataggtgatagcaagaagtgtcatattctagctagagtaatgatttggagaggtcttccttgaaagttaaaaatgaaataaaaccaaataaattgacaaatagaaggaaaattaccatgaagccttgataaataaatgttcaataaataaataaccttgcttaaagaataaaatcttcttatcccaactttggtacatgtaccaagctaacgaccttgctaaatgcataagataatatttcttttacaaatccttaagagcccaaggaaatgtaaattaataaataatgaagtacataaaaaataacaaacaaaaatccataatacaatattgagtaactttttaacttatatttttctcaattcaactttttctcagaaatgtcacataagggtattaagttttgacataactcctctttttaggagtctatcttctacaattaagaactattttttttaaagagacacatgattctctctaaattaataaatgttcatttatcgataaattaacaaattatttatttatcggtaaatcaataactctgccacgataataatttcttttggtcccaacaacattattttatagggtttttttttgtttaaaaaatgtttaagagtaatgcctatgaaaaatcaaataaaaactaaaaaagaaaaccaaagttccatttgtttgaatgagagaaaaattaaaaaatcccaaatgagcatttggttgccaatacttaataaaatgaaatataaaactaaaaattttatctattgttaaaaaaatacaaaagaaatggaagaaaaaatttcaaaatctggggtgtttggcctatatatattgtaaatgatatgtgaaaccaaaaagttgatcccaatttgtttggttgttaagaaaatagacaggttaaaaaactccaaaatggtgtttggtttatgagaaatggaatggaaaatgcactaaatccaagctcaaaacaatgatggtgagattatggtatgacccaattggtgtgggaatttcactctctgtaactcctttccctctttgtatgtctttgcatcatataaagaggcttggttagtggagttgtgggatcattcaggagaagaaggggtttggagtcctagcttctctaggccctttaatgactgggaggtggaggaggtggagagattacttttgacaatctggggaaggaggcttaatcctcttatggaagatagaatgttgtggaaagagactaaggatgagattttctcagttaaatctctttatagtactctagtttcaagaagagttgttcagttccctaacaacattatttggaatccttgtgtgcctactaaagtgtgtttctttgcttgagaagcttcttggtgtaaggtgctaactttggatcaactcaaaaagaggggctggtttctagctaacggatgcctcctttgctgtgaggaagaagagtcaattgatcatattcttattcagtgctccagggcaagagtgttatacgagttattgtttgctctttttggtgttacttgggtccttcctttttcagttagagatacccttagtggttggtgtggctttaacttaggcaagaagtgtagaaaggtgtggaaggcaacccctttgtgtattttttgggcggtttggaaggaaagaaacatgattgcttttgataatgaggactttcgattcatagttgaaaaattcttttgtatgtaaccttttgttgtggattaagtcggttgtaaatgatggttctcttcctttactcagtttttttgattggctaggcgctagttgagggctggttttgcatttcctcttctttttgtgccctttggcgcctcttgtatactccctgtatgcttttgggtcagcctcaaggtgccattttctaatatatgctttttgtgtgtttgcctatcaaaaaaaaaataaaaaaaatattatggtatgacctacaaaacttgcaaacctaattgtagtacatatccaaaaggtgaagttttggcaatgtggtgggtgaaaaataaagaagtagactcaaagtggtagaattagcactacaacaaatgaacatggggttttctattatgataatttcatatcatgtataatacaaaaggatatttggtacaatggaaatataattaaagcaggttgtagttaggttgatgccctattcaagcctatcaattttttaaagtattcctatatatcaacaccacctgtttgaaattagcttgaattttacctattaaaggcagtgtggattatcctacaatttaggaaattatcattcttagtcatagggattttttagtttaaggtattctttgcgttacatacttttactaagatctcttccccatattaaatatttggtgcttaaatattcctttgtatagaaaaatgataatttcctacaataaggtggggtggggcaatgttatatttagatatagaaaaaacttgtgattgtgtaagttggaagttccttatctcaatcttagaaaagatgtgatttagtcctaaatggagacgatggatccacttttgcatatttttttgtgagattggtagttcttgtcaatgacacccccacaacttcttctcgacctctagaggtttaggacagggggacctcctttcaccttatctttttgttttggttatggaagcccttagtagcttaatttcaaagactaagtaaagaggtttcattgggggcttcaagattgagggtagaaaggaagaagggattctagtctcacacctattttttgcaaataatactcttttctttttgttttttttcttttttggtggggataatgtagattgattgaaatcttggaagtggattgttacttgctttgaagtgtcagtttgaaaataaatatgctaaaaagtgaaattattctagtaggggaggcgaaagatgtagatagagaaaattctctttttggttgtaaagtagggaaacttcccacttcttatcttggcttaccccttgaggcccttcacaagctttgtggtgtgtgggagggatttaatggaggagagatttaaaagaaattggctgcattgagaaaaccatacctattcattggaggaaggcttgtccttattaagagcactctatcgaacctcctatctattttatgttcccctttgcaattcccaaataagtgaggatcgtattagagagaattcaaagtgactttttgtggggagatactagagaaagaagaaggatctacatggtaaattggttagatatttgtaagaataagaaaaacggagggttggggctaagaagtttggagggtcttaatcaagtcttgttgggcaaatggttatgtagattttttttttttgagtgagagtgcttgtggaggaagatcattctttgaaaattcggggaaatggagggaggatggactactagaggggtgagggattctcttggataagcctttggaaagacattagaaaatgttagaaagagttcaacttcaaattaaccagccaaataggaaatgatagatgtacgagattttggtgggacaagtgggcgggcgagtttaagttgaaagatgtattccctaaacttttcagtatagcatccctaaaaaatgctatagttggagacctacgggaaagagaaaggggtgagggtggtcattgggaggttcaatttagaagacccttccaagattgggagatagaggaagtgatccgttttttggagcttatttacctgttacaagtgcaagaatgagaacaccctaatctaaaaagatgataggaggggaagcttcagtgtcaagtggtattacaattccttaagggctaagaataatttagtattcccaactaaagagatttagggatcctgtgcttctcttagaacatgttttttttgcttaggaagttgtttatgggaagatcttaactgtagatacgttaatgaagagggaatgacccatggtcaacaaatgtagcctttgtaaagatagtgaagaatcacctaatcacattctgattcattttgataagtcaagagtcttatagacttttttgttagcagtctttggcttgtcttaggtgtttcttgcatttttgagaaatctccttctagaatggaaatttaaggggctagataagaagaaaagaatagtttggcacttggctttgatttgcttattttggtgtattttgaaagagcacaatggaaagacttttgaagatgacgagttattagatcaaatattgaagtagttcttcatttgtacactttaagagtggtctcaagattcattggaattggagaacccctctattttgaatttcttagatgttctttcttgtggttagctttgccctgcccttgtaggctaaccttgtttttgtttggtgcttgctttgagatgttttgtgtatattgcttgtgtatgtagggtgtggccctactttttggcgcttcttaatacatgcttttgttgtttgtaaagaaaattgttatgatttgattgaggaacaatttttttaaatgattttgtgtattgttttgtataaatacctactagaatctaacaaattaaggtatctagttcactggtcatcaccaatggagttcaatgaaattaaggttttcaatttagctaagatgacagtaagcaaaagaataacaattacaacaatttaagtttgatcaagctagatacatagaccaatttaacaattgttaggatgaaataaccaattaaagaagcaaagaggtcttccactccaattttgttcatatagcaatacaacattggaacaagataaactcttcttaatcaacaagatactctttaagcccttgaggcttggctcaagtggtaaagggatgggaagagtttgtgggaggttgtcccaatggggacaaaaatctacctatatatatatatataaacaagatactctttgacattatccatacaacattagtagatgataaagctattcttaatcaacaagatatcctttatttattatcttgtgactcctttgaccacatccaaacagaaaataaaggttagacttgcatagagatgaaccttaaactcttgggtttttttttttaaggctgtggatttcaaatgaagactatgtagttaatggtttctgattaaaaaaaaaaaaaaaaaaagtcttaatggtcctagaaaaaatttcttgtttaatttgcagtgccaaagtgaaggttgtacaataactgatgtgtgttctttttagctgatgggtgtggagtccttgtttttgcatatgagttctctctaacttgtatgtatcttttttctttctgaggttccaatatttttacatattttgatcaaaagaatggataaacacaatttctcctatcggcacaggaaatatggttcttcttttattacaaaacaatacatttacaaaaaaccaggggctttggaattacacatcaaactccaattgagttgaataaatagtaagtggagtgcccttgaaagcttaggtactttaggcctaaaaagaggaataaaagtggattaagttccatatcattttttaacttctccactatcctaaaaaatccttgtatttctttcccaattgacatttatagtttagaaatgccatattttaatatgttgaaatataggtttatccaattaaagtgaagaatcatgattactttgattagtatggatgagtctgaaagtatagttttgttggtggtaagtggtggttagtgggcttgtttacctagtggcaaaaaccttgttgtttactctgtctttgagaagaaaaaatatattttatatgtattgattgtccatctaacacattatttgaagaattgatgaaatagctttgtacgcgtttgtgtgcttgcattttttttgtttttcttccctttttcttttcctgttttgtcttttgtttttgaattttattgaatgacggatgaactaggttcatatatgatatggtctttgagtcaattgagagcttgcttgattcaaatccacttatttgagcaaattgacttggtttgttggaaaaaattaacagaaagttaacgtagatgccccttcagttgtagatttcattcaatcaattgttgcattctcctgcttgcctttatctgatagaggattaaattggttttgcttttgtctttctactatagctattggagacagtcgtaaaaaactgtggagatat

SEQ ID NO: 11056 - DNA, 7194 bp, Vitis vinifera
  Intron number 5 from transcript GSVIVT01016995001 (locus G SVIVG01016995001) derived from phytozome v7.0 (chr-ID chr9 ; pos 3253930 to 3261123 reverse strand)
gcctatttctgcgttaccaaaggtaaaagcaaattttaaaccattctgttctcacaccttagctgtttttgatatattactcaattattcatgatggttctcgcagcaccttcatcttaatattctctttatgggattctgagtagatagttgaaaagttctgtaccgttttctctcaaaggaaaacaattctgccagcatttccagcccttgaggcctggctcaagtggtaaagggttggggatagttgtgggaggttccaaattcaagtcccaatggggccaaaaatttacctatcagaaaaataaaaataaaatgctgccaccatttcgaattctgcatttgatttgctttaaagatgtctagttttaagaatttccaacttgattccttgtttaactttaatttttatgaaagttcaaccttcaaactctttgttgaatggttcttgttactgcctgttcatctcttcagtttgagctgcctctttttacttatactaataccattcaactttctccatattacttctgttcttccagaaaatgcagtttggctttcttattatcttttctcaactagcaaaagtttgctgtttgactttttagtttctgcctgtgcaacaccaagtatactgtcattcatattctcctcttaaatttcatcgcttgtgtcttgttgcaatgaaacaacttcatcagtcatccctctgttcagtgaaatgatgtgtttcatggtttctcccttccccatgttcttggccattaaaaatacactttgttatgactctgtgtacaggatgtagtctttctctcctaaatccctgcttttccctatctgctttgaaatgcattgttttgaatgcttaagtatcatctcttgatatatagagttcctgacacttgtcatcatctcagttgcacatcagtgataaagagatgatgccatgttattgaagtgatcaattttattatacgaataacgctgtgtatccaccccattcttccagaaaactaatgcctaaaatgggaagcaattttatgaactttgttttaatcgaagtgttggatgcaaggtcttctttgaaattcattcttcactgttcacatttctatgtatataacactgctttcatttatatatgatgtttgatttttgctctcatttcatgtgtttttgtctctgtgaatgtccaatgatagatgttgtaaaattgagttcatttgaagtgttaatttatttgtcagtttcaaatggtgcatggtatcttacatgttagtgtttgcctatgatattggtatgataccgagtttcacttctagttaatgcctttatggtgaggcatcgaaagataagaaagccataggggaaggtgaggaagagtggagacagttgttttctgagaggtttcagattgacaggtcttgatgatcatcatgactgaagggcttttaaagcccatctgcaactgacatggtgcctctaattttattcttttggttataaattgctggtagcaaactggaaagtcaaaactgaggtctgaaactaaggtgatgaagtttgggattcaaggtctccgactcctttttttttggtaagtaaaagagaagaaaatgtattgaaaagaaatgctaaaatagcgactcaaaaagatacagcataggagcaccccccttcctggctgggacaaaaaacagccttcaaaagcagagggtccaaaaaaaaaaaagaaaccaccctcaatgagaacctatctaattaatgaaaccaactaaagtcgaaggaccatcttttatgaacaatttcgtctccgaccgaagaagataaataaaagagctcttaagtctttgaatggacaacacaacttcttcaaacgcaattttgttccttaccttccaaacagtccaaaaaatacgtaaagggtctgctctccaaacttcctttctctcttttcccacaaaagacctgttccaacccaacaacatcattttaacagaggctggtagcacccactgcactgaaccccgaagaaagtgaaaaacaacgcccaaagagtccttgtcttagcacagtggagaaggatgtgatctatcgattcctcatgcatttggaaaaggtagcatttattcgctagaggccatcctcttttctgaagctgatccaaagtaagagccttcccccaagttgcttcccacccaaaaaaactcactttgggctgcacacatgaattccaaatgacaattgataggaaaaaggttgatgggccagattttagggctttgtagagagacttaatagagatcttcccacatttagtctctatccaaagcaccctatcttccacattcctctaaacactcttcccattgagacccaataaaaaactgttcgcctcatccatctcccaatcattgaagggtttagagaaaggcgggctccaactcccctctccctcaatgaaactccacacattttttacccaaacgtccttggacgtagatatagcaaacaaagtaggaaaagcaacacaaaaaggtgaatctccacaccatctatcctaccaaaatctgattgcccaccacaaaggagagtctattgcttacaacgtgccactccctcctaattgctttccacaaccccacaccatacccacccttcacttccttggagcaccaacccccttgctcctccccatactttcccctaatcacttgattccacaacgctcctctctcatttgcaaacctccgactccatttgcacaaaagcgtcttattaagagagcgtcttattaagagaagaaagacacttcactcccaaaccccttttcttttgtctaagcaaacaagcgtccatcttacaagataagttttccactcaagagccccatcttctcacaaaaaaatctctctgaattttctccaacctcaatctgactatcctaagcaaagaaaacacagacacgaaataaatgggcaagctagccaaagtactctgaattaaagtgagcctcccttctttagagatgtattgtctcttccacattgctagtctctttcgaaacctcttctccaccccatcccatgcagccacaaacttaaaagaagctcccaaaggcaatcccaaataagaggaggggagactcccaaccttacaaccaagttttgtagccaaagccttcacattttccacacatcccattgggattaacttgctttaatccaaattaattctcagccctgaaatggcttcaaaccacagtaaagtccaacttaaatacttcatctgatcctgaggagccccacaaaaaaccaaagtatcatcggcgaacaataagtgggacacatgagccccttcaccccctccacccctcagcttacaggctaacaaaaaacccccacttatggctttccttagaatacagctaagtgcctccatagcaatcacaaataagtatggtgagagtgggtccccccgtcttaaacctttaaaactttggaagaatcctaaggaagtctcgttaaccaaaacggaaaaactcgttgtaaagatgcaccactgcatccaccggagccatttctccctaaaacccatcatacccataattgaaagcaagaaggaccagtccacatgatcatacaccttttctttatcaagcttgcacaacaccgtcccctcactactcttcaaaatcgaatctatgacttcattagcaacaagggcaacatccaaaatttgtctaccctccacaaaggcattttgggccttggagaccaccttacccactaccagctttaacctattggttagcactttggccaaccacttgtacaaccctcccaccaaactaattggcctgaaatcccttaaatccctttttcgggatcaagactaggaaagttgcattaagacttctaacaaaacaattgtgatcatgaaactccctaaaaaaccccatgacctcctccttcacaaacccccatgaggattgccagaaattcatagaaaaactatcaggttgatttgagccaaaatatgtgctctaatggcacatattctttatgatttatgcaccaaaagacattcaaatctcccaacttgacctaattcaatgctaaggccctagccatgagtttaatttatactttggagacttatcttaggttcaagggaaaaaaatggtgctagttgaaccactttagattttgaaagatcaagaaagggctaaatgaggaaataagtgagttaagactcatggaccgtaaggaaaggcaagacgaggatataatgcgtttggaagatgagaaacaaccattatggagtaagaaagaaggcaagaaaacatgggaaatgaggcatgaagcaagattcagctgcatggaaatttagaactcaaaaatctgatgacattatatattctgattttgaggacaaatttagagcacttcctggagtccattgtatacattctatatatcgttttgaagctcgggaagtcaagagtccaacgcttcaaacgatgtgcaaatcggagctgaaatgaaaaagttatggccatttaaagacaactgcaccaagctggagggtcatttcgaaatgatttcgaaactcaacttatgaattggaaatccacttcgaaatgacaccaatttcgaattcatccactgccactttgatgtttcgcctcctctaccttgggaattgcatctattcaacttatgaattcgaaatccacttcgaaatgtcaccaatttcgatttcacccactaccgctttgatgtttcgccccctctacctcgggaatggcatctagggcactccgtccgccctaagtggaccccacacgactagaaatcaccattttattattttttaatcatttttaggaaattattttgtaataagtggccaatgagagtgtgccacatgttaggtaattgatggtattatataaactctctcaattctaggttttagggatcttgaatctttttctggagagtttgacattgaaggtggaagaagacgagaactttggtttattttctttgtcttctttattaaataaattgtttttagtttcttttaatttaaattatggatttttactctattatggattgtgaatgtgacatcacccccatgagaggctaagagccaacttggggcttgaagcatgaaaacctaaggcctaggaaacctataaggataatggttaaattattataacaatgagattaattattggttgggtgacaatttatcatttttttatcctatccttgtgagttcgtttagggaatgatacggtaggttattacttgatactagtgattcttggtaattcttgatcattacttatcctcgtcttccctaacgttatttgcccctaaacaaagctataaggagtaggaaaggttaaaaagtcaaatcttaaattggtaatcaatctcattcatttgatggttttaggaatctgttttaaaaaggaaaaattgggtttcggatgcaattttgagttatagaactcaacttgatcgtgaacggccaaggatcccaaaaccctaagatcatattacttaaaagacccttgttttctctaatttttataccctaggttggattgtggaaaaccccaaacttgaatcaattgaatttaaaatcaatattcattttttttattaatttaatttcttttacttagtttcacattattcacatattgtttttcactttaggatttaaacaaaagcaattcatttattctagttttgacaatttccaatagccagtccttgaggacgatacccggaatactacaaaaaccgtagtgactctttctctagtttttttttttaccagagttgctacgtaaaaaggctaagtattttggtacaatagagaagttcggtcacaggcctaagcgctttatcctcactaaagcccttaagagccttgaaaacctctttttcagaaaaaaggctcctccagcctcactctttcaacagcctccaacctcgccaaagacaggccactaatactgggcctccaccctcctacaacagacaacagaagcttaaactcattcaccactccttctttgatctcattctcctctgttaaccaaacaccattgattttaacctgtgccattgaactcttcctcttgcgcacattagccatcttgtggaaaaatctagtatttctatccccctttttcagccacaattcccttgatttttgcctccaagaaatttcttctaggagaacccactttttaaaaccttcctttgcacctctcctagcttccaactcatgaacaacaagtggctgagcaacctctactttgtcccaaaattccacctaattcaaagccaaatccttattaacttcaactttgccaaagacattcttgttccattctctcaataatggcttcaaggctttcagcttcacaaccaaaacaaaactagtagttccactaaaattgagactctcccaccaagcctgcaacttaaccttgaagccctccttcaaccacatgttcttgaatctaaaaggcattgggcctctcctcacaccacacccccccccatctaccaaaattggagaatgatccgaaaccggtttagggaggacatactgaacaacccttgtaaagtgaccttcccaatcctccaaaaccaaaaaccaattgagcctagaattagactgattgttcagggtcccccaccaagtgtaaggacctccctgcagaggtaggtcccttagctctaaatcctctataatctcagagaatctcctttaggactctttcccatcaaaaaataatgttgcctggaatgtggattgaagtgttgtgcaaaagctggatagggtttgccatgtaatgaatccatgatgtgatatgaatctatgataggaatttgaaaactaggtggtaatccttgtagggtttgaaacacaattaaagaggatattactgaacctcaaaccaaactggttcctaatatcttcttgttttttggtccttttaagttccatacatatacataggtctgatgtaccacaaatgtttgtatagtatgaactttccgcattatgcactgctgtttagaaatgatctcacactttcatgtaatattgtttgcactggaatgcagacttgtgcagcttgaggaagaaaattgt

SEQ ID NO: 11057 - DNA, 10163 bp, Vitis vinifera
  Intron number 1 from transcript GSVIVT01027809001 (locus G SVIVG01027809001) derived from phytozome v7.0 (chr-ID chr5 ; pos 8010041 to 8020203)
gcaactgcttctggtacgtctctagttttatctctctttcttctattttgctgcaatttttttatagggaagaaaactcaattttgttaggggactcgtgggttgttttgttttcccgaacatgtttctggaaaaacaaacggtggtgaaggggaaatttgttgttttgggttctcaacgttgattgattagcgcagaaaccctggttttagagatttgattgcttttttggtgcattgatatttttttttcttgatgttagggagtaaatcggttggcactttttgttttttatttttaattatttaaatttttttttttttttatgttttctcttttttaattaatagggctagggccttttcttttgtcgtattgttgattgataatgattttaatgcagattctttgtctgaagcttttttttttgaatctcagtataaaagagataaccgaacgaaaatttctggaaattactcttgccgattttcctgcccttccctgattcttgctgagatacaaatggagcattatatttagggatttgggtttcaatgccatttttgttgtggatttcaataagttaggggtatgaaagaataagatgaacatgaacatgaacagaacaaagaaaaacaagactgggtatggttatatattgaggtcgcgattttggtgcacaaatttaggtttgtttgagtaggaattgaagactctagtttaatttctactaggattgattttaaattgttcagacctgaaatctataggaacgattcaatggtagaagcctttttttttttttttttccttttaagaaaaaaaaaaccttaaattctggtgtatagggtaaccaaattgaatgcaattttgatgcaactaaaaattatttatatgaatatagaaagagtacatgttaaaaatcataaattaaaagcaatgatactgttaagactgtttgttacatgattttgatatatttttatttatttatgtggaagataacaattatatgtgactgaaagttacatgattttgatatatttttatttatttatttatggctaggcttacaaaataaattaattcatttttttttgagttttagataagcaaatcaaccatgtaaagaaaaaaattcaaaataattcagtagaaaaagattaaaattcaaaataaaatttctgaagtttaaattaatcaaacataaaatgatgatattatgaacacttatgaaaaaaaaagtaaaataaaaacataaaaaaattaaaaatgtagaaagaaaagtttaggaattgaaaataaggttaatttaaaaaaaataaaaatacaatgatgactaaattggttggcatccataacaaaatgatatggtttggttagttgagaatatcattcttgtcatatgtttaatcatatattttttgatgggttcatatgtctatttttatatgagtttactaaagaagtaattaaaaaagaaaaaagaagagaaataacattgaattaaatgactttgaattggtagataatatcaatgataagatttctcatctatcaaaaaaattgatgataagatttctcaaattttttattttctctttatttgatgaaaccgaaaaaaaaaaaaagtaaaaataaaaaactaataattctaagtaattctttaaatttcagtaacatagtaacataagatagataattttaaacctatcaaagaaaaaaaataatacatgtaattttaagaaaaatataatacatatatgatttcaaaaaaaatgaaaacttaaaaattatgagatatatgtaatgaagccacatcctaggggtttacttcaagcagacatttctatacttatttcaccataacgcaacttaatgaccacaattcatttattgatccttggtatataaaacttagctaataaaaaaagcagtagattttaatttaaatggataaagaaattgtgattccatcatttctatggttacttcttattggaaacttctatagatcacactttttggctctacccatgaattatcctgtaatcgacacaagtcaaactacatcaagttgagaataacatggagtcatggaagcaaaaggggaagacaaaataaaatgctttgattgaattcgatgagtgatataatttcaacaaagtttttaaacgcgaaagtgtaaagcgaagcataagctttgaagcattgaggcgtaagctttttgagaccctactttttataattaataaatatactaaatatatataaaaaataaatactaaaaaccttcataacaagttaattgaagtcggaaaaactgtccaaatagttccacacttggacaaaaaaccataataagtcatgaaataaaacatcatacttcaaatacgtataactaaaatgtttcaatttaaataagcctttctaatatcatcatcattttcatccaatgtatctagagtaggaaagcttgcactatcaaatccctccatgtcatttaattcttcatcttcaacaattagtgccaagttcacatatttttctttgcctttgttttgattttgacctagcataaagtgtaatgtaggtgtaaaaaattccaactcatgattaaatttaataaaatttaaaactttaatttttaatatttacttgcaaagtcatcatgttttcttttgatgcttgaagaaacaatgttcactgatgatgcctgaatctcttatccttttgatgacacaattctaatggtatcaacattaaatataactcatcatcttcaagctaaatagcatcaagtgggaggaggagatcttttttcgcaatccattcatcatctgaattagtctcctccactaatattagatcaacattttgtctcctttgcagactctgctctcccaatctagtgttgtactttacacttgccagggtagtccagttggttagggtgaatattgggaagtttggttctagtaagtggtacatggttttgggtttgaatgctgtcactgatgatacattgaatttatccggtgttggtcgttgcggggttgtcagcaccctaaggtttgggtcctcatggagagttttaagggcttatccatggaaggtttctcaattataaaaaaaataaaatctagtgttgtattttacatacactagaacatttaacctcttatgttcaagtctattagaagtaataacgattcaaaagtgctccaatttctctcacatcttaaaacattacaagtgaggctaaggactcgaataacaaacttttgtaactccggtgttgaagccccaaaacgcatgcaccaacttgtaggacttcttaatttttgagaatcaattataatatgatttccaaattcacctcttgcttggtcaaacaagtccaattgaatgttagctgctaaacgatctttataatccaacatcttatccatgcattcaaataaccctttcctcacttcatccacattaaacaacttgtcttcatagtgcaatttagggttaaaatgataacccactgcatgtaaaggttgatgaagttgtatgttcatcttgcatttacttttctccaaattggcctatattttttctcaatgcccccacaattaaatgcaatattctcctgggagagatttcaaaaacaacactctttgtggaagagacaatatttgtccaaaggtggaaggttgactttggtaaagagcactctttctagcctcccaatttactttatgtcgttatttatcattcctcgcaaggtgagcctaaggttggaaaagattcaaagagacttcctttggggaggaggaacttctcaaagtaagccgcatttggtgaattggtctattgtttgcgtggggaaaaaggatgggggcttaggtatcagaaacctttctaggctgaataaggctcttattggaaaatggtgttggagatttgcttcggaggaagattctttatggaaacaagtgattgtaaggaaatttggagaggaagaaggacattggtgttctggcgcttcaagggagagtcatggagtggggctttggaaggcgattaggaacgggtggatggagtttagcaaaagggtggcttttaaggtgggggattgtagaagagtgcggttttggaaagataggtggtgtggagaggattctttggaagaggtttttccaagtttgtactctcttgcctcctccagggatgcttgggtagcttaattatgggatcagttcaggaatttgggtcattggaaccttgtattcacaagacttaacaatgattgggagatggaagaggtggaaacttttttcagtaggttacatggtcatgcttagaaggggtgatgaggatgtcatgttttggagggtttcaaagaaaggtttttttacagttaagtctttcttctcatccctagttccatgcatcggtagagagttccgttcaagcttagtttggaatccttgggttccaaagagagtcaacttttttgtttgggagactatttggggaagaattctaactatggattaactaaaaagtaggagttgggtcttaccaagtaggtgttatttatgtaaagcggatgaagaatcaacaaatcatgtgcttattcattgtgctaagacagctatgatttgacaccttatttttgctctttttggtgttcattgggttttgcccaattctatcaaggaaaccattcttggttggaacgacacctttgttggaaagaaaagaaaaaaggtgtggaatgcagcccctttatgtttattttggactttatgaaaggaaagaaatagaagaatctttgaagatactgaattaatagatcaagctattttacggttttttttgtacatgttttcggattgggttagggagcatgtagattgtacttcatggtccattttcgatttctttgattggttgggttgtaagtaagggattttttttgcttttttcttctccctttggccttgttgccttgttgccttgtatacttcgtgtatactttcaggtgtacttcaagctttcttaatacaattgcttttacttattgaaaaaaaaattgcaatattctccttggctgaatcaattaactcataaatataacccatgaccggtctctcctttgaatcaacctctctcaaaacactaaccaatgggataatggtctttatataaaaagcaacatgaggcctaaaaattggatcaaataacacgatattttaggctttcacaccttctatcttttttgcctaaccgctaaaacaccatttcttgaaggagaacattgctatgagagcttgtttttgtttataaagactttggagagcgagaaatgctatagcaaactatgtaattactagatgaataagttcatgattatttgtaaatgctttcatcaaattaagaacccaggtgcatccataaatgaacttcaccacttgcctagcttgtgaaagtgcattagcatgaacatttaactttctaatgtcttctaatatcaaatcaatgcaatgggtagcacaaggagtttacctcaattttttcctttttttcatgagcctcatttcagcattcgcataattaaaggcataatcaatgataacttgcacaacattctcctcttcaatttcttcaaccatctcatcaagatatgtgaacatcaattctccatttttcattgtgtcagatgcatcaattgattttaaaaaccatgtgccaactagactattcacaagaaaatttatgagacacctactctttttatttgtccaactatttgatataatggagcattcaaattgtttccatgtttttttgtgttcttccattctttttgagcagtagattgtctttcttagtgggaaatagttagagagagagattctggagggacaagtggtgtggtgctgagccactatgtgtttctttccctttcttatttgccttatccttgtctaaggaagcttgggtggtggatgtttggaaggtgaaaggagtggatggactcctcagttctgtaggctctttaatgattgggaaatggaaagtgtgcaacgctttttgatgaagctccaagaaaatagggtgcatggggatgtggaagatagggtgatatggatagcctcaaggagcgggaactttttggttaaatctctatatggttttagagccaagcgtccctcttttgttcccaagtagcatcatttggagatcttatgcaccacctaaggtggttttcttctcatgggaggcgacttgggggaaagcctcaactttggatcaggtctaaatgagggggttttctttgacgaacatgtgttttcttttccactccaaagaagaaactatcgatcatattcttcttcactgtgcacagtgttgttaaaagcaaaaggcaatgtcaaggtgataagactcctttcagcctaaggcgaaaggtgaaaaacaaggcgatcgtctgattataataaggcaataaaaaaatacatttatttacctattcaatacttaaccaatataagtgttgtcttcaacaatcaatactacttatttttcatccctcatgatgtcttataaaattaaaaaaatagtaataattattgaaaatgttaaatattataccccacatcataagaaacatcacattgtttagtgatattcatcctatttaaatggatattctaattttttaaacatctaaaaatcataataaaaaacaaaataagagaatgaaaatccaaggaagtcgtctctatgccttggccttatcctaatgcgattgcctaggcgttgtctctttgaaaccgccctgtttgggtctttaagaggcgactttcatctaccctgcttggcttgatggcctaggcaagttaggtggtcgcctttaataatattgattgtgtaaagatgcggattctttagcaactactttttttctctctttggggtgacttggtttctctcctactcggttaaggagactctccttaggtgacatgggtcctttgtgggtaaagctcgccaaagtcttggaaagtggcccctttatgtatcttttggatagtgtggaaggaaatgaacttattagcatttgataatgtggagttattggtctaaaggataaaaaattcttttgtatgtaatttgtgatcttggtctagggtgtctgtagatatgaaccctttttctcttgttagctttattgattgattagactctaagtgagggtagatgatattttttgtttctctccctttcccacttgggtgtgcttttaggcctccgttgtatacttcctatatactttgggggttgatttgccatctcttctttatatatatactttttgatcttacctatcaaaaaaaaaaaaaaaaaaaaaaaaatccaattctttaagaatccatgtcctcaatttatgcataaatggggccttaaacccaaacccaaacccaaagtttgcaatagcatcaaccataggaacccaatatggatcatttcttgtattgtattgaatggaaaaccctttgaatacataaaatgacccattttcctatacacttactttctttcttcttactttcatttggaattcaaagtactttgtctaggttttgaaatggtgaacttatccatgggtcccctaagaataagttgcccactcacactcctatttccagtcccatttgtgttacaaaatgcattctcattcattggatttgggcccatgccaattttttcaagcaattcatttcttttttatttttgttctcttaaattgttcaatgcctctttgtgttccaatcttacatcttcactaactttggtacatggttttatactatgatgagttttggccaagtaatgtttaagtctatttaccttcccgtgcatctttgattacaaaatttgcatcttatatacatctctttgattacaaaatagcatatttccatacaaaaccttttcttgaaactttggattctgagagacttatactgaaaaaaataaaacaattcaattatataaagaattttaaataaattacataattattttagaacataaaagtataaaatttcaattctaaaattttcaaaattaaatattagcatagctattattaataatttaatataaatataaatacctaattatttatataattttatgatttttcattagacaaaaaaaaagaaaaggtgaaatgtgagaaagtggaaactagattctggtgactgtagttgtgtgaggtgaaaaaaaaacaaagtggtttggttaaaccacaagcaaaaagaggaaaaaaaaattgattcttgttttcccataaaaaaataaaaccagaacctggtctccactaaccagaatctggtgactgtagctgtgttagatgaaaaaaacaagcaataataataataaaaaaagctggctatggtggtgaatttgggaactaaggaaaaaaaagaaaaagaaaaagaaaaagaaaagagagagaatgaagaaagggaaaaggggtgtacctgagatggagtcacaaagaagattgtcgattcatatttgatgtatgtataccatatgcattggatgtattatagtaagaaataattattaatatggactaggtgaaattttggaaagaatataaaatggagccaaacgcatgaattggagcttccacgtttgaatgccgcacatgggacattcaaatgttcatagataataaaatgttttgctggttggtgtgcaagcgtccagtagatgttcaaatgactccttgagggatgttcaaatgccttactaatgtttaaatattccctataaagcatttgaatactactggtgcctccaattgtatattttcaacttgttttcatattttaagtgtttgtttttttggtaattttaattttggaaaatctttccaaatgctttcttagggttttggtataaaaaataaacttttttaagttgaaaatatgcacaaaaagatagtgatctttctaccctagaaatccatctcttataggtttcatgaacaatcttgaaaatttttttggcaagaaggaaggtgcttcaatccactagtctcagcataagattgaggtatctggtaaggaacatgtagtgctgcatcgatgatatgaatggttgtataggtgctgactggtattagatccttaggagtaagtgtatttgaatcgggtaaaattgcatacaatttctttcatatttagtggattttattatggttgtcaactcatgattttttacatctacatccataggtggtttccacatacattcgtattcttatgtgtatttgatattttctatatctattgtttaaatcattactatcaataaatctgataattgttgcttgaattattcaaccgtagttctgagaatcaagaatgagttcacaattatggactaacatcaattccaaatgaaacctaaccacatcggtttgagaataatttaaagtaatgaatttggattaaacataatttttatgtttggattctaattgtatcaaactctttgaatttctttagttaatttagttgtcataaaataggaatgtcattcaattgctcacattttccattatttaattgtcatattgcattgatctcgttataaaattcatccaactcataattttataaattaaacaaaaattattagcttaaattcatttgccatatatttcaacaaatcacttaacacttcacataaatttatacatttacaatggaagtgtttttaattgaaggcctttctctagcaatgtttttaggagaataaactattaaatgcttctctagaaaacattaaagtggtttttttttttaacttttttaaaatatttttttagattttgccaaacacttaatttctcttcaaaagtgattttatgttaaaagtgttttctaaaagtaaatgctaaacgaactcttagttgagtttaataaattatactttaagtgtctatttttgttttgttttgttttgttttgttttgttttttttaatattcctatcatcttgaattttaggattatctgattatatttgaccattgaagagtatgatttataggacaaagaggttccacaaatccaacggct

SEQ ID NO: 11058 - DNA, 1004 bp, Vitis vinifera
  Intron number 1 from transcript GSVIVT01012395001 (locus G SVIVG01012395001) derived from phytozome v7.0 (chr-ID chr1 3_random; pos 388823 to 389826 reverse strand)
tgctcgccgctcatctcgaacagcaaaaaatcaacgtaagtctctcgatccgatcttcagtattaatagttttgtttgtttgttcatcccagtgtatggataattttttttttttttttaatgttttgttcattgactgatcttactgtgtggatctttgggtttcgatgactaattttggttattgtttgttgggttgtggagaaaattgggtgaaaagagatggaaatgaggtctttttagttttcttgggtggtatgaaaggaaaaagttgagattcagaaattgggcgttcttttgttttcatatgctttcttagaaaccaaactgattgttcgcttgttttgggaggtttgatagcttgcagccaaggttcgttgttgaaagggtttggttagattctttattgttttgggtttgcagtttccaccagtatggcggttatctatttaagcaggttggaatataaagaattagacggagagaagtgaagcattttttatgtatttgttcttactttgtgtcgggatgtgtcgggaccaagaaatttgtgatgctcttaggtttgataactgaatgatttgtttccttgccaaattcagcctatggtgaagaagggttttgtgggttttatatatttgaatgattttgccttgtgaaatcctttgattttacttgatttgaggatcaagaggagttcattggatgcgtctgattggcctgttttttctgaagttaaagaaatgatatatttcctaaaatcaaaatcttaatcaccagatggcaaagggtgtttaatattgttcttatgatgctgttgtctagtggatgtgagtttggatgagcactcagttttattattggcccacaatcatttccactgcttgctggctctctctttctcaaatgaaaaaaggaaaaaaaacaaacatgcacatttaattgattttggtagatttatttatgtttcttgtagcctgatgagccatgtttcttgtagcccg

SEQ ID NO: 11059 - DNA, 826 bp, Vitis vinifera
  Intron number 7 from transcript GSVIVT01033093001 (locus G SVIVG01033093001) derived from phytozome v7.0 (chr-ID chr1 4; pos 25662239 to 25663064 reverse strand)
gaccagaggtatgagtcattttttatgatgactgctttagattattttaacaacattatcgattgtgaatttcacctccagtttctagctaacagaaaatagttcaatttgggtgttctaacatattgtacactctatctgtcatttggaataaacttcttttatttatttacttattctatcatcctctactgtatgttatgcttaacgtatttttaggatttgaagaaataacattaatgagatttatttatttcatgatcttctaccatatgttatgctcaacaattttttaggatttgaagaaatttcagtagttccattttttttttttaattccatctttgttaatgaatagtgacatttatttatttcataatcttctaccttatgttatgcttaacaattttttaggatttgaagaaattatagtagttactattttttttatttttaattccatctttgttaacaacctcagtttttcttcttgacaatttgatggcttcattgaaaatatggggttggtagcttcacaagacaaagcaaatttgaattagcctgtttcatgtgatattcaaactacactcccttccccttttgttgtctgcttcacaaagaaagacacctatatgcacttaagaggtctgaattcttattgaggtggaatatgactattcttgggttgtttagcttcaaaagcttttagtaaatacatgccttccaatcagagttttcctatcctattttgtgaatcatcctcttttcatattctagctctcctgattgctctgtttgatttatcagggtcttgattttgttgttg

SEQ ID NO: 11060 - DNA, 5692 bp, Vitis vinifera
  Intron number 5 from transcript GSVIVT01010206001 (locus G SVIVG01010206001) derived from phytozome v7.0 (chr-ID chr1 ; pos 17393179 to 17398870 reverse strand)
aaggtggtgtgaggtagggatgatggttatgttttaattggatggatgttggttattttttatctgtgcatatgtcagaaccacaatttttagctgacaataatcttcctttctatgctaaattttgtattgtattgtttggagtgttctctcataatcctcgtaagttttcctgtttgcaacttcagcatgcacaagttaatcgatctattttaattttttattttctttaatgggaggtttggaaagggaaaggctaagcttctgggtttagaaattgtgggtggtgcagaataagcttcagattgttattaagaataagagtgggattagtcagggagctatgttggtgcacagaagtggaagaggaaaacatttaggggatcctgagccttcagtgaactggtaagttcttaatgctagtctgtaacagatggtcctaagtgatgggcataatattgttttgggtgaagggttttggggaatttagaggataaattggatatgtagagggagaaactaagatggttccaagtcatggcatcagttgttgacttgagaagtcccgagatggattggttgtggcatttagattgatatttggtgttacacacaatacactaattaatacaaaagatctaaaacgatagtaatagaagttctagaaatataaatacaattagacgcactcaataaattaataaaaaaattttgcttggttgtggaggagaaggatttgtatagaacttctgtgaatgactgattcttatttcagcagaatccggtggggcacttcttttggttgttttctgatagtgctctcactactacactaggttggtttttctttcttttttttgtttgtttgtttgtttgttgtgtgtgtgtgtgtgtgtgtgtttttaacacttctaatttttgtatttattttttaattattttatttgttttttggatgctgatggattgtgagtggagatattttctacatttgaagatgtttgggtgggaaaggaggtttttggggatatggtaagaatgtgctagccaagctatagattctatggaactttgggttaccaagggaattagaggtgttcaagaagggccttaataaatacctatataaaaaaagaagaagggccttactaggtggatctgtgaaattttaggaatgtgactatggtatgttgaatggattagagtatatatttggggaaaaaggtctagagccatatggcctaaagtagggaataagaaagaaagctttttgtagggtcaccaaaattcacaagagtaattattatataagttttaacttgaagcagagtgcaaggctgaggatgaaattagttggggatttgttatttttctaggttttgttttttgattggggagtgtattgccctcatctggatgggaatagcttcagatccattgatacagtaaatttgacgcctttgagcaatgataaaggcagtgacgacctgaataatgtgtgagagtgaggaatgatgagatattagtattctgtgctattcgtctccttggtggtttttttgagtttattgataagattttggctcataaacttgggagggtgatgtaattagtggtgttagaggctctagaatgcaattatggagggggcaaatcttagatgctgttttgattggtaacaaggcctaaaatggaagagtgtaggctggagtattttgcaattggatgctgaaaaggccagtgaccatgtcatcaagacattttggattatttacttttcagagttagagtatatggtggggacctagttttcatgcttgccccttaggtgaatactgcctttattgataaatataagcattgttggttacctgtggtggctgctgaggaagtttcctacacatatcaggattgaatcattgcataatgtgaaaatagaaggggccatacatacacatggcttctgtagaattggcctcctattcccttatctattccaggatatggtggcaacctagttagatatggagacatcctcttggagttccatcttatggtcttccgcaccaaaaaacaaatgtaacggcaaggagaactataaatagagtgatccaagttggaatatgtaattttaaaattacttaagcattttcacaaacatgttgtttacaagatggttttacctttgataataaacatgcataagctccatatccccaactcaaatcctgagcttatgaaatcaagttatgacaaatgtatgttgagagcaaaaatgcaagtgcttaaagcatttacaaatgttccataatctaaaataaggttgcaaggaagggagtttaatttcactcttaagtatctaactcaaaccctagaataacaaaatcaagagatgacaatcataggtcaaggtatgaaaaacccaaccacctgaagtacttttcaagcatttcataatctaaaatcaggttgagagttaagagagaacaaacacaaaaccataatatagattttgtactttaaacccaaattaatttggtacagacaatcatgggaggtcactcatcaagtagccatctccctaataaaataactaagcaaaggaaacattagtatctccatgaatgaaaacaactaccaaaatgcatcatgaaaatgtagagaaatgcttacaaaaatggagttcaacaacaaatgaagctaaccaaagcaagattaatctaaaataaagcttaagcttaagataaaagaaaaattaggaaatctaaaagcccaaaatgaagggatcaaaggagctccctgacatggagaaatagccatctttcatctgtaaaatgggaatccatacccataaggctgagccaaccacatccataggtcaaataagcatggctggggttgcagattttgggggcgattttccattgattctcaatttttggctttttgatgtgctcattcttgatgcaacaagtgcacttgacctggactttgcaactttacccaatttaagtggaaacactggcctaacatgtctagaaacttggagtaaggtggtgtcttcttcccaaaatgcctttgttgaaggaaggcaaatccttgacatagcgttaattgctaacgaggccatagactcgttgctgaaaggggatgaagctggtgtgttatgcaaactggacctagagaaggcttatgaccatattaattgggattttctgatgtcagtgatgcaaaaaatgggttttggggagaagtgggctggctggatcaggtggtgcatctccactgcttccttctcagttctgattaacggttcgcccgcgggtttcttccagagcactcgagggttaaggcaaggggaccccatttccccctacttgtatgtcttaggaatggaggccttaagctgcctcattaacaaagcggttagggggggcttcctatccggctgcaggttaaggggtaggggtggaaatgggattcaagtatctcatctgttattcgcggatgatacgttggtcttttgtaaggattcccaagaccaaatggctgttctaagctggcttttaatgtggtttgaagccatttctggcctgaacatcaatttggaaaagagcaaaattctgctggtgggaagagttgagaatgctgaggtcttggcttctgaattgggttgcaaagtgggttctcttctttccacttacttggggctgcttctaggtgctcctcacaaatcggtggttgtgtgggatggtgtggaagaaaggatgaggaagagactcgctttgtggaagaggcagttcatttctaagggggggagaatcactctcattcggagcactttggatagcatgctgatttatcttatgtccttgatgcgtattccaagagttgtaagattgaggcttgagaaaatccaaagggatttcctttggggtgggggtgcgttggagaagaggccccaccttgtaaagtgggatgtggttcgctctcataaaatgaagggtggcttggggattagaaaattttctatccttaatagggccctgttgtgtaaatggagctggcactttgcggctgaaagagagtctttttggaagcttattatcaacacgaaatatggggaagaaggaggagggtggatctcttgtgaggttagggaaggctatggggtggggttgtggaaggaaattagaaaggaaggtgttctgatgtttaaaaacgtttccttcactgtaggggatggtagaagggtgaaattttggaaggacatttggtgtggaaacattctcctatgtgaggcttttccttctctgtttgcctttgcggtatcccaagatgcgtgggtagcggattgttgggattctatgggggatgcggggggatggtatccttgtttttctagatcatttaatgactaggagttggaggcggtggcgagtctcctttcggtccttcaaggaaagaggctcaatgttgggatggaggatagagtggtgtggaatgcttctaagaatgggattttctctgtaaaatccctttacaatactcttgattctggtggtgcagtcccgtttccgtggagaatcatatgaagcccttgcgtgcctactaaggtgggtttttttgcttgggaagcttcttgggggaaggtgctaacccaagatcaactcaaaaggaggggctggtttctagcaaacagatgcttcttatgttgtgatgacgaggagacaataaaccacatccttattcattgccccaaggcgagggtgttgtggaatcttgtgttttcgttgtttagggttaattgggtccttcagctcacggttagagacactctccttggttggtccgcttcctttgtggacaagaagcgtgggaagatttggcgggcagcccccctttgtttattttggacgatgtggaaagaaagaaataggatagtttttgataatgaggctttgtcgatccaaagattgaaaatttccttcgtttgtaatcttttctcttggtctaagtcttgtttagatggagagccccgctccttaattaactttgtagattggttgagttctaattgagggttggtgagtgtatgcttccttgtgctttttgtttgtggggcttctcgtgtatacttcctgtatgcttcgggttgccttcttgctcccttcttttaatataatttttctgtgtttatctataaaaaaaaaaacatgtctagaaacttggaaaacataaatacacggggtatccagagatagctcaaaacgatagattgggggatgagaagcacgaggaaatatgctccaaaatatgagcaatttgtggagctaatcaatgatgaatattgctgaactccagagtttgtcacatacaccaattcaagagcagaaagagaataagcagacagaggtgtggatatatggccaccctggtgtaccatactgtcacattctctgagcacaagaggtttgaccctacatttgggtttctgccttttcaaatttttatagaaatgttatgagttttcatctagtgaaaatagtcattgagtcatctttaagtacttctatttcatcattcattctaatttttgttttataatatcttgaggtgtaatgtcagtattaataatatttttttgggttgttaaacagaggaggacgtggtggaggttacaaagaacttg

SEQ ID NO: 11061 - DNA, 16846 bp, Vitis vinifera
  Intron number 9 from transcript GSVIVT01034645001 (locus G SVIVG01034645001) derived from phytozome v7.0 (chr-ID chr1 3; pos 13479600 to 13496445 reverse strand)
cctgggcaaaggtattctctgacccaattgaatgaaatcagtagaggagtgctctaaggaattgtattttttatttttattttattttttatgagaaacaaaaaaggtattaattactataaagaaatcacaagaaggatgagaaatcctccccataaaatacaaacttgatcaaaagacctaaaacaaacctccactttacaaggggatttgtacaaaacaaacatgcaagtattacatcaccaaaaactcatctaggctcctcgcaaagtaggctcaaccctaaggtgtatatacggaaagttaaataagcttaatgacattcaaggggatgactttagaaacgttagtacaagaggctaaaaaagaaataaagaaatgaagtaatcttccaaagggttttgcctctagtagagttcctatagcacataaaaaaaataatcttcatatcacaaacactccttggttgaacccacaccatcccaacatttgagaatagcctgtgccataaccccaaagtaatcaaataatgtaggaagagatgatcaattgtctcgctacctccctacataggatggaccaatcaagactaagagctttgaaaggtctttttaattatagcatatcattggtatttaccttcatatgtgcctctgactaagcaacgaccttgaccttagatgagactctttatttccactaaaattcagtttgatggaaagaaattgaacttgataaattggacaaggtttagaaaaaagattttactgagaatactcttcaaaaaagaaggtacccaagctttcacatttggaactgatggggtcaaatgtacacaggaacaagaagtcattagtcttttaagatcctcaatctctaaatcagttaggtttcaatggaaaataagattccaagaaaaagaggcagcattatcaatgatagttgaaatggagaggtttctaactgtggcaactctgaaaagtcttggaaattgtaaacacaaaggttgatccccccaccacacatcttcctaaaaacaaattttggttcctttactcaccacaaagcgagtgtgtgtagaaaaaaactcagaaaataaatgcaatggccttccaaggcaacaatgtgatcatctgaccatgttattgacatgtcacccattaggatgtgccttgtagatacttaaaataacttgatgccaaaggatgaaactttccttagggtacctccaaagccacttccttaataaaaccagattccttagagcaattttccttaaccctaaaccaccgaactccttatgcttacacatgagatctcaattgacaagatgatcccatttaccctccacaaaacccaagcataaaattaagataaatggggtgaggcttacagaggaacaagaagtgagggaaggaatagtaaatgcttaccagcagctcctctcggaaagctcgggttggaaggcggatatagggggtcttttgctgaagcagatcagcctttcagaagcggaagcccttgagtctcctttttctgaggctgagatctatgcagcattaatggggacaaagccccgggtccggatggtttcactgtagccttttggcaaagttgttgggagattgtcaaggaggatgtcttggatatgttcaaggagttccatgaacagaattccttcattaggagtctaaatcatacctttttggtcttgcttccgaagaaagggggggcggaggacttgggtgactacaggccaatcggtttgcttgggggtttgtataaattattggctaaggtgctggccaacaggcttaaaaaaattataggtaaggtgatttctcctgatcagaatgctttcatcaaagggagacagattcttgacggctccctaatcgcaaatgaagtaatagactcttggcaaaaaaggggagagaaaggtctaatttgtaaattggacattgagaaggcgtatgatagcatcaattgacaatttttattaaaggttatgcaaaagatgggcttcggatcaaaatggataggttggatgtggagctgtatctccactgtcaaatattcagtgctggtgaatggggttccagctgggttcttctcaagttcaaaagggcttaggcaaggggacccctttccccctacttatttgtcatgggaatggaagttctaagtgcgctaatcacgagggccgttgaaggggggttcatctatggctgtaggatatggaaaggtagagggcatgccgtcaatatatctcatcttctgtttgcggatgatacaattgtattttgcgaggcaaaaaaagagtccttgttgtatttgagctggattctcttttggtttgaagccgtttcaggtttaaagattaatttggacaaaagcatggtcattccggtaggggatgtggaaggggtgcttgaaatggctgctgaaattgggtgtagggtgggacagctgcccactgtttacttggggctgccccttggggcgcctaacagggcctcctccgtttgggatggggtggaggagaaaatgaggaggaggcttgctctttggaagcgtcaatttctgtccaaaggagggagaattactcttataaagagcatgctggccagcattcctttgtatcaaatgtcattattccgtatgcctaaatcagtggcaagaaggcttgaaaagcttcaaagaaactttttgtggggaggatccaatgggaggaacaagcctcaccttgtcaagtgggaggtggtgtgtgcggataaagaaaagggagggttggggttaaggaagttagtttggttgaacaaagctcttctaggcaaatggatttggaggtttgcgcgtgctaaggaggagctttggaaaaaagtgcttgaggctaagtatgggcaagaggagtttgggtggaggacaaggaaggcaaatggggtgtttggtgttggagtttggaaggaaatcttgaaggagtccacttggtgttgggaaaacatggtgttcaaggtgggaaaggcaataaaataaggttttggattgacccttggtgtggaaacaatgtgctgtcccaaggcttcccggaactattttccatggctgcccaaaggaacgtcacagtggaggactattgggatcagaatctgggtcaaggagggtggaatttaaggctgttaagagacttcaatgattgggagttggggttggtgggcaatcttctagttgagttgaggaattatagagtaactgtggaggaagactcggttctttggaaggaaggagcggacgggctgtttaaagtcaagaaagcgtatagggtgttggctaatgctgaaggagcggacttccctcatagcaatgtttgggtggacaaagttccaacaaaaattgctttttttgcttgggaagctacttgggggaaggttcttactttggataggctgcagagaagagagtggcaattccctaaccagtgtttcttgtgtggatgtgaagaggaaacgatcaatcatatcttaattcatcgttcggtggcaaaaggattgtgggatatcattcttgcgttgtgtggtgtacagtgggtttttctaaattctgtaaaggaggttcttagtagttggaaagactcttttttggggagaaaaaggaaaaaagtgtggaaatccatcccgcttttcattttttggacaatatggaaggagaggaataagctagcttttaaagggggtgtgttagtttttcagaagttaaaaacttcgtttgtgtataatttttggggttgggctaaagtgtacattgatatggagtcgaattccttaataggtttcttggagtggctagcctccaagtaggggttgggttgtttcgttttttgtttaaggggtttgtagcctcgtatacttcctgtatgctttgcggctttttgccttctttaatatattcgcttgcttatcaaaaaaaaaaaacccaagcataaaaagtctctttgcagtttttcaatacttgaactatcgatgttggaatcttgaaaagggataagagtagtttggtacgtgagacaaacaagactgaattagaataattctacctcctagggacaaaaaagtttttttttccacccatccaacctcttagagactctctctcaatcactagatcttaaaatgagtttgatttcaaattcctccctaaaggaagacccagatacgttataggccaattagagactgaacaatcaagcatccaagccatcctcgagatttgatcttgactaatgttgatactagaaagggtgctcttatttagattgattctaagccctggtagatacctaaaaaccaacaaaattagcttaagagttggcagcttttcctaggaaggtttagaaaaaaagatggtgtcatcaacaaattgtaaatgagacactctagtcttattgctgtccactagtaaccccttgtataagtctctctcctccactctcaacatcaatctacttaaaatatcaaccataatgataaaaagaaaaggggaaagaggatttccttgtcttaagtctctagatgccttaacccaacctttgacatttctttttgctaagactgcaaaacttgttgaagacaaacatccactcatccaagacctccattttgaactaaacccttttctttcaagtacatggttgaaaaaccccaatctacatggttataagtcttttcaaaatcaatcttgaagactatcccttcctctcctgatctccttttctcatccaccaactcatttgtaatcaagataacatccaaaatttgcctctcaacaaaagctccttgggacatgaaaatggtatcctagaggactttacacaattgtcctgatagtaccttagatatgatcttgtacaaattagtaactggattgataggtctaaaatttgagattcttctagtttgactcatttttcatggaattgcctttttcccctctacttttaaggttgtggcttttgtttcattattttcaacttcctttttccccctttatcttattaattagcagagaatacttcaatttctgtgtgggtggtctaggggtcactttgacacatcataaaagatgtaacttattttttccttgaagtttggtgtcaagatgtttctgcaagacatttgcgggtgatttccacgatttttctgctttgtaatatttgtatttagccatagctggtggccaattagtatctatcaatcagtccaaatattttggtactactggtggtaccctgatgtgattttatgattggttgagtttcatttttcttcacttttctttttagtttcaatattgggagtagctgactttcacaaacttaaagatagatattggttatatttattatatgttagatgaatgatttaccaagtgtatcgcattttatatatgtgtttcaattatattttcaagacttttgagattataatttcaattcataattagaaattacaatatagcacaatatcgcctattattaatgttccactcaataatataaatatatcaatgaaaagagattgtggtgtaattagaaattacatataattgatcagggcaacatttgattttttggatacatgaaaagagactttggtttaagtacttatttcaataatgtggttatttttaggatgtatttggaacttggatcctctgtaatttaagaaacagctaaaaattaatagaatacatattattaaaactaatttatgattgaaatatctaattaactggtcaaacacagcttgaaagaatcctttgcattttttcaatctttgttgccacaaaggatgaaatcttgtacaatgaaaggaaataactagggatgtgaggtaaacaatactaaatcaaagttattcttctgcctaaggacaaaggactttttttttttcccacccatctagtctccttgaaattctaatctatgatggagtcctaaaaggcatttgctgtaggatttccctcttgtgaaagacccacataggttaaaggccaattggaaacttcacattctaacattgaagtcaatctaaccatttgatcccaactcatattaatttgtgacaatgtgctcttgtcaagattgatctaagtcctaaaatgtgccttttaatcaatgggataaacttaagattttgcaactcttctgctctagcattgatgaaaaatgatagtgcatttgcaaactgcaaactagtcttcctagttctgcttcttcccattgggaaaccttcaagcatgcctctttcctctgctcttaacattctgcttaaaacttctgttgcaatggtagaaaggaaaaggtaaagatgatctccttgccttaatcctccggttgctttaaaccaacccttagagttttcattcactaagaccacaaaacttgttgaggaaaaacatcccctcatccatgatctccaaatattactaaacccttttctatcaaaaccatggtccagaaatccctgatccacatggtcataggccttttcatgatcaattttagaaaccactccttaccttgatctccttttctcatccaccacttcattggctattagtattatgtttaggctttgtttcccctccacaaaagtgccctgggaaatatgtattgtttcatgaatgactctccgaatgcgacttgaaataactttatctatgatcttatacaagcttgtgaccaggcaaatggaccaaaagttagaaattatgatggtttgagtccttttcgacactagagccattagtcctctggttgattatcttgctattatgaaactccatgaacactttttttcctttaccatgtcccaacattcctaaaacattgctatggagaaaccatagatctcgaggcctcttccttgtcaaattgtaaaatagttataagaatttcctcttcaaaaaaaggtcggtccagccatattgctctcatctgaaatgggagaccagtctagttcttctagcgtccatgaatctctaagggcttagcatataattttttgaaaaatgccactagctccttgggacactttccaaattgtctaaagtagccctttcttcattctccaaaaacttggtgatcttcttgttcctccttccattagtcatcctaaggaaaaatttagaattgcaatccccttcttttatccatcttatcaaatcctttcgtctctaatgaacctctttgcttaacaacaattcttccatctctcctttccttgaagccttgagagctagaagctttggagatagatctccttcttgttcactagcatcaatgttgattacatctctaatagtattctttttcctctcctttaactgttcgaacacaaccttatccattctttttaattttgatttgacatattgtagccttttcatgaatctatggcattcccacccttcaacctgaaactctttccaccatgagctaaaactagcctaaaattccagctgaagcaaccacatgttttcaaacctaaatggagctggtccccattttaattatttttttttttgataggtaaataagaattgtattaaaagaaagaaattatacatcgtatacgaagaggaagagttaacatttccaaactgcagctatacagaatctcacacaaccttccttggccccgtcgtcacctcagcataagaagccggaactttatctcccatagactcagcactcttagagtgaggagcctctcctgatgattccttgaccacactgtgaggactcattactccgcaacttctcagtttctgccccaagactaaccaacctcctagtaaacctctacctttgggaaagatcaaaacgaaccttctctcttttgcagtaaaaactgagcacaagcgaaatcttcccgcttcattactacatagctgaagtttgaagcttctctctccttcgacccaagaattgctaaaaactttccggtcccctttttgaataccgaactccaccccttgtagaaggagggagagacctctttctccaaacctaatccaggttgagaatctccaccccctctcagtgatagccccagagacttttcctttgaagaagccaactgaaatcccaaaggatttcaagtcaaccccaaaccaggctcttccccccttcatggaagcttttttttccatgctgccattaaatgagattaggggtttcaagctgagagaacaagataagactaagaaacaagaaagagggctaatgacaatttcctgcttcacaggctctaagttctaataacaacaaaatcacctgttgagccacccatttttaactgttgcaaagtagctaggttgaaatcatggatttagctttgccttctgcttttgaataaatccaatagataactttagtctttttttgagagtggaaatgttggcatcatgcactgaggcaagccaaaaatctccttctccaattgaaactagcttagctgaaactgagatggatcctagcaccaagtctaaacaggtatatttgcttgagtcccatattatcaaaccccctctcgatgacccagaagctggtaaagtggcctactccttgtttgtggttctccacacactggctacaaatctcctatcacacacatttctctttgtttcctaaaacatcacaatgtatggagattcatggaagagaaaatccttcactgatttccttttctttctagaccccaagcctttgatgttgcaacttatgattctcatactaccactgaaaatcccaataatcatggtgccaacccttgttaaacatcttttgcggagattgcaggcttgtactttctcctgaaatatactttgtcctttgactttaaactatccactggaagattattcttacgatacttgactagcttgacattcatggttgccaaaacaggtaggactcttaccatttttctggggttaagacctatgtgaaaactttctaatgatgagcctgggtctatcgtctggaatttttatttattttttggttttttgcaggggattgagtccccttggagatgctgggcagtattctagggaaagtagctctcatgtgcacttggccatattgaaaatacaacaccttgtttcatcactatggggactgctgacatttgagtcaggtactgcatttggaaaaataggattaacgactaatagaggatctgaatgggttgtcaaatatggcggagcagtgactggaactaaagggtttaaaggaatcaaagagaggttggaaggggtgggacaaattgcacttgggttttgtggagctggtaacattgggacttctctctgctttttgggaggcaaattgcaagtgtgtcaaaagttttggccccttgcaaaggattctggcctgacatgttacaccgtagattttagacctactaattaatattcaaatacgaaattagtgctcccaaaaacctggaccaaaagtaaatgttgagcttcaagtaaatttttatccgaaatgaggatgtggaaacctattctaaagaagtatgtgccctgtgataaacctttggaaccattaattaacaaaatataattcattttacataaagaaaatctatacaatattccttgtacataccaaaaccccaaggtttactaagggtagcccatacttcaagtgtacaaaaaacaaacataaattacataatttcttcaaaatgatttagtcttcgtatgatacgaagacaaaagcctcaaaacactctcaacatgagcaaaatgagcaaaactcaaacattaacctcaacaagtgtctcctaacctgcatttagaagtggaagggatagagtgagttcacaacttagtaggaaagtttataatcatcctatacctatccttaaaaaccgtgaattaaacatatagcaccatgcatgataatcattttataaccattaacaaatatgcaataatgtcaaatatgcatacatgttgttgatggtttcatctctgctttgcctcatccattctctcacacatgataaattgctaatccccaccaatgtaaatgtcaactattaatgctccaaaagatgtttggccataaatattgactattttgggactaccacctaaggacaagtcatattctgtgtcttttgggactcatatccaaggataggaccaacctcgtgtcttttgggactacaacctaaaggtaggacgaaccccatgcctttagggactaaaactcaggggtaggatcaacccctacacccatattgagggtgtagggatttttacctaaggacccatagtcccacataaataatagatctgaatataataatgcacttctcataaatactttccgttgtcaatctattctttgtatattatctgtcattggtccataccattcttgcaatgtaaccacaccatcaaccatgtccacaatacttaagccgtgatttcttgtacatttatatatccacacatcattacaacattttaaacaatgatgcaaatacactatgagcaccatggcacattgaaatactttttaaaatcatattaaatataaggatttttaataaatactttcgggaaaaaaaaaaaaaacaaagatacgcaatagaatgatataaaattctttaccttacactaacttctcctttgcaattcttctatgtagacaacccttagctattacaaagaattgaaataaaacaatacaatttaggtttcctagttgtaaaaattacacaattaaggtttatgacattttttcccttattgctaattttaacaatttactgttgaaaattttaatttccacattcactaatctacatgcttgcaagttttgaagtcaaatttaaagtgaattaaataatctacatacaacccatggaattctgttccacagtactcattaaatgtagaggagcctctctgattggacagttccaaactgttgacttcaggctattgtttagttgtgaagaacttttcacatttatcacaaactgtaacaaagttcttcaaggttccctttactccttgcattggaggccttaactttcaaagtactatgggacatctcaatttcttcccctttatggtaggattcccagaaaagtcaaagtgctattcctggttcattctaacttacctttgccacatgttgaaaaaaaaactggaaaaaacagatatagtaggaaataagacaaaatgaaatggaaatatgaagaatgacagattgggggatggaaaatccagtccatgtaatggtaaaactgccttatatggtctcctctcaacatgctctcatgctttttattatgttattgctactgtacagtctcatcagaatgtgtctttgttatgttattgctaatttgctttctctactcttgaaatttgattttgcatgctgccatgtggttggaagccagaacaactggtttatggaccctgggctttttacctgttgtgtgtctatatatgcacatagatcaaaacctaactattcattgatataaattttagacacaagtgaaggatgagaaatctcttcctaaacacaaagggtgatgtagaaactgagaatatttctaatattaattcaaaattgttgttgtttatataatcgggtccctatttaatatatacacagagagcaaaaaaatggaaaaaaataaaaatcacacaaattacccacaattggggcctcaatctttccctcaatattctacaaatcaccattcaaattataccggatttccacactacccctcaagttggatcatagacattaatcatgtccaacttgcaaagaaaatcttcaaaacttgatttctgtaaccccttggtgaaaatatccgccaattgttcccttgtagggatataagtcatgcaaataatccctttctcaattttctcctttataaagtgtctgtccacttctatatgtttggtcttgtcatgttgaacaggattataaaaaatactaatggcagctttgttgtcacaatagagttcaatggggagttccattgtaatgtgtagttctttcaacaatttctgcaaccatagtccttcacacataccttgtgcaactgctttgaattcagtctcgacactacttctggctactacactctgcttcttacttcgccatgttactaaattcccccagacataggtgcagtagcttatagtagaccttctatcatctgctgatcccacccaatctgcatctgtatagatctctacttttttactgtcactcttcttaaagaatagtcctctccctggagaactctttaggtatctgaggatcttatacactgcttacagatgactttcctttgatgaatgcgtgtactggctaaccacccttacggcgaaagcaatgtttggtctagtgtgagaaagatagatcagtttacctactagtcgctgatatctctctctattcacgggttttttgtcgctttccatcatttttcttgctttgatagggctatcgcttggctagcatcccaacatgccagtctcagtcaacaagtcaagtacatactttctttgggaaatactaattcccttccttgatctgacgacctccattcctaggaaatatcgcatttgaccccgatcttttacctcgaattctatggctaagatcttcttcaacctttccacttctcctgtgtcatctccaatgagaatggtgtcatcgacatacatgattaggatgatcatccttccattgttagactgtttgaagaacatagtatgatccgattgtccctattggtatccttggttcttaatcacctttgcaaatctatcaaaccatgccctcggtgattgcttgagaccatagagagatttcttcaatttgcataccctggtttcttcttcttccttatagaaccctggtggtagcatcataaacacttcttcttccagctcaccattcagaaagacattcttgatatcaaattgatggagtggccagtcgaggtttgctgccaaggataaaagaactcgtatagtgttcagctttgctattggtgcaaatgtttcggtatagtcaatgtcgtaggtctgagtgaacccctttgcaaccaggtgggctttgtatcgttctactgttccatccgccttatatttcactgtgaatacccatttacagcccactggtttcttccctcttggcaaattcatcactttcgaagtcccattctttttccattgcccttatttcttccatcactacctctttcattatggaatctccaaggcttcatgaatgtttttaggaatctggattttatcaaggttagttgtaaaagcacaacactttgcaaaaagagcattataagacacaaatttcgagataggatggagagtacatgaacgaggttgtttcctaagagcaatgggtaagtcatctgttacctgatcaggattggaaccagactcccgaggggttggaactatcaccggttctgactcttttagtgcttcggagatgagtgtctcattgaacttcgattttggcctccttgagtaaacgagtgtttccctatttgtctgtaattccgtatctccccccgagtttaagtgtccttctatattaggcaaaggggtagatataaggcacagaggggattcgaacacaacaacatcgaggtagtcaaaggttaagggtggtctagtttcactcacggactccccctgaagtgagtagtaggaagtatgcttaaaaaaatgtgacatgtaggctaacatatagcttttgtgatattgggtcatagcatttgtagcccttttgtgtggaagagtagccaagaaagacacatttaagcgctctgggatcaaatttgttccacttaggtccgtgagtgtggacaaacacagtggacccaaagacacaaagtgaaagatgtgcatcgagtctagaatgaagaaaaaactcttggaatttttggaggggtgtcacaaaagataggacccgactaggcatttgattaataaggtatgtggttgtcaaaatggagtcaccccaaaattgtgagggcatgtgagaggtaaatactaaagcacgagcaacttgaagaatatgtctatttttccgttcagcaacccagttttcctgaggggtgccaatgcaagaactttgatgtataataccattttcttgtagataagtgctcaaggagtgattaaaatactcagtaccattatcagtacgaagaatttgaattttggtgtgaaactgagtttgtatcatagagtgaaagttcatgaagactgatcgaaccttagttttatcagtcaacaaatatacccaacacaggcgagtgtgatcatcaataaaagtaataaaccattttttatgtgtcctattaggggtacgtgagggtccccatagatcactatgaattagagtaaatggtatagatggtttatacttagatttaggaaaagacgcccgatgatgtttggcaagttcacacacttcacactgaaaatcccatgaagttttatttgaatatagtgaaggaaataaatattttaagtactgaaaactaggatgacccatccttttgtgccataacaaaagttcaatgtccttaggacgagatgcaaaattacaaacattaggaggacactgtccatgcacattagtttcgtcgaagtaatatagaccctcacgttccttagcactgccattcgtcttccccgatgataggtcttgaaaaacacaatgagatggtaggaatttagctaagcaattagactttttggttaactggctaatagacaacaaattgcaagataaattaggtatatctaggactgggttgagagtaatagaatcagaaatacgaatactccctttgccagcaactagggataacgtaccatctgcaatttttatttttaaattaccggcacatggcgagtatgtagaaaataaatgatgagcatatcagtcatatgattagatgcaccagagtcaataatccagggagtaatatgagacatggggctaagcgctatcagaaaggtacctttttgggccaaagaaccagaggacaaagtagtagaaaattgaccagaggcttggaaattagaaaaaaactcatataatttcgcaagttggttggaattaaaccccacactagaagttaactgacgaatttctgtgggagttttgtctgcctgggtttcggtggaggcttgatgactatgggctttattaggctgtctaggcttccaatcagtgggcttgccatgtaaagtccaacaagtgtctttagcgtggcccaatttcttacaatgctcacaataagtcctcttggactgtcttaggcttggcccactaacatgaggcccactagatccagcatgaggcccacgacttaaaagggctgaagccttaggcccaaatgggagatccaacatcactctccttctgctttcctctagtcggacctcagagaagacctctcggatggagggcaatgaccggcgattgagaaccctgctcctgacgtcgtcaagctcacagtttagccccgctaggaactcgaagaccttctcattctccatcttcttcttgaagctcacactgtcacccgtgcactcccactcctcttcgccgttgagatcgagatcttgccataaacccagcatctcggtgtagtattccgtgacttcccgatctccttgcttcatctaccggagccgcatcttgagttcaaaggcttgggaagcattctcgacatcggaatatgtttgccatatcgcatcccacacatcctttgttgtcgggaggaacatataggttttgccaatagttggcttcatagagttaatcaagcatgaggtgatgaaggagtttttggaccgccatttttgggttgctgctacatcggtcggaggtggtcgccgagtctcgccagtaagaagccctaactttccataacaagcttgattgcttgcgcccactttctgtaattcttactgttcaatttttcaatggtaagatggagtggggagttgtcgaatgcaccgatggggcccattgaggagtgtatctccgacactctttcatgggttttcgattgactggactcatggttgtctcctctttgggcagccatggattgattagggttttagagcaaacaccgctctaataccatgtggaaactgagaatatttctaatattcattcaaaattgttgttgtttacataatcgggtccctatttaacatatacatagagagcaaaaaatggaaaaaatacaaatatggaaaaaaaaaatcacacaaattacccacaattggggcctcaatctttccctcaatattctacaaatcatcgttcaaattataccggatttccacaggtgatcaaagagaaacctgacaacagtagcaaattaactatatgaacaagtatgaggccagaatgtgtgtaaaaatatacaacaatctataactcaaaaggggttaaaaatcctgtacaaatgaatccatctgcttggctctgcatttaattaaatgatcagtcatctttttagctgaactaggggaccaagaaaaagaaacagttcaagctgctagccagatcttgggtttgacggagcaacttctcattttgtgtattcaaaacaaattttcttatacaatggaatgatctgagaagaaactgctggtcaagttgttaaattgtttgtctttttcctctttagattctgcagtgtctcaccattcaagcgctgacctc

SEQ ID NO: 11062 - DNA, 11065 bp, Vitis vinifera
  Intron number 5 from transcript GSVIVT01035212001 (locus G SVIVG01035212001) derived from phytozome v7.0 (chr-ID chr4 ; pos 10613550 to 10624614)
acgcggtcagtatgaaattgatattcaaattaatatgaggtttttttttcttttctttttaataacattaaatacaatgccattaaaattaaaaataaatttaaatattaaatcaaaataattaatctattcttaatctcaattttttttccatatttgtccacatctaataatagtatattttacatgactcatttttatatttgtggtcattttatgtatttgcggtacttgacgttgaacaaataaaataaaattattgctttaaatgaataataaaaaaaaacattagttaaaatgaattagttaaaatgaatgaagataaatattagttaaaactagtaatgattaatatgttaatttcatgatttaaaattaattttattaaacaatcttaataaatatagtaaaaattacataataaattttaaattaatagcttaaaaataatttaatttaaagttaattttcatattgaagtgttcttcgttcgatattctgctttcttcttcttttccttcaaataagaattcaaaaagcatcccaaactacttaagaaacagatgaaagtacaatgtcgaaagaagaacactttaatttgaaaatcaataagaactttgaaaaactttcttaattaaatctggagaagtcacaatggtctcgcttaaaactcagataactaagacaaagcttcccagaagttcataaactttcaaagaggttctttgaatgcatagtaataaacttgatgcacagctaaatttgaaatctaaacttttattcaaaatacaaaacatacaagaactttgaaaatttgaaacttacaatctttacagagagcttaacaacagaatttgagagctttcttaagtacaaggctatcacagagagaaatctcacttgttttctctctctaagttttttctaaaacttctgatgccttacaatgagaagaaaaagccttttgtaagttcttggagatggatttgaaatccattgaagtccgcggaattgaaaaactttcgaatccaccaaaagttgtttgtcttcttgtgcatgtgtctttgaatttaaaggcggttttgaagcccactgttttgatccactaattttaagtgtggttttgatgagtcatcagtagcccacccggatttgaaaattttgaagtccatagggggtcatcaccaatttccatgggccttgaggtctttgaggaatctaaggtcctttgagagcttgccacgatagccaaaatctctacagaagagatcccaagcattgttgcggataatgtttttgacacgtaagccaagttgtctcttttgaagagctttgaagatggagtttgaaggaggcttggatgcatcaatccaagggtgcatacggaagtccgtaacacatgtttcaatttcaaaattgaaaactgacaaaatagcttttgaatcaatttcttttttttttttttttgaatccttttattcaaaggcttttgaaatttttgaaattgattcaaaagctattttgttagttttttattttgaaattgaatttatcaaaggtgattcaaattctcttcctggttttttatcacgtgagtttctacagggaaaatgagctctcaaaagcccaaatccaattcaaaaactacaaaagcctcttatgcaatgcctacagttaaacaagaaaaacccaatacttaaacctaaaatagattccaagttcttggaactattccttcaaaccaaaccaaaccaacatttgcccaagcaacctcttccaatcaaaatcagcaatatgtggctaaggtccatattatgaaggtacaaattcttgaaccttatcatctttcatacttagggaaaccagatatttcaaaaatctttcctcatgggaaatattttcttcaaaacaacttggaaaaaactcgtaagttttatgagtttattatagttgatacagattctgtagaaatttttcatattaaaaatcaaacttgtacaaatattttctattcaaaatgcaagatttgcaagttctttcttcaaaagcatggggtcaatctcctgatactcacaaaatgttttctcaaaacttaggccaaagtcatatgattactatgattatattgatgcttggtactatatctttttcttttgtccctttgattattcttggtttttttatttatttattggggagatgaaatcaaaactcaaaatgattttccaaattggttccaagaaggatggttattttttggcgccattaaggacattttctgtcctcaaattcataaaggatataataacttcactgagcatggaattcatttgattctgacttcttgttcaaaagtattattcttcctttcaagatttcaaattccttggattctctgctgggattttattttctcatagatgattccatcccattttctcacgcatttagcaggggaattcaaagtcaaatggtagtcgaatttctttccttcgactacagaacaactttctcatatccgtcaatggatatcttcaaaaaattctctttcaaaaccaagtccttttaaaaactactcttccaattccaactaatgctttcttgttatcacgaacttcttttccttcggataaagaattcaaaaagcatctcaaactgcttaagaaaaaagcttcaaagactttgtctcaattctttgattatggatttgatgaagatgttgcattctttgtctttttaggggatgttaataaagacatgtgttacggacttccgtatacacccttggattgatgcatccaagcctccttcaaactccgtcttcgaagctcttcaaaaaagacagcttggtttacgtgtcaaaaacattatccacaacaattcttgggatgatattttctgtagagattttggctatcgtggcaagctctcaaagaacctcagattcctcaatgaccttaaggcccatggaaactggtaatgaccccctacaaacttaaaaattttcaaatccgagtgggttgttgatgactcatcaaaaccactcttaaaatcagtggatcaaaagggtgggcttcaaaactgccttcaaattcaaagacacttgcacaagaagacaaacaactttcgatggattcaaaagtttttcaattccatggacttcaaaggatatcaaatccgtctccaagagcttataaaaggctctctcttctcattgtaaggcatcgaaagttttagaaaaaacttagagagagaaaacaactgagatttctcttgtgatagccttgtacttaagaaagctctcaaattctattgtaaagctctctgcaaagattgtaagtttcaaaatgtcaaagttcttgtatattttgtattttgaatgaaagtttgtatttcaaatttaactatgcatcaagtttattactattcattcaaagaacctctttgaaagtttatgaactttcgagaagttttgtcttagttatctgggttttaagtgagaccattgtgacttctccagatttaactaggagatttcttcaaagttcttattgattttcagattgaagtgttcttcttttgactttctgttttcatctattgatcctattgtatttggtatcagagcaaaaaatagttagttttcaaatttaatttgccatttcatttgatgattatttgcttaaatctcaattgcttagtgttggtcaacccttgtatccgttggtaagccgttatagccatggtggcgtttaggtgttcccgatggtggtatcactaagttgcccaggatttgaacaaagaaaccataggacaaaaatgtcaaatttgtttggaaaatctttatagaagtagctctcatcgtaatatgagtaggatggaacatcatctcaaaatgttagaagaaaatacttcaaaatttgataatcaattgaatgtatcaattgatactttggaacaatatatcaaaaattaggaaatgcccgaacaaaatatcaaagatatttatcaaataggaactttcaaatttagatcaccatataagatcaaggtgtcagaaaacacacattctataggatcaaaaactgaaattatagaactccttaaccctagagacatcaaacaattaagagatcaagcttacaaaatcctccatataggagccatacaggtggcagtcaaacccttaacctgaattgggttaaacaagccaatttgtgtttgctgtaaagatgcgagacacaataacttcgatgattccttgttaagagtcatggaatcaaacatagcacatggccttatttattttaactgtcttctagacctagagttaagttgtataaatgatatgtctatacataaagctctaactttaaatgttcaaaccaagggttatgatatggaccttagagcaaaaaacattcttatagtatatagaatatattataaggtcataaccacttcagtaaatgctaaatgtttattgaagtctccaaaagggaaaacccttttattccaagccaatgaggaacattcctcagttatgacccttgaagagatcccttgggaatctctaactcattcaaatacttggaatttcacccaactagcccttccaaaacctattcaaaataggaaacctctctttatcatgcaagatgataaagggaatgtcaccattcaatttccaaaaagagaagaaagaaagagtagtagaatctctactcaaggaagtagaacttcctctcttcctagacaatcttttgagataaattctagaagaacttcagtcaaattagacaatgttgacttcactcctaacattcctcaacccaggtatgttacacaggagtcacctccaacctctccaaccctttcccaaatgatgtcgaatgaaccaaactagttaatggttatagatagtactgaaccctttcaaatagataaggaataccttagcaaagagatgcacctttcaaaacatgatttaaagagaaaatggtttttctctaccaaactcactactcaaactaaacatgagtttagaaatgaatagtataagtgtatggaaagaaataggatagacattcctatgttcacataccttgaaatatatgcctcaaataacaatattgactaccctttcctagaggtcaatatgtttcaaaaaggacaaatttggaaaattatgtccaacaaaccaatagtttcaaatcatcctcttttagaagaagtccatataactgttcaaaatactgaaataatagtctttccgttcaaaacaataaatcccaaagatagtgaagggcgaacaacaaccttaaaagattataaaaaccttcaacaacaaaataattttacaaatcaaattctaggaactctctcttctcaacttgataggatttaagactactagaagaccatcaaatatctcgtcaaatcgttactcatcactttttagatagacatctagataagaatcgtccaattttcaaacccgcggaagtagggaatatgacacttaacctcttaaacaataataatgatttaattcaaactttaacaaagaaaatttaacaattagatctttcaaacaaagcgtcaacctcaaatacaaagtctgttaatgttataacataaattactctagcaaatgtggatcaaatacaaactatatttcaagaataagacccttaaataaataggattgctcataacttcaaacagaaaaccaaaactaggaattattatcctagaccaactcctcctgatcttcaatatgaaaaaagaagccaaatagtccaatcaaagtatgatggagatgacatctatgaatggaacatagatggagtaagtgatcatcaagtcttgaatattcttcaagaaatgatcatggcctctatagcctataaatatagaggaaactcttaccacaggatttgtgtacacctaatagcaagattcataggccagctcaaagaatggtaggacaatgctctcaccgaagaagaaaaaaatctttattcaaaccagcttagataaaagtggaaaccaatatttggttcataccttagttttcgttgtaaccaaacatttccttggagatccaattgctttccaagctcgtacctcaaaaatccttcaaaacatcagatatagaaaattgagcgactatagatggtataaagaggtatactttgctaaagtccactcaagaactgatgtcaaccaaccctattgtaaagaaagattccttaatgggttgccaaaatcctttagtcaaagagtccaaatgagaatcaaagagatgtacaatggtattatcccttatgattccttgacctatggtcaattagcaaacttcgtcagtcaagaagtataaaatctttgttccttgatcaaggttaatgctaccctaaaaaaagatcttagaacatcaaagaaagagttagtgttcaatatgggtatgataatcctctctctccttcagccaaacaggaaaaatactatagacctaagaagaaaaggttaaataaaaaatattcaaacttcaaagaagaatccttttataggaaacctaaacacaagaaacactcaaataaaaaatatcaaaattttcttttaaaaaataaaatagataaagaagatatgaaatgtttcaaatgcggcaaaaaatgacatattgctccaaattgcaaaatcaaagaaataattacagatttagatacaggaaaacgcctaaaacaacaaatgattaacttaatcaaaacaaagtcacaatcagagtcatctagtcaaacttcagtagagtcatctagtgatgatcaacttcttctgattgaagaaagttcttcaaatgagtattctcagtcatcttgtgattgtttagaaaattgtctgtcatatcaaacaagttaatgtaataactagtgatcaaaattcctaatagaactaattgaaaaaaattcctgaccaaagtcttcaaaaagaatatttcaaaaaatatttagaaatccaaaagcaaagtaatgaaagaaatctagaaaatacaaatcaatacaacctaaaattgtgttagatcaattttctaagcaacccaaacctatagggattcaagaccttcaaaatgagataagccaaataaaatttcaaatcaataccatgttaattcaaaatcaagatttagaaacaagactaaaagtcttagaacaaggaaaaattcaaacttcagaaaatacagaagataaacaattagaagaaggataatcttctcaattgtttgtaaatactataactaaaatgataactcaaaaatggcacatcaaagcaaaactttttatcaaacctgatttttcaaaagaatttgttgcattatttgattctggtgttgatataaattggttataggatggattaatccctactgtatacttcgaaaaaaaattcaaagtgttgttagtgcaaacactaaacctttacagatagattacaaagtttcaaatgttcatatttgtaataagaatatttatttcaagacttctcttttacttgtcaaagacataaataaagagataatcttaggaatacccttccttgctctactctatccttttagagtagatgaagaaggacttaaaacagtttataaaggtcaagaaatttgtttcaaatttattagctctttaaaaatgaaagaactaaatattcttgaagataatgaagtaaatctaattcaaaagaagaaacaacatatcaaatttataagcaaataattatattactaaagaatggaagaaagtattttacaaaaggatattcaaacaggaattgaaaaaattaaaaataaaattgaaacagatttatgttcttctgttcccaatgtcttttggaatataaagcaacataaagtttccttgccatatattgatggatttgatgacagtcaaattgccactaaagcaagaccaattcaaatgaatgctcaattacttgagcattgcaaataggaaataaaatatttacttgataaaaatcttattagaaaaagtcactctccttggacttgtgtcgctttctatgttaaaaaaacttcacaaattgaaagaggtgttcctagacttgttgttaattacaagtctttgaataaggttctcaaatggataaggtatccaatacctaataagagagaccttataggacatctctataatgcttcaattttctcaaatttgctaacccattaaggaatttttctttccaatagggttggttgacatcagttcttgagtggattttagaaaagtatacctctttataccatctatagtcgctcaattttctatatctgatgtttggaaggatttctgaggtacaagcttggaaaacaattggatctctaaggaaatgtttggttatagtgaaaactaaggtgtgaactgaattttggtttccactttcatttaagctggtttgaataaaggttgttccttcttcagtgagagcattgtcccaccattctttgagctggcctgtgaatcctgccatcaggtgtacacagatcatgtggtcagagtttcctctaggtttataggttgtagaggccatgatcatttcttgaagaatattcaagacttgatgatcacttactccatctatgttccatttatagatgtcatctccgtcatactttgattggactatttggcttcttttttcatattgaagattaggaggagttggtttaatataataattcctagttttggtttgctatttgaagttatgagcaatcctatttatttgagggtcctgttcctcaaatatagtttgtatttgatccacatttgttggagtcatttatgttataacattaacagactttgtatttaaggttgacgctttgtttgaaagatctaattgttcaattttctttgttaaagtttgaattaaatcattattattgtttgagggattaagtgtcatattccttacttccatgggtttgaaaattggacgattcttatctagatgtctatctaaaaagtgaggagtaacgatttgacgagatatttgatggtattctagtttgtctttgattctgtcaagttgagaggagagagttcctagaattcgatttgtaaaattattttattgttgaaggtttttacagtcttttaaggttgttgttcgtccttcattatctttgggatttattgttttgaacgaagaggctattatttcagtattttgagaaattatatggacttcttctaaaggaggatgatttgaaactattgttttgttggacatagttttccaaatttgtcatttttgaaacatattgacttctaggaaagggtagtcaatattgttatttgaggcatacatacatttcaaggtatgtgaagataggaatatctatcctatttctttccatacacttatactattcatctctaaactcatgtctagtttgagtagtgagtttggtagagaaaaaccattttctctttaaatcatgttttgaaaggcacatctctttgctaaggtattccttatctatttgaaagggtttggtactatgtataaccattaactagtttggttcatcctacatcatttgggaagggattggagaggttggaggtgactcctgtgtaacatacatgggttaaggaatgttaggagtgaagtcaacattgtctaatttaactaaagatctttgagaatttatctcaaaatattgtctaggaggagaggaagttatactttttttagtagagattctactactcgttccttcttctctttttggaaattgaatggtgacattccctttatcatcttgcatgataaagagaggtttcctattttgaacaggttttggaagggctagctaggtgaaattccaagtatttgaatgagttagagattcccaacggatctcttcaggggtcataattgaggaatgttcctcattggcttggaataaaagggttttcccttttggagacttcagtaaacatttagcatttactaaagtggtcatggccttatagtatattctatatactataagaatgttttttgctctagggttcatatcataacccttggtttgaacatttaaagttagagctttatgaataaaaataaactttagttaaaatgaatgaagataaatattagctaaagctagtaatgattaatatgttaatttcatgatttaaaataaattttaaattaactttattaaaaaatcttaataaatatagtaaaaattaaataataaattttaaactaataacttaaaaataatttaatttaaagttaatttaagtcattaagtaatattaattattaaatttgaccaaatgttatataaaagttttaagatcaaaatatgatttttaatattttagtgtaaacatacacaaacttagtgggtatttagtaaattaatataataacttaaggtgacttaataacttaatgtaacttattaagtatctttggtaaaataacttaatgatatgacttacagtaaaaaaacaactttaagtaataagtaaaaccaaataatttatttttaagtctatatctttattttatcattttacccaatttgtcttaattacttgcacgatctcctttactactctacacctccactattactttgagctcatttaccctaattataatttataaatataaatatgtcaatttgattatttaaaatatattttaagttaattttatcaaataaccttaatacttaaaataagaattaagtaataagcattaattttaccaaacacctttagtcacgataataaggacatgtttgaatcatgagtttcccttttctcataaatatttaattaatgaagagatgcccattgtatgcatgcaaattaaataaatgagttaagacgtttataaatttattatattttattatttattttgcaggttcttggctcattcatttggtttatttataagattttacttagaaatttatagtaatttatgattcattttgcaggttaaagagaattat

SEQ ID NO: 11063 - DNA, 4763 bp, Vitis vinifera
  Intron number 4 from transcript GSVIVT01031134001 (locus G SVIVG01031134001) derived from phytozome v7.0 (chr-ID chr1 4; pos 1848516 to 1853278)
tttagtggattgacacgtcttccttcatcttttgagtaagcatgatctcacatattatggcttatagccaagtattcttctgtttcaattgcttccttcaatttttttattgaggggtgtttcctattttgtaggtagttttttttttttttttttaaataaattattttccctctttttctagcactccctatgtgtttgtgcttgtttgctaaggtttgactttaaacttggacccaaatttcattgtctgctaggaaacagaaatttattttagagagagactaaaattgaggaaggttaaggggaagactagattcctctaagtacctaccatggaacaactagggtaaaaagtgcaatcactacttttggtggaatatttgccaagaaaggtatttatcaaaaaaaaaaaaaattgccaagaaaggcattcacttcttggtttccatcattcggccttttgaaaaatacagtttaggtccatgggaagataagaaatttccagaagctagagggaatatctcgaagggtcgtgagatgattgaaccagtgattatatcaacccatctcagacaacacttttttttccacgcaaaagccaaaaaatcttcctttttgcctctctaacacttaagtgtaattgttggagttcctctctagaagtcatcatacaaatgggaacctgaatatgtctaccaactctattactcctagtccctggacctccttgggagcaaccatcggcatttcaacttcaatcatcctatgagtgtagtgatcaatatattcctagataaaggtgaggcgaacaaagttaggatgaggaatactgaacaagttgatcattgtttggttgctacaatgcacctggctcttcctttggggcctctttcaaggctagaggactttggaattgttgttttgagagtggagaagaggctggctgtgaggaagaggatcctactaaagggggcaggataacttagagcaaaagcctatgagcatatacacagatttcatgtctctatgactattctgggttctctgagggagctgttagagtaattccaaagggagtttttgtggtgatttttggaagatgaaaagagattcaggttattaattggaagggggatttcaatacacacattttttatttcaatgtaatgtgctgcaagttccttcctggcctgagtggggtgggaaaagattgacaaattcatggttccctaatttgctcagtatagctgtaaacagtgatgtgaagcttggtttcctaatttattatacacattttttaagtaacaggcctgatggtgggatggagagaaactgttgaaggcacggttccctaatatgttcagaaaagcagctgacagggatattaagaaaaaaaggaggatagtggggggaggctatggtgtggaatctgagcttcattcgtggtgttcaagattgagaagtagaggaacttcttcctttacatgtcagttgtgtggggtgggaaactatagaaacagagatgatgttttacaatggaagttatatttgaattaaagatttgagatttctttgtggctcccttttgtaggactttagataaccgggatgggtcaactggccacattgataagaaatatgtggaatgttctggtcacggagatggtattttacaatggaagctttctctacattaaagatttgagatttcttttttcttctgttctatagggctttagatgacaagattgggggactcttgccacaaatatctgatgagaaacatagggagagtgctggtcacagtcttttggtgtgaattgggtacctcatgctctgtctgacaggttttaaccggttggtatgggaagttgattggtagaagaaggaaagtgtacaagttagcaccattatcatgatgcatatagaaggaatgcagtggaacttctgagggtgaaaatccaatttggaaacagaagaagaatgagttaagatccttgtttgtatggctgatgagggtttcttggttagtagttatttttggagttaagcgacagtttgagcggtgcatattgttttttctgtctgcttatcccttctgcttatcccttgttgccggtgtgtaacttgtatactttactactaattgggctaagctcccatttttggtacctttctattcatttatttgctttacatgtttaaaaagaggttcacactagggcagtccttttaatcacttctccaatgtcatgaaatttgtaatcaaaatactgtataatagaggcttggttgcatgacaaattttttcccttggctgttcaaaacttgaaagctttttcaaagaaaacctgtgatccttctatggtttatcgttgccatctaaacaaatgcacccaggtggaatgatgatcttccaaagtactgtcaaacaaatgtgtctgggtggtctaatgtacaaagaagagatgaaaagagtatttagagttgctttgcgttacaaagttctttgttacatgggcacttgtaaagttccttgtcggagaaaacctgtgaccctcctatggcttatccttgccagtctaagcaaatatgtccatgtggcattatggatttgtaaaatatgtcaaacaaatgcatccaagtggtatatggaaaatgaagagatgaaagagcatttagagtcacctttgcacaacccagttctttgttgcatgggcacttgtaaaggactgtgatgtgacacacatatgcatgggtggcagatgggttgcgtctgacatgacttgttatattgatcagaaaaacaaaggaagaagtaataaaaggacacagactcataattctctggaagttatccatgatgcttaatttgttcttctgttacataaaatattcaaaataagcaaagtactgattgcagttgctaaagcctaaaacaaggtgctggggggcgcacctggagctcatagctaggtgtcagctgaggtgctctatgaatgtgccactttaagcccaatgcaaatgttctttgttctattttgcttttgtttgtggtgttgtttttattttgggttttttgtcctttctttctctcaaaccttttaattcttctgttttttcctaatagatggagccattacatgaatgttgtggtcttatgtgagacatcctagtaatcctcatttttaacggacaaagcatgcccttagacctttctggtttctctcctctacccaaaccctgaacttcagtcttcttcatcttgcttgaagtttcttttggtccaagttttattctggccagtaaccttggactgttgatgatgcttctctaatagtaaatttgggttttggactcttttctttcttgaattttttttttccaactattttgctaggttttttgcctgaggtatttttgatttttttctcactgaaattttcattttacaagttctctttatttgttctttttattggaatatctgtttccctttatcctgaaattcttcccttttaagtcgattttgtgtggtgctgtatacttgcctgtacatgggattctcttataatctatactatcgagtaagatatgtttctttatctaccttttctacttcctctgttttttggctaggcatttcatatataatgttactatctccctatgaataaaacatatattagttacctattgttttggcccttcaggtactgaaaaattaatatttttcttgccctttgcattggtccactattgcagatttgaagtattattttattatcaaatattgaataacattagctgcatctcagtttgcttagggcagtgccttgtgcctttaacaaccatgggactgatgttgggcaagtcctccatagataccttgttttgctttaggtataaaagaagtcaaactgaatgttttgaaattcaactcttccggtatcataaattgcagatttatacatgaggtcaagcggcacacacatatatgctccttcattcaacatgcatgttggagtgcatggaacatggcctacataatgcccaatattccctatattgcttcatttccaaataaaaaccatattttctggaggactttcatctttcttatgaagcttacagggatgttgagagtggaagtaggagacaagaaataacaattaggcttaagtgatcatggtctagaatcatgtgagaacttgagtgtagaagaaaggatggttcattcattaataaaccatgggcatttcaacaaaagttgaaatttcaatcacataaggataaaaaaaagaggaataaagttttactaggaactgtttgaccataagaagaattgataactgattggggaaatggtagtgttggaagtgcaagtctgtgaaaagggataacccaattttttctagaataataatcgaatcatgattcaacggaagaacaagccattttaatttctactatgcattggtgattctctctccttccctgatcggattcccaacaaggagattgtatctcatgcttgattagaccaatattttagttaattaataaaacatttcaagtgagaagctcttattttttaaaagttaggaaaagctctacatggcacttcttttgtagttttattcaagtggtgtggttttaatgcttcttggttcttttttttttttttaataaaaataaaaaattatttttctgacatgtaaaatatgcttttgcagcgaaggggatttctcctcaacctc

SEQ ID NO: 11064 - DNA, 2360 bp, Vitis vinifera
  Intron number 23 from transcript GSVIVT01008944001 (locus GSVIVG01008944001) derived from phytozome v7.0 (chr-ID chr 18; pos 3692345 to 3694704)
gaattgaagagttaaagaacattaaacaaattagggtgaggatgttatcctatatcatattttttactctagtctgatggtttgtaattgtgaattttaattgatggtcaatttcttctctctctgatttgtggtccaattaaataaatttcagaactggttggtgtttaacttgttgcgtttttatgagagatagagtcaaattcttgttacctttttttcccaatctttttctatgttgtatcacttgtgctgccatatcctcttcaaaagtagttctttcttattttttttccatggaatgatttgtttctattaatcaatagaacaagtatggaaaatgaattttttctttcaatcaatagatgaatatgaaaagaatctaagatcaaaatctatccagaattcccaaattatagaaaagagatctgtgctgctgggcctcatcttaggcacttttattatatttttctcatttgcctataaaaaaatggtcccaaattatggaaaagtggtccttctgctgtaatatattaatggtctacttctgagctgattgcattgatatctgtttagatatctcaagtaattctgtcatggaatatttgataaccatcagccataagctattcaagagaagcagataaaaggttcaatttattggttgtcttcggggaattcatttgtcaaactcagctttgatggggcatgggagcatgtctttaggaattgatctgagacaaggttaatggcaggcccctctttggctgacaaccagtttccaaggatttgactttgaatcagacggttaatgtcaggttgcaaaatgatcatagaataatctcaaaccttgttgaatcatacattgactcatcaggttgcaacaactggcgagataggttgaattcttcatgcctctttacccaggagagggaaatcctgtttgtaagttccatgatccattctttgaatccatcatgcaggcccttgcagaagcttcaagtttcgtaagccagagtattgaggacaatcagtttgagcttcttctcaagcatatggtgggggatgggggagtacttatgtgacatgttctttgtttttgttttttgtttttttttgttttaatagaagcatttactccaagacctccaagttcctgttcttttgtctgtttctggaagacctgctaatggactgccatctctagctactatagcctttctgtgatctggaagttttccttttctggctacttaaaaaagtgaagatgtttctcagttgactttttcttggaccgttcaagatattagaaagataaagaaggatttgtgcagccaaccccaagtagttgtgatttaaggcttccttaagtttcattttgacattaccggtggaatgtggtagacctgctaataggtgccatctccttgctacctttgggagcagtccatacttgctagactttctgtgatctgggagttttccttttctggcatcttagaagagagtagatgtttctcagttgactctttgttaggccattcaagatattagatgaaggatttgtgcagccggcccaagtagttgagatttgaggattccttaagttgccatttaacattatcagtggaatggggcagtgatattagaaggcatatatttcctatcaaaagaacatgtaatgatatatattttataactacagaaggtccgtgtcttccggaactattaagaatctaagatttgtttatggcagcacacacgtgtttgtgttctataggaggaagttttagttggactattatcaaactacaagcagtggctctgttatttcccttctctcttttggtccatggttatattttgtcaaatgcttagtgtctatttagatacacttactattttctgtttttaaatatataaaatatagtaactcttatataaaaaatatacatttaccttgtgtattaaaaaattgcttataatatttgagataataaaattattttaatacctcagtttttttaaatagtttttaaaagccattatctttttaaggtatcattttcattttcaaaaaccagaaaacaagaaatatattcaaacaacactttagcttttatatttttgtttaaatttatagccatgtgattgttcgttttgcaattatttatcaaatgttatgcagtagttagatattggtgatagataatttttagcttagtgctgctgattaagtttatgattgtcttacaatttttcatctttgtatatgttttgtttgtaaactaccttattgtatctttgcataacgcttttgtgcaggttgaactggagaggttacgccttctttgtgagag

SEQ ID NO: 11065 - DNA, 3406 bp, Vitis vinifera
  Intron number 5 from transcript GSVIVT01004028001 (locus G SVIVG01004028001) derived from phytozome v7.0 (chr-ID chr1 3_random; pos 1506512 to 1509917)
actgcatactatcttacaacgtttctcttggtgtaagtaaataattcattcatgtaaattagtcaaggatgaggtatttgtgacttgtgagtatgcatagctgctgagcattattcttttgaaatttaggactatttgatttattgttgttgtatataattgatgaaaaaagtgtctggcctaaaacttatgattttctttttgttcagtcatttattgtcttcagccatttattctttggttgattaagatgcaaatacttggttgttgcacaaaaatgaatgtttttctcacgccttgtctgaccatttacttgtgcatagtcacctgatgatgtttctacaaaatagtttttttttaagagattagtacctattattcagcctctttatgctcataccattttcattgatctaattaataaaatagcaataaaaaagtttagttcaacattaggaacaacactacataaactgtaaatgtctaaatgaacaagatgaaaaggactagtactcctcttattgattatagaacaaaaaggactagaacaacactatggtgatgctatttgcttgactcacaaacttggtgctttaacttgggagtccaatataactagaagtcccatatgctaaagatgcgaagtgaaaggtgtgccactacatagaagaaatggaagtatgtagagcaattggagtaagaggtgggccgatatggtgataaattccatttacttcatgccctccaccaattgtcttgttcattaagagatcttgaaatacactatgggaagggaaggaatgttgcaaaacaattaagtgacttggttaatttgcttagagataaaagatttataggaaccttcaaaaaggagactccaagtggaagtggaattttctagattttcttgaattaattaaaagggcttaaaatgctcttttaagggggtgagggtgggggtgactcaagggagacgaggtggcatgggcatggccacacttaggggctttggtgcaagttctcaaacatgagcaaggcacatgggcaagccttgctagtaaccatatatgggctccatgacatgtgatggtgtgcaactcaaggttgcaacgacatggggtgctatgcagtcttcccttcccgactgtagcatgagggggaaaagccttctgcaatgaggtggcttggcacaagggcacaatgccttgtgcatagagataagggaagccgactcagatgtgatgcctaatgcttagcacaaaggcacaatgccttgtgcgtagagatgatgagtcatgggtgcaatgccatgactcgttgctgcaccaagaagagggcttgggcatggcatgatgccataacaacagctaggcagagcaaacttgggcaggttgcctcagcatggacgtgatccagatgcgggaacacatatgggcatgactgacatgctcaaggaacaacaaggggctacagccttaggaaagattggcaccaaggaaaattgctagatctgtaggctaagagagggcttggcatgcacactagttgcatagagacacatgtagtaggctgcctagagacgctatagcaagctgatcggatgcatcagctgattcaaatgcatgaatggactgactcaaggcacaagagtgggtagacttcaggcagaacacaacaaagatgtcttggcattgggacaagcttaaggaagatgtattgcaccacaaaccagggaattgaagggctgatacgtggcctgatacaaggagtttcaaatgaatgaggaatgggccgaagacatttgaaagttcagagttgaattcaaattgttattgtaatttgagtttgaataggagtgattcttattttaattgtagtttgagtagaactaggattccttgctccttatcaaatagggagcggttggtgtcacacctataaaaggaggactggagtgccctttgaattatcgtgcaatctggagatcatagagaatatacagaggtatattgagagggagaactttcttaaaacatagcttgagagagagcatgaactcaccaaagagattgtggaagtcttgttaagctatgtcttgtattgttatttagagaagaaataaaatacaagttagggattgagctccatagctttgtgtgtctttgtgagttttttcttgattgcaatctcatgtgggtttgagtatgttggcttagagggcttctaagcgctgcatgaatgcgaaaaatttgtgggaaaattcgtgcccatgacaactaccatcccaagtcatttaaactatgatagattgaagtaacttacttgaataacaaaatgagcaaactgcaacttccagtggaaatcaagtttgcaactaggagttaagagtttggagactgctttaataccatgttaaggagaagagaatgtacttactcttgtttcattcttttttattaaatattagatattgatatgaaatttttatttgttcaaaattttaaaacaaccctattcttgtgctgtacaatgtatattatcgtatagagtattggaaaacggaattgcatgaaacaattaaattcaagacttttcaatttctcatcccctcctccccaccttaccaactgtatgcattacctctggttcttatggccagtgtaaatgacactgccaacattcaagtcaatgcttttgttattgaccttcccaacattgtggctgttattcccatctgaattggcttttgatcacttattgatggcatattcaactatagcatgtctaaaaatgaacttatggtggatctctttatttggcaaaggttgtaacttggctttctgcatctggaatggggagtccctgtatttggttcccttcattatgtcatataaagaagtattgcatttccatcttcatttttatcaagcttatattcatggtagaaaaaatttaatctgatatactgggtcttaacttgctttagtggatattatttcaatgtgatgttagttgcacatgatggaatacaaatgtgacatccatgcccttcaatctagagttattagaatgctggtctagttcataaacatcatgcttaattattaatactggaaaccgacataactgggattcatggctaacaattgcatattgttgcatatggacaaattcagtttgttaatttttttttttcttttttgtattttatgttatgttattttatttatttatttatttaattttctaatcaaataccttataatgtagtttgaaatatgccttagtgttttaccacatcctgcagtctctatcataggtgttcagagtagatttcaaataaccagtataactctgaattcactatgctgcttctaggttttatattgctccagcaccaggaagg

SEQ ID NO: 11066 - DNA, 18983 bp, Vitis vinifera
  Intron number 3 from transcript GSVIVT01028638001 (locus G SVIVG01028638001) derived from phytozome v7.0 (chr-ID chr7 ; pos 11421047 to 11440029)
tggcagagtaagatttatatgttgccattaattttgataaataattacatttattatggaatggaagctgttggcataatgttacctcatgacttggatttcatattttgcatcttcaattagtaaaccggatactgattcttttcattagtcaagacctggctccatgagaaaaaaggaccattcaagtgcttgttgtgttgctctcctttcccttagttcagtagatgtgccataacaagcagaatatttgccttttttctcatctcaagttttaaaccctaaatatccactacttattagatggaaaggaactacgtggccttgatccatggaaatggatcatttttgcattttaaaaaagcaactttgtttctagttctctctttggttctgaagatgctgtatttcacaaactgaagtaaatcatttagaattcttgtatttggaaactattcatgcttattgttgcccctggatcttggctctgttgttaaatgggtggatggtgttgtagtaggtctagggtcaaatctgatattgtatgtgcatgaaaagaaatccatgccaattattagccttaaggtaatttagtgaattcacatataaaaggttatagggataaggttggtatgtttatcacactgctttggcatctttgataatatttataataccttttattatcaacaaacatatcaatcatatgttggtcatggaaattgaatggtgtataaatactctttaagtgcatggaagaatatgtttagtcatatgctcaactggcatctgaactaggtttgaaatctgtcgttccctcataaccaggatatccattttagaaattacttgagattaaattggaatcgcattaggatttcaagtggattctaattgaggctttaaaatgtatgagtgccagggttgtatgaatgtatcatggctgaccaagtactttgaaaaatttgtgaaatcatggatattctgagtaactaagaagacttgaaagcataaggacccaatagcttccaattaaggcttggaagcatatagatgatgtcacgataatggtgtatggcagtaagagtgtatcttggttgaccaattaagaaatggcagataaatgaagaaaatcttatgtgtgcttgcacatgtatgaatatgtctgcatgcaagtgtagacaaattcatttgtgaaaagtcatggctatcaccagttgtgaacatgaggaattagctgagatgtctggattatgtgccacaaagccaaggtcaaagaatgtggatcaagcttgccacaaaaggtattaaacaaagaaatacaacaaatatacatagcacatgtcataagcctcaaaatggtacacaagagtaagtgaccccaatagaaattgttaaagacctagcttctcttcttatccagaatgtaaccacctgattggctgttctaataaaagaacatacaatgggcaagatcatgaatctaccttatccaatgggcaagccaataaggacctctgccactcaaggagggcaatgaattacaactgatgaatctcctctaacattagggttcctaacagcaatgaatctcccaaagtgctaaaagctcagcatcagtggtgcaacatgtgctagcctctttagaggaaccaacattccatgccctttataatctataaaaatgcctgcagaacccagttagtctcaacatttgaatttgtagccatcaaaacttaatttgaagaatgagcacaatgcatgaacttgtatagcttcttaaattccatgcaatttgtaacttgggttcaacttcaccaaatatatgtgactaattgtaagttggaactaaaagttatggtttaaaattcaaaaagtttattttgtggatttgacaatgaacctatgtatttaagtgtcatgttttgttgaaggtaaatttgtcaaaattctggtattcaatttttggtgtgtacaatattgataaatgccaattgttttgacttttttagtgtttctatatttattgtttttttgaaaaaaaaaaaaagaaggattttattcattgcgtttttgacaaaataataaaatatttatagcgtgcaatcctacaaaattaggaaactaaattatgcaaataaagttgactaattcctagactcctctactaatatgaaaaaaaaaaactggaaatacacaactatataatcttgaaaatcaaggaattatacaactatacaatcccagaaatcggggaattatttccttggtattttcaatcaaatcttggaaagtaggaacttaattccttagtatcttcaattagattagttaacactcctcaagttggcaagtagatatcattaagtctgggcttgttagttattgtctaaaatgagtgacttgatagaccatttattaagatattagtaagttgcctatctattgaaacataagaagtacaaattaatccactatatagcttgtctttgataaagtgtcggtgatttcaacatgttttatatgatcatgttgaattaggttgtgagtaatattgattgctaatttaatattgcaattaaattttatagtctcctacttcacttctagatcaccaataatattttccagccaacagtggttcatagattccttgtgccatggctctgaaatctacttcaacattggacctggcaactgcatcttgtttcttacttttgcatatcaccaaatttccaccaagaataatataatacccagaggttgatatgcagtctactattgatccagccaagtctgtgttgttgtaggcttctgaactgaactcttcattttcttaaaggagtattctgttacttggagtggattttaggtatcatttgtagcctataagtgagcttctttaggggagtgcatgaactagtttactatactcattgtgtaggctatattaggtctcatgtgagacaactagatgagtctcccaactagcatatagtaacatcccttgtctatggttgcatcttctaatgcttctccaagcttatgattttgttcaataggtgtgttagtaggtttatatctgagcatcctgatttttttgagatcaagaatatacttttgttgggaaataaaaggaccatttcttgaatgagtcacttcaatcctaagaaatacttaaacttacttaagttttttatcccaaattcttgggtcaatcatttcttaagtttgtccatttcttcaatatcatccattgccacaattatatcatccacgtaaatagctaaggctgcaattttaccagttattaattgtttaataaaaggagtttttttttttttttttgattggaaatgacacagagatatattgatagaaaaaaagaagtacaaaagaaagatgagaaatcctccagccaaagaaaactaaattacaagaaattacactataaaacaagcgaaccctctataatggaccattccttatggagtacacgtacacaccgctaaccagtcaagttgtaacacattaaggggagtccccttaaaaaccttggaatagaaaacccaaagagaagcaaggaaaacaatagagtcccaaagatactctgaattcctaactttatcctaaaaaatcctcgcatttctttcccaccacacaacccgaattagagcgatgcttgcagcttgccacaaaactaccccctcttagatgaaccaaaaccattaaatttgatggacatcatgtcaaagatactcctcggggggacctaatccgtcttagttaactgaaataatctgtgccacaacccaattgtcaaggagcaatgtaggaaaatgtgatctgctgattctccatgcttcatgcacataatacaaatatcaggactaagggctttgtagggtcttctcaattgtagcatgtcattagtattcacctttttgtgtgccactaaccaaacaaaggacttcactttgaaagggacttgagatttgcaaacgaacttagaaggaaaaacctgaggagagccaaaaaattgagataaggctagaaagaaagatttgactgaaaaaagccctgaagaagataatggccaaaatctggcatctggaaccgaaggagatagatgcaatccatcaagtgactgcatgaggccttctaagtcctctatctcagaatctgaaaggttacgacataaattaaaattccaagagaaaggacgagtagaaccgagaactgaagaaataggaatatttttatccaagactactctaaatagtcttagatattgggttcccaaaggttggtccccctaccacaaatcttccaagaaccgaattctttccccatttcctaccacaaaccgagtaaacaaggaaaactcctgaaagacttatgcaatagccttccaaggacagcgatgtgaccatctgactaaagtgttagcatcccaaccattagagtgtgatccataaatgcttaatatgacctgatgccatagagctaaaccctctctagggtacctccataaccatttccctaaaagagcgagatttctcagagaaattttcccaaaacccaaacctcctattgccttcggtttacacacaacatcccaactaactaaatgatctcttttgccttccccaatccctgaccataaaaaatccctttgcaacctctcgatttttgtagccactgaagcgggttaataaataaggaaaggaagtaacagggcatatgagtgaggcaagattggataagagttatccttccactgaaggataagtaagccttttgccatccatctaatcttcttgagatcctctcaatcactagatcccaaaagccacacgccttggggttccctcccaaaggaagacccagatagagtataggtcaatcagaagccttgcaatcaagcatctcagtcaatcttgaaagatgattctgatcaagattgatgccataaatattactcttgtcaaggttgaccttgagcctagaaatgtgcccaaacactagcaaaagactcttgagagtctgcagatcttcctccctagtgttagaaaagaaaatggtatcatctgcaaattgcaaatgggtcaccctagttttgtttctacccaccctgaaaccctccaacaaatttctttcctctgctctcaatagcatcatgctcagtatatctgcgactaaagtaaacaaaaaatgggataaagggtcaccttgtcttaatcctctagataccttaacccaccctttagcgcttccagtcaccaagactgcataagataccgaggataaactaccactcatccatttcctccatctaggaccgaaccccttcttctccaacacttgatccaaaaaatcccacctcacgtgatcgtaagccttttcaaagtcaattttcaagacgacaccttcctcccttgatcgtcttctctcatccactatctcattggctatgagaaccgcatccaaaatttgtttcccttgaataaaagcgccttgagtagagtggatggtttcatgtagaacccctcttagacgccctgaaagcactttgactattatcttgtagaggctagtgatcaagctaatgggtctaaaatttgagattttctttttcaaactctttttgggtaacagaacaatgaaggaggcattagtgctttgattgataattccgctcctgtgaaactctgcgaacactctcactaaatcttccttgatcacatcccaacaatcttggaatactgcaatagtaaagccatcaggccccggtgccttgtccctattcaactgaaaaatgaccttagaaatctcttcttcaatgaaaggggaatccaaccttaacacgctctctcccaaaataggggaccaatctaatccttcaacgctccaagactctcctgtaggactcacgtagagcttttcaaagtaaagcaagatctcctctgtgatactctcggcattattcaacactaagcctctttcattttccaacaccttgatatatttcctattttgcctgccattagccactttatgaaaaaacttagagttacaatccccttccttaacccatttcaccctaactttttgtctccaatggatttcttccctcaaaattaattcctctagctccccttttcttaagactctttgatttaacagatcagaattgagacccccctacttgctcaatggcatcaaagttagctaaatcattgaggatactttttttcttttcattaagctctccaaaagaaaccttattccactccttcaatttggctttaacagattgtaatctcctcatgaacttgtggccttcttatccatttccttgaaaacctctccaccaatttctaaagttctccttcaaactaggatgttgcaaccacatgttctcaaacctaaaaggtgttgagccccacatgaacgggttggtatccaaaacaattggccaatgatccgaggtccttctaataagggcttcttgaaggccttggggaaagagttgcccccactcatttgagtaaagaaaacggttcaatctcttacacacaggagactcttgcaaatttgaccaagtgaatgatgcgttccgaagaggtggatcaagcaattcacattctcttataaaactttcaaagtccttcatgcttggagttggactagaaccctccaatttttctgaacttctccttatgacattaaaatcaccgcccacgcaccataacgggaaagataggccataaatgtcaaaaagttccacccaaaaatccttcttaagtgagagactgtttgagccataaactacggatatccaaagaggtccataatcgtccaaagcaaacttgactaagaccgagaaagatcctattaccacctcctcactacacagttttttagagtcccaaatgatcaaaatcctactgaagcctcgcacgctggaagagcaacccattccttatttctgatcgtccagacactacccacaaaccttttgtcccacttctccttttttgtttcctgaatcatcacaacattcggattctttgaccttagaaaatctctaaccacccttcgcttattccttgtgttaagagagagagagaagaaaaccttgattctcattcatgtagtgtctacttacaattgagaaaatatatatatacaaggttaggagtcctaactaccatacatgtgacctatattaaaaaaaggaaagattgtacactataaattcattatattcaacactccccctcaagctggagcatatacgtcatatgcaccaagcttgttacaaatgtatttaatcctaggacctctgagaaatttagtgaagatgtctgctagttgatcatttgaattaacaaaacttgtagcaacacatcctgatgcgatcttctctctaatgaagtgatagtcaacttcaatatgtttggtcctttcatgaaaaactggattagatgcaatatgtaatgcggcctagttatcacaggtgagtttcatctgtttatcctttccaaatctcaactctcgaagaagatgtctcaactatatgagttcacatgttgccaaagccatacctcgatactcagcttcagcactagatctggccactacatcttgtttcttactcttccaagatattagattacctccaataaaaacacagtaccctgaagtggaacgtttatctgtgggtgagccagcccaatctgcatctgtgtaaccaacaacctgagtatgacctctgttctcgtacaacacactttggcctggtgtacttttgatatattgaagaatacggattacggcatccaaatggctatcacatggtgactgtaggaattgactaacaacactcacaggaaaagaaatgtctggacgagtaatggtgagatagttcaatttacctatgagccgtcgatatctcccagggtctcctaaaggctccccctgtcctagtacaagtttgacattcggatccataggtgtgtctatcggtttatagtctaacataccagtttcttccaggatgtctaaagcatactttctttgggaaaggactacaccggaactggattgagctatctcaattcccaagaaatacttaagtttccccaagtctttggtctgaaagtgggtaaaaagatgttgctttaatttctgaataccatcctgatcactgcctgtaatgacgatgtcgtccacataaacaaccagataaatacactgccctaaggagttatgatgatagaaaactgaatagtctgctgtactacgaagcatgccaaactcttgaacaacagaactaaaacggccaaaccatgctcgaggagattgtttcaagccatatagagaacggggtaacctgcacactaaaccagactccccctgagcaacaaaaccaggaggttgctccatataaacttcctcggcaagatcaccatgaaggaaggcatttttaatatccaactgataaagaggccaagaacacatagcagccatggagagaagcaagcggacagaagcaatcttggcaacaggggagaatgtgtcaccataatcagaaccataaacctgagtatagcctttagcaactaagcgggccttaaggcgatcaatctgaccatcgggaccaaccttaactgcatagacccaacgacagccaactgtagatttaccaaagggtaaaacaacaagatcccaagtgccattagagtgcagagcagccatttcatccaccattgcctgtcgccaacctggatgggaaagagcttcatgggtgctctttggaagagaaatagaggatatagcaaaaacaaaagcagaatagggtgaagataatcgatgataactcaaaaaattgtaaataggatgaggattacgagtagagcaagtacctttctgaatagcaatgggtaaatcatcaggagaaggcagagccggggcaggagaagccgaagggataggaagtgagttagcaggtgcctcagcaaaagggagaggagcagcgacacgagggcgacgatgataaacctgaagtggtcgaggaggcacaacatcagatggggagacaatgggaaggggtaagacttcagaaataggaagagactcagaagtggtggaaaagaatggtgagtcctcaaagaaagtgacatcagcggagataaattatcgatgagtctcaagagaataacaatgataacccttctgaagtctgtaatatcctaagaagaggcacttcatggctttagcggaaagcttgtcttgtccaggagtgagaatatgaacaaagcaagtactaccaaagacacaaggaggaaggaaataaagtggttggtcagggaagagaaggaaatgaggaatatgatcatgtaaaacagaggagggcatacgattaatcaaataacaaacagtaagaacagcgtccccccaaaaacgaaaaggaacattactatggaggaggatagtacgagctgtctcaacaagatgtcgattcttgcgttcagctatcccattttgttgaggagtatgagcacaagaagaccgatgaagaatcccatgatgagacataaatgaagtaaatggggctgaaaaatattctctggcattatcactgcgtaacacacgaatagaaatattgaactgggtttggatttcagcataaaatttctggaaaatagagaataactcagctcgatttttcattaaaaataaccaagtatatcgagaatagtcatcaatgaaagtgacaaaatactaaaatcctaaagtaaacgcattccgacaaggaccccaaacatcaggagtaagaggtatcacagtcaagaactccttaagagaggcaatcttgccaatataagtagatagatccaagtcccgttggttgatatggataatagcaaaagccaccttataaagacgttggatatcattcgtgtataatcctttggcctgagtccaaaatttaaaacaagttttgtaggcccgaagatgaagaaggatcttgggatcaactgattgccataatacactacataactgggcatctatctttctccactgtacgcgctcaacctcagggatatttgcctcctatgtaaccaagtgatcctcatatccttatcccataaaccaaagttcaacagaggcagaccaagaaagataattttcactgccaaccaatttctccgaagtaatcataggagatccaaatatgacagaggaaaaaatggaagttttagtagtcatatccacttatctggagaatgaagtatatttggatcgaagagagccctaatacgacttcagatgcggctgaagaaggaaaaaccgaagaatcgcccttgtgagagaccaaatagaaaagaaaaaacaaccgtggcaccatcggaaaggtagaagaacacttcccaaggcacgtgcagggattggtgttgagaaaaaatagccggaggacgccggaaaaactgttcggagggccggcggaggcaaaagaaccccaaaagaggcacgtgcaaggctcggatggcagaaacaggtatgaagggtggctagtcggcgtcaggcgaggttggaggaggaagcgcatcaccggaaagtggctcacgcgccctcacgggccggcacatgaggtgcagtcgctggccggaaaaacgcgcatggccggcgcgtgggtggttttttggcttcggtgctttgggaaaaattggagatctcctccaggcgctccttgcggtgtcggaaaaagacgttgccggaaaagttcgccagaaaagtcgccagcggtgaatgttttctgacgacgattcgaccgaccagaaagctttggggtctggggaaggtgaccggaatgaaacacggtcacaggaaggtttcccgggaattgatgacacggggaaactggaaaggattaggttttctcccttggctctgataccatgttaagagagagagagaagaaaactttgattctcattcatgtggtgtctactagaaaatatatatatacaaggctaggagtcctaactaccatacatgtgatctatattaaaaaaaggaaagattgtacactataaattcattatattcaacaccttgaacccaaacccctggtgttccagctgataattttcatggaaaaactcatagaccctaacccgccaaaccaaatccaccaagtctcaattacttgtggagcaagtgttcttcctcctggaataaaccttaatatctagagagtataaaacctttcgcactttagccattttcctgggggataggccatcaataaggaattcgcccgatggggataccacagtattcccctggctacctgtcatcaggttggaatccttcttaggcgagctaggtttagacttactagggttaaaactctcggacaactggtttgataaagcaaactagttctcctcctcatcacggacaggaatgccaagatatttttgataaaaagagccaacaacgtcttttttagaaaaaatttcagaagtaacttgatttaccttaggcgactaagaaagagagactgaactagggagatgtggaccagagggactcgacaaaggaagttctagactacaagaagggatggaagaagactcgggtggctaagaaggaaaagacagacatacctccatgttttccactcccggaatttcacaaatcccctcaaagatgagtcctttacctctgatttctgaactataaggtaaatctatgactgctgaaccacgaagatcggaccccattcggcccaaaaagccttctttgtcttcttcgaaatagggattgcgcggatccacctctcctcttgacatcgaggtcccttcccttgaacgccgctttctgttacttgactaaagacagcgaaagagaggactctctcttaatcctcattccatctgagattccgtcccaaaatcgtcttccaaactgcgaacttcactaaacgacgatgatttcccgaggaaaagaggctcgctgctactctgatgtccttgtcgacaatcaacacttggagggaagagggtggtccacatcttctttgaaactatcatctcttccttctgcatagagccttttgtttgatccactggagctttcccctttctcgctgcatcatcttcttcccttcgagattgacctttctcaccagaggacatcgttcctcctaaactttggcccaaccctgacgggccttttaaattacagcccaggatagtgtctgaaggtgggctagggttggaaagagactgggcctttaactcaaaggcccgaccatcctctgcagagaaagcctcgatgccggccctcacttcaattggaccttgagagcgtgcaagcagcgtgatcgcctttgcagaagaaccattcgctggagtgttggagatgataacgctacagtctcgtggacttgaggatcaactgggccagcgtgaagcccacgattcttcgaccctctttgggccctaataggctgggctttaaacaagggctcaggcgctgtgggcccattgaatatttcttctgctgggcctagactactccctccccaaccattctcccttttggtcgccaattttgtgcttgaacaccgataacgtgactggggaagaagcctcctattgtagcactcattatccctaatgctaccgcgtagcccctctgcattttttgaccattgagagacgcaacctcccgctttcaacaacttgtccttgctacgggttgactcagacgtgacaatgtcgtcttcatcaacttctccgatgactgaaactgcaactgtaaatgtccaggccccatcttccacctcaagcaacgctgggagcacgacatttggaagcatctccacccacaacttcaccttcgacaagtctgccagcttcaatgattcccttgccaccttcgttaccctcccccacttctttagaatgaatttcaattgatcttcatcccacaagtgaaaaggaagacctttcaattctaaccagcctcttctgaattttccgaaaacaaccatattttcacttggcgaccatctccttaggagaacaaaccttcctttcactaaaagtcttccttgttcttggaaccattcaactctccttgctgaacccacaaagaaacaccccttgaaagcagaaatgggagttatagacaccattccttttgtgcccatcatcctcgtgatagcttttccttcgtgagtccagtcttgaattttttctttgcattcgcaaattacagctctggcccattttccagctgacaacaaaactccattcctatgtccatcctctgcaaccacttctgcgtatgaccggcaacttctgtaaatgcccttactcatttgagtatctccaaacgtctccttcgaagctcctccagcttgatcagaatactcttgcactgaaaaaatcgccttcctaaggtcttcccacccattgcctttaacaccctcggggacgacaagaattaaaggtttcctttttgtaacaatttctgtaattttcatgaaacaccctctattattgaaacaaatctccatcaagtgagtcttagtctttcttataaatcccctggaagcctccaactccacaactttcttcaaatgctctatcaaccaatccaactcctcctttccaaatcctactaagacaacaaaacctcggctcctttctgttactgattcccaagttccctcattcgatccttcaaactttacctaaaaagactttttctccacttcaaacttttcaaccttcatccttgtgatttcaagtttgatggatattgccacattaataaaaggagtatgatccccctagtttgttgtacttccagtttctcatggtttaagcaaatcttccaaaccctgatataggagattgttttaggttatgtaatgcctttcacaatctgcatacttcattagccttgaatccatgcaggaagctgttcctaatgtcaaactgttgctaagatcaaccaagattagttgccaaggacaacaatacttctatagtatccatctttattattttagtgaaggttatttgatagtccacttcatatgccagattgtagcctttagctacaagtttagctttgtatctctccaaggttccatctatcttatattttacagtaaacaactactgacaccccattggtttcttcccttttgataattcaataatctcatatctttttttctttttttttttcaagagcactcctctcctcgcccatgactactctctaattctcattcctaagtgcctcttgaactgttgatggaatttcaataagatttaattgattaatgaaggcctggtgttgtgaggataatttatcaaaagaagtgaagttagaggtagggtgttggggtgcattttctaactcctttccaagaggtattgacaaatttaggtcttcaaacattggtgacaaaggagaatgaatgactagggttagattcagtatctatcatgggtttaggttcttgggtttgcattgaaacagggttcaacaatcttctccttgaataaacttatagtgccatgatcctcaggttcagaagtgtcgacctctgtaggagtagatttgataactatggaaggagttgtaagggacaaatttggtggattaggtaagctcaagtcagccttatcttgatttaatgatagagactcctcctcaagatgaggataggtgaagaagggatggttttgagtaaaagtgacatcgatggaaattctcagcctctgtaggagtagatttgatgaccatggaaggagaaattctgtagattaggaaagcttacgttagcttgatcttcatttaatgatagagactcctaaagataaggataggtgaagaagggatggttttgagcagaattgacattaatagaaataaaaaatttcttggaagtagggtggtaacatttatgccccttctttattggtgaataaccaatgaaagacacatttacaagctcaagtatcaacttaccatgactttgagcatgaatatggacaaaggagacaaatatgaacactttaggtgagatcttgctaaaccaatgataatcagtgaagaattcagagagaacatttactagggctttgtttcccaacacttttgaaggtaaccaaatgaataagtaagcaacaattaataccgcttcccccaaatatgatttagggacacttttttcaaataacaaggcatgggtcatctcaaaaaagtgacaattttttctttctgcaattgcattttgtcatggagtatttggacacattgactcatgttttattccttatctttctaggtaagaggataagatctggttaaagtattctttcttgttgtcaaatttgatactctttatttgaacactaaattgggtattgatcatcttgtgaaaagtagagaaaatagaaatagcatcaaatttgtttttcaaaatgtataacctagtgacattgagtaaaatcatcaataaaagaacctaaccaacgagctctagtgatatttagaatctgagaggtccctaaacatcaatatgaattaatgtaaaaggataagatgatcatctattattgctcaaaggaaaaggaattcgataatgtttggtcaagtgacaaacttcataaagaaagtcattaacatccaaaatttgaaataataaaggaaacatagtttctaacaaagtaaataatagatgttctaaacatacgtgatgtagccatatttgaactttattttatcaaagcttgaaagatgagataatggtatgcaaccattgccattatcactccctacatcaagatagatctccttttgttctctagcctgaccaatcgtcctcattgtatccacatcctaaaacacaatgggatgggaaaaatgttactttacaatttaaatctttgggaaacttgatgaattgacaagagatttacggagagtttaggaacatgtacaaattttagggaaagagatggcgtaaggataattatcccttgtctagccacagtaactaaactttcgtcaactactttgattttttggtttttgggacatggctataagatgagaaatgatgagagttgtggtcatgcggttagcatcacccgagtctataacccaatttccatgccaataatcttttaaggcactaaaagaactagtcatgaagtacttacttgatctagccaaggtgtatggtgtgttgggcatatttagagaggtgagaaaactccgaagtctttcaatttctttcttttttagtcccccaaactcccagttgtttgaattctcatggttggatttctcctctaaaagtgtcatatttgcttggcctccttactattcgaactattgctggtttcagtttccaccattcctatcaagcaattgtggtttcccatgtaacttctagcacatctcctttgtatcccttgttttcttgtaatgagtatacccaaggttatccttattacttgactacttggatgcctctcctctacaagaatttgtgctaggtcccttagtttcttgcaatgagcatactagaggttatccttgttacttggctgcctggatacctctcctctatcagaatttgtcctagggattggaccactttgaaagccccaaaacaacaaaagcagacccttcacttgccagagtgcccaatgttatgcttcttctcccttcttcagcccttatgattgaaatacctcattcgaggatgtcagtgattccttcccaagtacttgaatatgtacctaatcatattccgcgttaagtccaaataggaattaaaatatcctctctcttttgataaacttaagaaacatagcatatcctcgctattctttgttttaagattttgataatagtccaattcaaaccataatctctcatacactcgatcatggacaaagcaccttactttgtagagtgcattgtggtctttatctactaaatctgagcagcatcttggactttagaattggtttgtttcattgtctcctagatttcctttgccatggttaggaacatacatgctccactgattttggattgcatcgtgttctatagccaagacatgatcactgaatccttctcattccatgcagccaacttgggatcatcttcacttggcattggtccaatcgagtaattgagcttgtcttttcacttcaggaacgtgctcacatgttgagaccataccagatagttttaaccattaagtttgaatgagggccgaaggttttggaagtcattggtaggtgtttggttttggaatgcattgtttgagactgggtttttgagatttttgatgtagtggactgtgaaatagagacaaatcaatggtaaaaaaggccattgagaagagaaaaaaatggtgacagcaatgaaaaccgcttgaggcagggaagagcaggaatgaaggccactagaaatcaacagtaataaagaacattgggaaaaaatattggaagaaaactttgagaccttgaacaagctttaataccatgaggaaaagaatgattttatttattgcatttttgacaaaatgatacaatatttatagtgtagaatcctaccaaattaggaaactaaattagagtaaaaaaatttgaatacttcctagaaatcctcttccctacaaatgataaaaaaaaataataataaagcaaaaaatatacaactatacaatctggaaaatcaaggaagtatacaactatacaataccagaattctgagacttaattccctagttaacaatgttgtcagaaattagggggttaattccttggtatcttcaatcagattagtcaacaactttctattctaatcttccaacatgtatgtgcgtatttttctgttattatgttaaaaaaatttattttatacaatgtgatatgatacacaaacaaaataccatatgattcataagtcgacaagtatgaagccaggactaaatacaggaccttgcctaacctatgtaaggtggctaggtgaagaataccaatctgaagatttgtgagacgtgattaattggcacttaatagtgtgatgtggccttctgccttgagtttatcacgatcttttaggttatactctgactaataattcattacatataatatatatatatattctatcttgttgggtcttaggcaaatcaaacttgtaccaatcagagatcttctaattgctgagtttaggacaatagcaggtcgttccttacaaaacatattgattactttaccagtgatataccaggtactttctactaatcccgcaggttcaagttttctttttgtagaagtcagatcatttagggaagcagtacttctgctagttactttatgatttgagtattatggtcaatgcgtaggaattataacttttacgctctttaagggaggggaaaaaaacagtgcatagcatattattgctcacactattgtggtgagctgctgttcctgttactgtagcagtattattagagctactgtagcagtgctagatcaagggtaaatgccaaaaaacaaaagtggaaaacaattgagaaaggacaattcatgcagtgatagaagtgaagttacactatttctttaaagtttgttcaaattcctttagtctacttgctccgtttcatttgtgtggctagagtttgactgtgtatattcggccaacataatactgaaacaagctctgccatccatttttcttctcaagtatggtttatccctttttcctatttccccttggaaaaattgcaatcaagtcttagcctgataagcagataattcatggaactttctaattttgaagcattttctgctcatttagcatgtgaggttgtgggctaaaaatgttcttttcttgctttgttatcagat

SEQ ID NO: 11067 - DNA, 2103 bp, Vitis vinifera
  Intron number 4 from transcript GSVIVT01024224001 (locus G SVIVG01024224001) derived from phytozome v7.0 (chr-ID chr3 ; pos 43478 to 45580 reverse strand)
aggtaagaactgacacactagtattttataagctggttcatcagttttctaggtccttttctcaggtatatgttaggtagtttagctatggactggaccaaatctagttgatgcaaaagtatcaacttcagactaccactacatttatatcacaggttgcatattttgaaattttttgcatatttcaaaaaaatgatttttttttttatactctaatatttgaatccattttatgcaaattgtttctggatactgattgaagatgaggagtgcacagatttgtgtgttcaataagaagtctagcaagcttggtattgaacctctaaaatataacaagtagagtagaagtaaaaaaccatttgaggtgtttctgggggacataatttcagtttctcaggcttgttcagcatgaagttacgttgtttaaatgtattttggggatggtgttgatacttcagaaataaatttggtaacatggtgttgatgattaggaactagcaattttctatctttctgtcaattataggatgcttgaagttaaaaggttttgtgggattttcaggaggcagtggaattgaacaatgaatctgatgatttaggcttacttcattggacacttttttcagtcgattaaaccaaacctttttaaatgtaaaattccaatttctctggtatgagaacttgcagactgaagtcttttggattgtgtggaaatgggtgcatgatgaacacataaacaactttatgtgatgatctgccattcattattcttttcccttttgagttaagatttgttctggtatatatgaattatgatgttccattctcctgaagagtagtttgacaattcatatttaagcatttttttattaaataataataaagcatcttatttttctttgttgtcaaaaaggattcctgcaaatcttttggtaactcttgccctgatgtttaatgcgattgctcaaaacctagtcttttgtactcagaaattaaacatttggcattgatactgtctgcttctctcatagggttttgattaatatagagtgattattgaaagaattaaagcaatgaagaactgagtctatctactgaactttttggttagcttagcccttaggatgttcacatatggcatatcataatgtaaagctactatgaaggatgtgagaaggaagtgaatggttgagtctatgtcttgggaatggagatcccttatgttttggagtcttaactcaaaaacacacggatagagattattagctgactgaccatactaaaatgagagagttaatttttttttttccatgttgcatttaagcttctgaagaccttagattaccattattcccagtttacttgtatcaaattaaagcgagttttgaccttcaaaagtaaatccactgctaggttttcctaagttccccaccaaaagcacaactttgttaatttcacatgaatgaattgtgtttttctagattctttttgaaagaatatagaatgtatgggctaaatttcggctgctggaggggtattcctaagtttttggatacccttccccactttgtctatgcaataaagaggacaaatacatgagatgcaaattttgcttgtggaaattattcttaatttctagattgagtgagagaggaaggagaaattattgaaacaagccatgatcccttcagttacccctggaattgaaaatgatgattttgaaatgttcttctggtctggtctacccatccggaaagtagaatcctgattattttaacaattgcttttgagagtctagcatattttgtgaagaaggtggctgatcattctctttctttttccatctgtgatgtagaatagattcatcaaatctgcttaaacaggctgtgatgtaattttatttttctctacattctgcttcggtagtttgtatctgtatgaatcattgtcaaaacaaatatgatatttcccagttttcatatgcctaagagactgatgtataagctttaccccttataacacctctaatttgaatgaacttgtgttgataatcattctattgtctcaggttgatagaaggtacaaacagtattatcaccagat

SEQ ID NO: 11068 - DNA, 9033 bp, Vitis vinifera
  Intron number 7 from transcript GSVIVT01000528001 (locus G SVIVG01000528001) derived from phytozome v7.0 (chr-ID chr5 ; pos 13771844 to 13780876 reverse strand)
agttacatgtatgtgcattcattctctccttttaccatgacaataagttaaacctgtatatgctgacatggggcttacaaatgccacctttttgatatctatctttgtttacatgcttgatccaaagaatttattctttagggcagaacttaaactctacatggtaaatattagatttaaattaatatatctcctccttttcctgccttattatcttttttaaagattataacatgctatgggaaaaaacagataaattaatcctataaaaaattaatataaatttagattttaaatattcaaaataccaggggaaacaacttataacaatgtgaaatttctggcagtgcaggattttgtgtgtgtgtgtgcgtgtgcgtgtcattgagtgttggttctcatctgtggatagacctcttcaaagagctatctggatcgagttctgttctttctgtacaaagacatatagttacacctattgctgctaaattggtgcttggaaaaaaaaaaggttgattggatcaactttcagattttatcttgataagataatttcattttatgcctgctgaggttagagttggtgattactgggataactaactgataaaaaggcatccaaggtagtcatgaaagtgcatctaaattcattggaatctggtagattctgaagttgatgctatctttttaagtttttagaaagtatcagagtaaggtcttaacttcagaaacttaatttgagcttttgaattgaatgaccattggctcaaaaatcaatctaaaatgttgctaaagagtacagattggtgatgctgttgtgattaatgtcattatgtggtccattgaaatgatggtccaaaccagctctaagtgctactttttttttttttttgatcagaaacaaacaaatgtattaattgataataaaaacataagaaggatgagaagtcttcctcatgatgacaaacctaatctaaaagtaactaagtaaacctccacaaaacaaggaaggctatacaaaaaggacaaaagacttatacaagtataacaacaccaacccctataacccatccctaatgtgtacaaattgagagccaactaagctgaataatactcaaaggttagggtttaaaaatgtctatatagtaagcccaaaaagaaacatagaaatgaagcaaaacccacaacgactctgacgtcctcctagtgtcctcaaaaatctgagcgttcctctctctccacacaatccgcaacaaagagagacatgtgatcctccaaagaaccctacctctaattgaattcccaaaatacttgaaggagatcaccatcatatcacaaatactgcctggtggaacccactccatcccaacctatgaaaaaaatcctataccacaatcccaaagtaatcggacaatgtaggaaaagatgatcaattgtctcactactcctacatagaatgcaccaatcaggactaaggactttgaaaggccttctcaactgtagccatggattgaaatatcggttttacggatatatcggaaatatcggtggatattttttcacaaatatcggtggagtgaaaattatttaaaattcataggaatgcttgaaaaaattccaaaacatgataaaatcagtaagaatacacattttaaagttatcttgtaagtgtaattgacatatatataattaagaagaaaaatattataaacagagatatatcggtagattcgatatttgaatttttaaaaataataaatatgaattttgaaagtgtataaagttagaattgagttaagaaatatttgattttattgaataaaaacaatttatacataaatataatacatatgagattgcaatattctttagtattataaggaagagatcgatgtggtttcattatattgttagatgaagggagctcatctcgttgaagacaatatttatttaaaaatttttaaaatacttttattaaaacatattttattatattttaaatgaaaaattaaattaatttatataaaatattttatttgagatttaattttttaaattttattaaaaatacgtagtaacaattttttctattaatattaatttatttaataatcaaaataaaggtcgataattaataattatttatatagagagtggaaaattgttctcatgatttgtttatttttttttttttttatctctactaaatctaaaaaatcaaaagggcacccacttctctcactcgggcatcaagaagcccttttctgaagttgtcctccaacgagagaatccctaaaaaagccttattttcctctgccactctcaatcctcgtaggtactaatctaatcatgttattattattttttttgcaacccccgtttgattcccaagaaaatccatcccccattcgatttctgggaaaattcatcatcgtttgatttccgagaaaatccatgcaaaacccccaaagaaaacaaaaaaattgcttttcttttgctccttgtgttttttggatatgttttaggggtctctttgctgttatgccattggatttaaatttcacgaaccctaaatccacgatttttgagccaggctaaaaaacacaacctttgcatgcaaatcctgatcagattaccaagtagcattttatgtttttttttttttttttaaaaaaattggacagatttgtatcctgtgcgcgggttggactggtaggaaatatagggaaatttctcgtaaaatcagtaaaaatattgaaatatcggcgatattttcagcgatttcttggaattctccttcggttgctccacgcgtcagctccactcgtgatttgttttcgatttatcggtgcttcaccaattttttgacgatattcccgggaatcgataatcaggggtgaatatcatatcgagggcaaccgatatccaaaatttcgacgaaatatcggcgataaattccaatttttcaatccatgactgtagcatgtctggtatttaccttcttaagtgccactaaccatgcaaagaccctgatcttagaaggaactcttgatttccacaaaaaattagcttggtagaagtgaattgaatctagagaaaagtataaggctgaaaaaaatgattttactgagaaaactcttgaagaggatggtacccaagttcttgcatttgaaatagaaggagtcaaatggacattggacagtaaggaccttaatctttcaagatcctcaatctctgtatcaattagattgtaatgaaaggtgagatcccaagacaaagaagtgttattaccaaggataattgagataggatagtttttagtagtggtgactctgaaaagacttgggaattgtaaacacaaaggttggtcctctcaccacaaatcttcccaaaaacgaattttggacccattacccgcaacaaaacgagtgtgtgtagaaaaaacttggagtaaatgtgcaatggccttccaagggcattgatgtgacctgttgaatataatgtatttatagtgtacaatctttctttcctttcttaatataggtcacatatatggtagttagttcaacctagccttgtatatatatttctctattgtaagaagttaatcatatgaatgagaattaaggttttctctctctctctctctttcaacatggtatcagagccaagggagaaaactttattctttctggtttacccgtgtaattaattccgggaatccgtccagtggccgtgtttcattccggtcaccttttccatctcccaaaactttacagtcagccatatcgtggtcagaaaaccctcatcgtcgtcaacatttttccggcgacttttccagcgactttttttccggagatatttttcgacgccgaccacatcatcaggagcgcaaagaggagatttgcaacttttctcatagcaccggagccaaaaaccgatccatacgcctcccacgcgccgtttttcttcagcggcttgaatcccacacgctagtgcgtgagggcgcgtgacccactttctggtgccgagcttctaccagtaggctcgttcggcgccgtcttgcacttttaagcctccgtcagtcctctccgaaccttgtttctccattttttaggcatttcagcctctgcgagtcttctttcaaccttctccggcctcccgaggggttggaactatcaccggttctgaatcttttagtgcttcggagatgagtgtctcattgaacttcgattttggcctccttgagtagacaagtgtttccctatttgtctgtaattctgtatctcctcctgagtttaagtgtccttctgtattaggcaaaggggtagatataaggcacgaagtggattcaaacatagcaacatcaagatagtcaaaggttaaggaaggtctagtctcactcatggactccccctgaagcgagtagtagggagtatgctaaaaaaatatgacatctaggctaacatatagcttctaagaaattgggtcataacatttgtaccctttttgtgtggaagagtagccaagaaagacacatttaagcgctttgggatcaaatttgttccgcttaggtccgtgagtgtggacaaacatagtggacccaaagacacgaagtggaagatgtgcatcaagtctcaaatgaggggaaaactcttggaattcctggaggggtgtgacaaaggataggacccgactaggcattcggttaataagatatgtggctatcaaaatggagtcaccccaaaattgtgagggcatgtgagatgtaaacagcaaagcacgagcaacttcaagaatatgtctatttttctgttctgcaacctcgttttgctgagggtgtcaacacaagaactttgatgtataataccattttcttataggtaagtgctcaaggagtgattgaaatactcagtaccattatcagtacgaagaatttgaattttggtgtgaaactgtgtttgtatcatagagtgaaagttcatgaagactgattgaaccttagttttatcagtcaacaaatatacccaacacaggcgagtatggtcatcaataaaagtaataaaccattttttatgggtcttattaggggtacgtgagggaccccatagatcactgtgaatcagagtaaaaggaatggatggtttatacttagatttaggaaaagacgcccgatgatgtttggctagttcacacacttcacactgaaaatccaataaagttttatttgaacttagtgagggaaataaatgttttaagtactaaaaactaggatgacccatccttttgtgccataacaaaatttcactgtccttaggataagaggtagaattacaaacagtaggagaactctgtccaagtatcttggtttcgtcaaagtaatatagaccctcacgttccttagcactgtcaatcatcttccccgatgataggtcttgaaaaacacaatgagatggtaggaatttagctgagcaattagaccttttggttaactagctaatagacagcaaattgcaagacaaattaggtacatgtaggatagggttgagagtaatcgaatttgaaatacgaatactccctttgccagcaactgatgataaagtaccatctgcaatttttacttttaaattaccggcacagggagaatatgtagaaaataaatgatgagcattagtcatatgatcagatgcaccagagtcaataatccagggagtaatttgagacatggtgctaagtgctgtaaaaaaggtacctttttttgccaaagaaccagaggataaagtggtagaagattgaccagaggcttggaaattagaaaaaagctcatataattttgcaaggtagttggaatttaaccccacactagaagttgactgacaaatttctgtgggagttttgtctgcctgggtttcggtggaggcctgatgactatgagctttattgggctgtctaggcttccaatctgcgggggcttgccatgtaaagcccaacaagtgtctttagtgtggcccaacttcttacaatactcacaataagtcctcttggactgtcttgggcttggcccactagatctagcaggatgaggcccactagatccagcatgaggcccacgtctagcaacagtaagaggcccatgaggcccatgaggcccatgaggcccatgagttaaaagggctgagccctcaggtccaaatgagagatccaacatcactctccttctgctttcctcttgccgcacctttgagaaaacttctcggatggagggcaacgaccggcgactgagaaccctactcctgacgtcatcaagctcgcggtttagccctgctaggaacttaaagaccctcttattctccatcttcttcttgaagcgcacattgtcccccgtgcactcccactcctcttcacagctgagatagagatcttgccacaaacccagcatctcggtgtagtattccgtgaattcccgatctccttgcttcatctgccaaagccgcgtcttgatttcaaagatttgggaagcattctcagcattagaatacgtttcccgtatctcatcccacacgtcctttgccgtcggctggtttcatggagttaatcaagcatgaggtgataaaggagtttttggactgccatttctgggatgctgctacatcggtcgaaggtggttgctaagtctcgttggtaaggaaccctaactttccctttccgtcaataacgagcttgattgcttgagcccactctctgtaattcttaccattcagttttttaacggtaaggtggagtggggagttgtcgaatgtatcaacagggcccatcgaagagtatatctccaacactctttcatggtggtttcctctttgggcatccatggacagattagggttttagagcaaacgaggctctgataccatgaagaaactgagaatgatttaaaattcattcaaaaactatatctttttacataaacgtatccctatttaacaaatacacagaaagcaattaaaaaggaaaaaaatacaaatatggaagaacacaaattatccacaattggggcctcaatctttccctattatcttaccaatcatcattcaaaattataatggatttccataaagtgcttcctctctaagacccttctcacctcaaaggaaatcccgttggatcggctttattctcaatctaaccactcttgacatatggaataaggacatatagtaaatgggcatgctagacaatgtgctctaaatgagagtgattctccctcatttagagataaattacctttccacaaagctagcctcttgcaaaaccttccctcaaccccataccaaaccgccattggtttatgtggaggtaagaggagggaaacactcccaccttgcaaccaagctcaagggccaaaacctctaaattctccaccctcccaactggtaaaatctcatttttgtccaaattgataggatattcttagatgccattataatgctaatagttgtctgcatttagttttgattctttgaatttctatctgtgctatgattcatttgtggctattcttaaataaattaattatttgtagtccattctatgagattgatctaacttgctgataatgaccatgcatagctcaaatggtttgagtcaatttatttatggacttgtactcaaataagcttactattttactagagggccatgtttggttcacaaaattggagcttgggaataggtgttttattcccattccactaattcccttatttggtgcaatattttggacttagggatcaatcctcacttggaaatcatcaaccacaaaacatgagttatgaaaactcacaatggtcccaaggaatgctacccctcatttcctcatttcctcatttcctcatttccagcatattctctaagcttctaaacaaataaaatgacaactatatataattttaacttatatttgcattatttattttaaaaaatgatgtctccataatctaataacttgtttcttattcattttttaaatatcaattccctcttgcactagtacaatttattaggcatacaaataattttatatatatatatatatgtatatatagatatctatagatcatacttattttttttataaaaaaataatattttattatggtgtttttcaatagtaattatgtatttcaaaaaggaaaaaaatttaatgcttaaaattaacaatataatacttaataagttccttccattttttttaaaaacttccaagttttaaaatacatttaaaaatgcatatatttaaaatctatactatccaaacagttgaataaagattgatatcttttcttaatcccaaacttgacttagccaaacacaagaatgagaattattagattgtacaatgcttattcctggcatggattttcgaaggaataaaattcctattttggctgttctgtgaacaaaatgaggcctaaatgaacacaggttttcagaattgagattctagatggaatcaatgtgttctcaagatcaatttgagaattgtagagttctaatatatttgtactgaaagtaaacacttatatgccaaaagtctgaatatgaaaatattttagaaacgtacaaagataaagcaaaaagctcacgaacctcaacaaaagagtaaagaaacaaaaagcatataaagcataatttcggtgaaaaaaatagaggtggatatgcaaaattaagatacaaaacttcaagattacgcaatagttggcttactcttattttcttctcattttcttaccttatttattgtcaagactttaataaacttatttgatttcaatattattttcgatgtgttttaattggtgggccaatgtatagtactggtccaaataggatttttcacaagcctggatgaaattccttagaagtaccaaataatttgtcttgttttttagttcacacaaagtcatattggatacataaaagatccttatattgaatgcagttcggtggaaattagctcatcattggctaagaaac

SEQ ID NO: 11069 - DNA, 5952 bp, Vitis vinifera
  Intron number 6 from transcript GSVIVT01012939001 (locus G SVIVG01012939001) derived from phytozome v7.0 (chr-ID chr1 7; pos 13921523 to 13927474 reverse strand)
gcattatcatctattgagagccttccagcggtaaatttgtgtgtttggtgttttttccttacaatactgtctctattcgattaatcatgatttctgtaagagctgaatgtgaatgctgaattttgcttatgttagaaaaaattcttattttattatgttatatagttgctagcataatggggagacttttctataattgtttcattataggattggaatgactttacttcattgcttaccaacttggatcatttacccaccatctaaaagtttgcatttacttaatttatattcattccatttataccatttttgtagtgacatgtaatctcatatataaagattctgtttactttaggattaaatctcatatgtaattggatttggcttaataatttgcagtttgctaaatagcttaaccttgaaagcaaaagttggaagttcaaaaggtttcacttgttatcctgcaattgaaacttgcattacctgcccagtttaatgtaaaaattgtgtttctgtgacaccttttttggcaaataataatctaaataaaaatttgctaataacttgcaagagaggtgttcaaggtcaggagggaatttgaacctttgccatgggaacaacctcttataaaccttggtgagatgctaacaaacctccttggcttagttgtttcctctcaattttcattttcatttctggttttcaataatatgctgtgcaagtattctcttgatttttctatgttagagggcaaaagaagtacttcccagatttgtatggttggcgctttgagtgacatgaaactacttctctccttgggtgtgtttataaacacattttgatgcaatagcacagctgtatcatttgatttactagtgtcctggaaatgactcaacctcattatctgacataccttaatggttgatgtagttgcatttgtttttgttcttttgtgggaatggaactatcgagaatctaggaatattgttcttatttttaggaaaaaggataaaatttgatatttatttttaaattcagatttagttaggattttttagttagtttcctgttctattttttaggaagttcctgtttttttttatctggaggagtctctatatgaacttatattgtatcctttgtgtattattcagaaaagaggattaataaaaatttattttcctcaaaacctacatggtatcagagcataggttctttatcaaataattcccgtggtgaagatgactatgactagggccaataaaaattcatcctcagttacaacagagaatgacctaacaaatcctgttgtttccccaaatggacctgatatctcatcatttagttctacccttcaattaacaattcataaattgaatggtaagaattatttagaatgtgcccagactatgaagctagcaatcgatggaagaggaaagctatgacacttaactggtgaggtgaagaaaccagctgcagatgatccaaagttggcaacatggaaattcgaaaatttcatgataacaacctagcttatcaactcaatggagctaaaaatagggaagctctatctcttcataaaaactgccaaggaagtgtggaaggcagtccgagaacatactcaaatctggaaaattctgctttgatatttgatttaatatctaaattgtggcaatccaaacaaggggattgtggtgtgactgagtattataatgagatgctgattttacggtagaagttggatttgtgttatggagaggaatgagaaaacccaagggatatggtgtgaggtacatgaatcgagtagagaatgatagggtctttttttcttggcgggacttaccaaataccttaatgatgtgagagattgaagtgagaggttgaatcatgcattacatagttgtgttgatatttttttttatctaaacaaagattttgatttattaaatgataaatacaagcatggcgaacaatcctttgaagatgtacaattgtaagttaaaaggtaatggaatatcatgcaccataaaaaaactaggctatcctcacaagggaaaaaaatgcactaaggccatgtttggttagttggatatagcatgggataggataagagaggagatattatatcgtatcccatcccaagtttggttgatggtgagataggataagttatcccatcacttatcctatcctatgttcaactaaacatgggataggataagtggtgcgatatattatccatgctcttttttttattccttctacatgggatatggtaattccatgccaagatatgggatatgtatatcccatgtatcataagtttatttatttttatcaattttttttaaaattgttttatatactcattttgcaaaataattttttctattataaattaaatttatagttaaaaaagaaaaactaaaaaaaaaatttataaactaatattaatatatatttttatatattgaataacataatataaattttatttatttataaagtttaaatattttaatcattaatattattaaatataagagaaatttcaattttttaaatagaaaatattggaatgtgatataatttttatttaaacattgaaaataatatatatttcatattatttttttattcatttcatttcacaaattaaatataaatataatataacataacatattccattggatacgctaccttaaaatatcatgttcataggatatgtatgttcaaggatattatatcccattggaaatcatatcttcagatatatattttctatctaatggaatatgatatcctaggatatacatgcctatcaaaaaaaaaaaaaaaaaatcctaggatatacatatcctacatatcctttcctgctaaccaaacatagcctaaaggggtaagaaaatctccaacaaaggaaaccaagtgctttgctcattgtttggctaatatgacttgattaattgaatgaggaacccaagagaaggagcaacgtagctcactaggatcatctatgattttgtacatctagttgtcaaacatccataagcctctctccttgttagatgtcgaagatattatagtagcaaaatctccctctacaattagattgaatgggcacaaagctttggcatgcagaaaggatacctaaacaatcataactttcttctttggcctgcttgagttgcaaacactcttccaatctagcatttaaatatacaaagggatttccgcaaaaaggtttagtgattgaggcccaaagggaggagaaaatgttaatctaatcccaaatggcatatgctaatctctatctatcctcaaatataataacattcctctccaaccatataaaccaaatcgaggataatacaaccacttgctagggaggttcccttttggaaggctaccaaagaccttaaaggagattcccaacatctgtctctaggtggtgttcatatgagattgactaagctaaacattccattccaaagttctagtgtctttaaacaaataacacattgatttgggttgagaactttgtaggatctccttaatttaggcatgttgtgattattaaccttcttattagccataagccaagtaaaaagtcttcaccttgggtggagcttttgagttctagattaacttagctggagtaaatgaggtcaagataggagagtgtttgtgtcaatacttgttcttatgcttcattatcacttcacttgtgcctttgcgtttcaacatttaggtattgttgcttactccaagtaaatccaagtaccttggatgcttatggaatgtggttatttgttatagcaattactaagagggtttctcttacttcattctaggtagaggtgtctatgcacttgaaatgaattatcacttagatcttgtcatgaaaagggttatcttcttttaaagtatctatgacttcatgagctcctataccatctcaaaggtgtcacgtttgacacaacacgttgatgctaatatacctactcaagttaggagcaatgtttagggggtttgatacaaacttggtctcatggtagtgatgaaactggctttcctatcaccgattattttggtaattggtttgatggtcctggttggtagttagagttataggctcattgacttgtgttatgtctgttttatgcaaaatgatagggatgtgagaccatcatgcctttaggacctgtggcatcatagctactcaagtcaggagcgaggtttaggggctctaatacaaacttagctcatgttagtgatgaaactggctttcctatcatcgagtatttagtaattggtttgagagtcttggtttagtagttaagagttataggctcattgccatccattaagctttttttagacaaaatgagaaggatgagaggccataatgcctttagaacatttgacattggtagaagtttccatttcattatagaaaaattaacaatatggaagttaaccgttcaaaacattataaacagaaaatctcagaaggaactatagaaaaatcttgtattttttaactctcccagattctccaagctttccttgaacttgagaatgtctcctcataccaaaccaatgctattctctccaacttcccctctcatactcctctctacttctctctttaacttaaattcctaaacttacaatgtggctggcctcctttaattaagagcctcacttaatcaatgtgtccatgttatgttgtgtctgtatccaatcatgtgctacacagataagaattggtttgaggggtgagtagggaaggacttaagataaggttgagggagcagttcctgtaggaaatcagtcattgatctcaaggaaatcaactaccgatctcaaggaaatcagtcactaatcttaaggaaatcaacaagctgggcaagaaggatattttagtaccaacttgagggggagtgttggaaattagtcactaatctcaagaaaattagccattgatctcaaggaaattagtcactgatctcaatgaaattagtcattgatcttaaggaaatcaaccactgatatcaaagaaatcaaccattaatctcacccttgattgatggaaatcatctaccgatttcacccttgattccagaggttaatcagctatctttgactagtcttaagaccattttaggaagttcttttatttagtcaactttgtaattaggctgacaaatatttgtagcattgatttaggaagtttatgtttttcttttcttatattatttcttctatataaatatatatactctactgtgaatgatgtaacaattttcaatcggattctaaaccaataattccatcaaatgttgggattacatctgcaactccaccctcacttagagaagtttaaattaattactcaaaatttcaggatggaagtgattgcgagaatccaagaggggcaaaagagaggttcttgttcaagtagataatttgattaatttcattagaatttaatttcaaatatttaaaatggttgttggtaagtttgtttgagaatgtatgtatattttattgatctccttgcccatcaaatctatataattctccttctctatgtgttttttgggggaatgattatgttctgtcttccacactacggtttctgcaaatttgtcatcaagactctttggaataaactttggtcttacaattacatctgatctttttccatagctttgattcttttgcatatttttcctttatgatggaacttaaaccattggagaagttaaaatcagaaatcggttagttttgattgatacttttttttttattattctattgttctatccttatgatttgaatccgaagtttgagtttccaactgaacactcgtgcttttgttatttggctattgtgttgtacttatttatttgaattttattaagcaggatcttcagttga

SEQ ID NO: 11070 - DNA, 916 bp, Vitis vinifera
  Intron number 4 from transcript GSVIVT01017816001 (locus G SVIVG01017816001) derived from phytozome v7.0 (chr-ID chr5 ; pos 3689023 to 3689938 reverse strand)
ggtatgtttctacccttgacctaatcaattattgtcttatgcttctctcatacacctactaaattttctctgtgttaaatgtgtggcctgtgtcatatgttcgatctttttaaccaacaagcacagatcaatttaaaggaatattctacagaatagaagttagagatactatgctttatcaacaagaagattatgctgccattttagatgtatgcacccaacttctttggttttgattttggtaagaactcctatattagctatgaggccaacttaagtcgcctaaaagttcgattttatggtacaaaagataggctgttacagaacaacgcgttaaaagaacaagtttagtagattaaggatattaagatggatgggtggcaatacatgaaaagaaagcataatgaatggagtcatttggtagatgttggagacgtcaattcttgaggcaaagacaaggttacaatagtctagttatgtgcaaggacgactgatgaatacatcaacaaggagtgatctgattaaagttgaacatgtcactagaacaagtagaaggataaaaggaacgttggttgggaagtcaagggaaaaacatgattgcaaatgactcaatgaggactatggccttgaatagggttgaatggcaaaaaagaatgtgcaacctaccataagtatattaaaatttgcttgtgaagtttaatttagaaacttaagtagtaaaatatatattaaaaaacctttacaagcagaaagattgcaattcgtcattgtgcatttgttccttcctatgttgtcaaatgcagtttatgcatttgacatggttattattaccagcaatattacctgtatttcatttatgccagcatcaaccttccataatagaattttcacacttcaccttttggctacagttacc

SEQ ID NO: 11071 - DNA, 11769 bp, Vitis vinifera
  Intron number 1 from transcript GSVIVT01037622001 (locus G SVIVG01037622001) derived from phytozome v7.0 (chr-ID chr1 9; pos 6309594 to 6321362 reverse strand)
ctgaggaaggggaccctctatcaccttatttatttgtgatcgggatggaggccttaagctgtctcataaatagagcagcaaagggagggagggagggaattcttaataggttgtagaataaggggaagaggtggagatggggttcaaattactcacctgctattcgctaatgatacgctggttttctgtgacgcctcccaggagcatatgatttttttaagttggttgttaatgtggtttgaagccattttaaggctgagaatcaatttggataagagtgaaattttgccgatggggagtgtggagaatgtagagttgttggccctagaacttggctgcaaagtgggagcacttccttccacttacttggggctcctcttgggtgcaccgcacaaagctatgcccatttagctcatgtctttgatgcatatgccaagagttgctagattgagactagagcaaatccaaaggaactttctttgggatggggaagctttggagaagaagcttcatcttgtaaagtgagcaattatttgttcaaataaaaagaagagtggtttgggtgttaaaagtctttctattctcaatagggcccttttgttcaagtggagttggcgctttgcggttgaaagggagtctttgtggaggcttgtcattagtaggaagtttggggtgcaagaaggtggttggtgtacccgtgaagtaagggagggctatgaggtggggttatggaaggaaagctccctaatgtttaaaaatattgtattttctatgggggacggtagaagagtgagattttgaaaggacaaatggtgccggaacaataccctttgtgattattttccttctttgtacgttttagcggattcaaaagatgtgtgggtagcggactattaggattctttgggggaagagagggaatagaatccccggttctctagatctttcaatgattgggaggtggaggtggtagagaggttccttttgactttacaaggaaagaggctagtcattgacttggaggataggggaatttttctgttaaatccctttatagtactcttgaaccaagaagtgcagtcctgtttccgtgaaacatcatttgaagcccttgtgttcccactatggtgggtttctttgcttgggaagcatcgtgggggaaggttctgaccttggatcaactcaaaaggaggggggtggcccataactaacatatgtttcatttgttatgctgaagagaagtcaattaatcatattcttatccattgttccaaggctagggttttgtgggagcttgtttttgcactgtttggtgtgatgtgggtccttctgctttcgactagagatacattcttaggttggcatggatcctttgtgagcaagaaacatagaaaggcttggatgacagttcctctttgtttattttggtcggtttggaaggaaagaaacatgatagcttttgaaaatgaggatctctcgattcacaggatgaaatattcatttgtatgtaatctttggttttgatctaagtcttgtatagatgtaggacctttacctttaatcaacttttttgattggttggattctaaatgagggctggtgagttttttgtattccctcttctttttgttcttgcctttaggcgcctcttgtatactccttgtatgctttgggttgccctttaggcgcctttttttatgtgattatctatcaaaaaaagaaaaaaaaaaggttgcctataacaagtgggatttggaaaatgtgttttatcggcacaaagcttagaactcaactcaaatgggatatcaacaactttattgtttgccaatacaatagacaaatgagatcttatgcatattgatatgagacaaaatatgctccctgggagatgtgtctaccttaatgccaagaaagtaatgtagggatacaaatacaatatcttgaatcctatctgtatcatttcctataaccaccatattgtcaacataaagaagtaacaacacaatgccttgactagagtttcaaaaaaacatacacagctgaatcatatagactttgcataaatccaaatccaggaactgctaaactaaacttctcaaagcatgaggtgcctacttaaggccatacaaggcacaaacatagtctacatacttgactcaacggatgttgtagcctaagagaagattacatgtgggccttctttgagatcaccatttaaaaaggaattcttaaaatccatttgggtgtgtataagaagagattttgactaaaatggtgagtcatattggatgtaattgggacttgggacttaagagttttaggattgtaattactcttttgtgtatagtgaattaatttctttcctccctgcgaatgtagacatattgcagaaccacattaaatcttgtgttcttctatgtctactttcttgctcattttcattttcattatttttgttcacttgcttctggatataaggaagaaagtaaacaatggaaagaaatgtgcttttctaattcacgttgaccccataatatcaaggtatgatgttgtgatgatcaaatgaattgattcctgacatattaacaagatgatgaatgcctcaatatccaaatagattttgaataattgcttacatcttaagacctctattgattctatttaatcggttaaaatttgatcatgtgcttttagaggtcgggatgaatgtcaataataagaaatttggataatttcatttaaatgataaagattttggcaagatatgatgataaagtaactaatctcgttttagaaaatgccaaaaaaaaatgacaagtatgcctccttaaagatttaaaaaggaatattgaacactgctacaaacgaagtgagaaacatgattaatgaaaatattatgtatgctaattaaattttgtattcttgttgataaagcacacaaaagatataaagagagcactttaaggaatgtggataaggaatgacttcatacaagaacttttcttttttcttttttattttatatgttgaagacacagtgacagtaactccaaaaagagagttatcttttgttttgtcttgttatagttttaacattctgacccgtatttttaggtgcttccatgtgatggcaaaccttttatttgaaaatgcttattttgaaatctatttttattgctgtttggagttgccacttgttttattttctttaaaagggaaaaaaaattaaaaaaaaaactctaaagtgactgtcaaaatagaaagataaaatcaacaaattagggatgagttcagaggttaagttatccaatgggaaggtgttaagcaccccactaaactcaaaataggaaacttcgacatttcattaattaatcgatagacataatgccaacaaaaagaaatacaatgcatcaatgaaaccccaacgacatggcatggtggattgcaaattaataaaaagagaatgagaggaacatgtgtatgagagaattgtatgaataagacccaagatccatttttgaagacaatcatttattgaccaagagatttcttaatgcaaataatcccaagatgaaatcaagaatgaattctagcaactttaaaccaatgaaaaaacatgcaagtagcaaatccaaggaagcacagaacaacttgaaaacaatagcacaggttgtggtatcggtattccaatataatattggatactacacaaagaaaagaaaggagttttgataccagacacaaagcaattttgatatctattttgatacaaaatttgaaaccgaaagagtctgataccaaaattgatgacaaacacaaaagaaagggaattctcatactaggcacaaagcaattttgaaatcagtcctgataccaaattcgataccaaacaagttcgatactattgatactaaaaccaataccaaacacaaaaaaaaaaaaaaaaaaaaaagcaattctgatacctggcacaaagctgttctgatactattcctaatgccaaatctgataccaaagccgatacactcaagaaaaagaaaggacttctaatatctcaatcacaaagtaataaccaaaactagcttctaataccgaatctgataccagacaagtctgataccaaatacgatatcacaaacatttttcatttctcacaatatccgagaccataatcgatacaaactatgtggtattgaaattccgatatcacatgcattttgccattttttgcattcaatctgttttccccctttttccacttgcaagctcacaaatagctgatacaccattagatctaagttcataaactaaatatctcacaaaagaaagtcttcaactcatggtccttacacaaatctcattcatacaatccatccacacaaagcatacatatattgcaaatacataagcataatgatattgcaatttacaaggccattgtttacaaaggatcaaaattaagagagaaagaatcgagaaaacatacggaaggatgcctctaatggttgtattgttgctagtagagaattggctttcttgaatacactttctgcatctcacaactgaaaccctgctcttcaaagtccgactggagaaattgctccactctcccattgatttctaaaagaaaaaaaaaagaaaaaattcttccaagtatgattctccttcatgccttttttgggccaaagaccttacacagatactgccacttgtttcccagaattttcatgtgtgaactcgctccttcctcttgcttttatccaagcaactcaaagagggatcctccgatctgtgccacattcttctcctgtcccgaggaacaacgtagaacattctctacatgggatgataaacatggatgttcatgtggtaaaacctttatagtgtcgaatttggggatttcgacaaaaatggaagcttttttttaaaccgatttccaacattttttatgatgctagaatatatgttctaatagagcttaaatagacatgaatttataaatattttcttttcactattcattaatttatgaaattaatctacttgggtaacgatttctcattttgttgttcttttctcgatgtaaggataaaatgtaaaaatcaaattgatgaaaggaggtacattttgtatttaaataaactctagtaattggacatggatcatgtatgttgatgctggatcaaccaggaatgatacttctccttgtttcaatagtaaaaggttggttccgatgactgagactggctcttaccgctttttctgcaaaaagatgtctaaacaggttgtccgaacataccattcgaaatctaagtcaattcctagagaaagtaagaagagctacttttttaaacacgatcaagagagtcttcccctattgccctttccctctcattttggttgcatgagggtttttatagtgtctagagctaggtcatatctatgctgagctgacatcttgactttcacagtcatgatggcaaggtaatcatgaccatttaggtggctgacagaggctgtcaatgggaatgtcatgatggtctgcttgttgctttgacctgcagaaggtatggtgtagtgtgtggtagtacgcctatgaaggtagggtgacgcctccttacttctgctcctgacaacgaggaatgattatttgctggagtgggtcagaatctctatccagaatgcattgtgcaatttaaagaaacgcaatgttgttggctattggtatgtatataggccggataaggttctccgggtctaattatgatcgttcgggtagagataggaggaggccatgtgggccaggagtgaagtaccaagtgggaaagccccacaatgtctatttgtatcaaacttattgtcgaattaagtcaacaacttttatagagtaagggaatattaattctatttttttttctaaatgaagctttttaaaatgacatgtattatcacattggctcatgtaaaataattaaattctattagttattcacttattatgtaaaacattgtgacatatttgtgttttttcattcaatatttacatgttgtcaatatgagacttaatgaattcatccctattgaaaatgaaaattttttttatagtcacaacacttttataaatttccatattaattcaggaataacatgaaataatatacgttctaataggttaaaggtcataaatatttaaataagggagatccatccacatatgtcaattaaactatcctaaccacaagtgacaatgaataagaaattttaaaacatttcactctttaatattctccagtatctcatattaattataatatattattaaagaaaagaaatttatgtaagaattgagaagccgaggattcttaatataaaggtgtatctccactttcaccatagcatttatataaaggtgtatcatgaagacttcacctttacccaatcattttataaacatggagatgttcatgttaattttatttttttatttttttcattttggaattttgtaataattcttcaacgaataattttttattttttatttttgaaagaaacatgcttagaaaaagttaacataaagaattattaatgaaaaaacaaatgaaaggtctaacgtgaataaaaaaacaatctattttaaatttggtgacatttgacttatttggccatttagttatataattgtagatttggattttggtctatgttttttttatttggagagtcttggacggaggtagattttgatggttaatcttatacgttttgaattttgttatagaaaattgagatttaaattttaaggtatgtgaattattgcgagacattcataacttggtatttttataaatttaggatttgcttaccttgaatttgtttatgattttggtagaaattaggaatctggactagagggtcttaggtggtgtgtgttttttttttttatacttaattttaaatagaacttaaaattaaatagtgttaagtattaaactattttttttttgtaatattttatttaaatattaaaatataaagaaaaattaatatgttacttttttttatttaaaaaaattaaatattttggttttttttccattcaataaaaaattaataataagtcataaaaaaaataaaaataaaaatctaaagtttgaaagaaaattattttacggccctcttagtcttagtttatataattatttgcgtttttattagtatttagaggtagattttgaattcccttgtgtggaaattgggacgtattggtaaatttgaacagaattttatgcgtatttcatttcattaaaattaatacttttatattttgcaaaaagaaaattattggaagtagatgaaaatcacacatagattaaaaaaataaacaaataaagttaaaattgtttaaaaattttaaactttaatagtaaaataactcatccttaaataatttattttaaagcataaataaaaattaattaaaacatataaaattctaacccctaaattacatcatgaggaagcaatacaaagaataaaagtggttatcctttatacttcaaagtgccttaagtcttatcttcttccatggtagattggatgatttggtagacatgcaatctattatggattctcaataagtcattgcatcgtcaacatctttataattacatggtctcacaattttaacgtttattatcgttggtaataaattgtcattatcggagatattcacgattaacattacaaaagagaagattttttccaccattcttgatcctttataaacaccactttatgtaaagtgatcatattgtcataaatcgatttcaaatgttgacatttatatttgactaaaaaacatagaagaaatcttaaaagaattatgataagatattttaagctaatactaataaccaaacattatgctaaaagcaaaatatgcataagaaatggttagagtttggaccagtggaagccggttggaaatgagctctagggtaggacgagctagatgggattggtgagtggtaaagggaaaagtgttttcaagaaatttgacatgacgagaaatataagttttagaggtggacaaattaagatagatataggcactttgtgttgaagagtaaccaagaaaaacataaggagtgaaacaagagtcaagtttatgttgagaataaggatgaagccacagataacataagcaaccgaacacccgaagtttagtgtagttgggtggaaattcaaagagtttgttaaaaggagatgagagatgtagtgtgggtgtgggcatacggttgatgagatatacaatagtggcaaaggcgtaagtccaaaaagttagaggcatcgatgcatgagtgagaagagatagaccagtttcaacaatatggcgatgacatcgttcagaaataccattgtgttcaggtgtatgtggtggtgtagtaagatgggatataccattggtggagagaaaattatcaacggcttgatatttgccaccattatctgaatagagggtaacaattcggtgtttaaattggttttcgactaatgccttgaagagcacaaagacatcatacacatgagatttccgtttaaggggataataccaaatataccgtgtataatgatcaacaaaaataacatagtactgaaaaccatcaacaaaagaaacaggagaggtccatacatcataaaagagaagttcaagtgaatgggatgaggttaaggtagaagaagaaaatggaattttatgacttttattatatgaacagacattacaatgtgtagaagaggataacagactagacaatggtaaagaaaacttagagatgatattttttattatagtaaatgatggatgacctagtctagagtgtcactcggacgaagtggtcttgacactggaaaatgcaagcaacggtgaaaaggtaacagaagggaatgtagtcggccactcatatacgccatccttaggttcacccatcaaaaggattgcccccgtgtttagatccttcacctgaaaagcagagagtgagaattcaacagaaacatggttattagtgcaaaattgataaattgaaattaagttcttttgcatggaagggacacaaaggacgttttgtaaagtaaaggtgcgagaggaagttggtatggtggtagaatcggtatgtgtgataggaagggttgatccatcgccgatcatgatatcatcagatccttgatacgagttatgaagagagagattgctcaagtcaaacgtaacatggtgaaatgctccactatctagcagccaagtaggagtagtattgttgctgagaacaacatgattggctcatggttgccagggtgtggaggggcgatatccctgagtgccttgaggacgaggtgttggggattgttgattagtaacaagtcgaaacatcggacattgcttggtagtgtgtccttgaataccgcatgcttgacaatgacccaaatagggtttgggttggcgttaatcatgaggagaaaacgcagtggtagggcctggttgttgtggaatggtggctggtggacgccaatttggacgattctggaaggcagtaggatttgccgttgatggtagtgataaaggagatggttgaggggtctaaagatatgcttcttcgttgagaagtttctcatggagctcatcaaaagaaattaacgtgtcacgggcattaattgcatcaatgacggatttgtactcatcacttagtccttcaagaacctgatcaataagatcctcatcatcaattggcttccccaaaatggcaagttcatcggcacgagtttttatcgcctgcatatattcactaattgattttgagccctttgtacaccgctttaattgttccttcaattgtttaatatgactacgagatgatttggcataggtattggctaaggtttaccatgcatcaaaggaagtggtggtgcaggcaataagcggttgtagtgaaacaaagataacaccaaggagagcgctaaagatgagatgatcctgacgcttccaggttgtgtatgccggatttggggatgaaacaccagtgacggtgatggtgggtggtggtggagtatgagcgccatcaatgaagtgatgaagatcataaccttcaagaagagattggatttgaaggctccatgtgagataattggtgaatgacaatttgatgatattggaaagattaattataaggaggggatgttgaggatcttgggagttttggatggtaataggattgttggtggaagagaaggatgcaccggaagccattgagaagaaagaaaaaaaaagaagaaaatatgcctaagaagattaggtcttgataccatgttgaagtagagagagaattattaagaaacaatgacttgatttttccattgattaagaatgaatatatatacacaaaacctaaaacacaaaaataggaaacaatctacccaaaacataaaaataggaaacaatcctagaattagggaattacaatagaaaataggaagttacaactaattacaagaatttgaaaatagaaaaaaaaaatctattgtaatgaattctctaatactagagactggattctagtaaattgtgttttctattatgaaaatcagacttgcattttggaggtagtaggtgttaatgtggaaccctagtactgcatgatatatagagatcagctggaaggtggactagatgtatgatagggtacatgagaaaccgtggtgagtggtgtagcagcaggttcagtaggagtgggtttagagtctcctgaagtagagctagagtggcttgtggttcagcttgagtggatggctactgcttttaggaggtggaagtggaagcattaggcttgtctttcttctcaagagattaatttgtagctcgagttacactctacttcaccaaccaaagatgatcattggggttgaaatttgcttcatctgctctcaggggaattttcatatggagaaggtaggctataacgaatcaaggtaatggaagttttaccctctgtctcggcattgtcttttgcacataaacccatgatggaactagatgaaattttttttatcaaaattggggatgctctaaaactccccttagttaaagggacaaggggcatctgttaaatggtacataatgtgatccatactccccttttccaaccacaagcccctcagaatttcaatcagctcagatcctattttgggtgcgttgtgtggttgctaacaactcataattgatgagcgccattacctaacccacctcttttctcttaccatgctcccctgccaaaagtaaaattaatgcatgtcaaacttagaagcaatttttcggagttgaagcaaatatatgttctgagggtgtcactaaaacaacagagtacaatttcacatatgcagaccatccgaagtaactccaaaagaaggggaaaatgagtgtgcccttttatgcatacttttatggaatcaaatcttatttgttcctttatgtttgacatatcaattagagcaaagtcacaaaccaacagcaaattaggccagtaaaggagagttcattagcggtatattccatcttcttttcattaattctttatgaatccaagaacctcatatgaaaaattaatatttcaacacgtggatttcagatttttgtatatatttagccactttcaaatggaatattatgtcttaaggttcaaagatacccacccaaaaaccaacaaaagaggttgaaat

SEQ ID NO: 11072 - DNA, 4658 bp, Vitis vinifera
  Intron number 3 from transcript GSVIVT01020737001 (locus G SVIVG01020737001) derived from phytozome v7.0 (chr-ID chr1 2; pos 2463588 to 2468245 reverse strand)
gcgagatcagaagcaactgcagggtggtgaattgatgagatgtccagcttatatatcagctgaaattttaaggcattattgaagtgtttatatatgaactataaagttaattgaataagaggcctccatatgatctaaagaggtcttgccatcattgttcttcctttttgtctctctccaatgtttctaaattctgtttcaatctccaaaaatgtgttctagctctcaaatgtcacaacaccaagatcagacccgcaatcccaaaatccaaggtttgatcataaggattatatatactgaatcctggctagcaatcaattagtcaatccgatagataattaatatttcataattaggattttccaaaaacaaattgatgatctaagcaagtctgagaaagcaaaccagaaattacaatatagacccccatcggggatccacaatttaatacatctctttaatatgataaaaagaaaatttctttttcaagctggagcttaaccacttaaaaatatatgagcaattctctttatgcttgtctgcgatatgtgtacttagtggaagagcacaaaattttaagtacactaaaaataagaattaaataattaattttaagttaattaataacttaagtataatttaatttaaaatcaatttaagtcattaaataataaatattaagttttactaaacaccactttaaagaaagacatgtgagttttcattattttttattaaatttatattgatattgtaataaaaaaaaaatcaaaaagcatgaaagaaatatgatatttgtacgattgaatttgtacgaagaatgtttaattttaaaaaaaaaaaaattgatgtgtaccattgatgaaatttattttgtaaaattgatctactgtgaatcatgattttattttatgtgtggttagttttcatgaattgatattaattaaaatgaaaggatttctattaccaattagttgtaaagctaataaatattaaattaaattgatattaataatgatcttttttttttttaccaattaattttaaagtaataaatattaaatcagatttgttgataatgatacaaaattaattcaccgattaattttaaattcatcatgttaataatgataaagacttgttctaccaactgaccaaaaattaactttgaaacattaatattatacatgtgttaagtagatagttgatatagatcctttgatcaaggatatttgcttttcaattatctcttatgatatcctctataatagaacaattaattctccatattctaaactccccactgattcaaatgaagaaaagtaagactttttgttggtttgtttttttagagtcgagaagacttactatctacttcaaatacttttacatcaaatttcacaaaaatgttggtcacaatataacttttatttttctatagttgttataatttgtcaatcgttttatatttttacttactcaattgtcattatttatgaaaacccataaaaaaacgaataaatattaacacttacatagacaaaagttatctgaaaaatactttgtcataaacaaaaattatgcatactcaaaaactatgtcattgttattatttacaattagaagttatgaaaataaaaaataataatattttttgcattagccaaagggtttaatgtatattttattataaccagaagccatagaaaacaaaattgttaattaacaattttttataattttgtaaatttcatataactagaaggatgtgaaaatgccatcattttttatattttgttatgatcaaattatttatagacagaagtcttgaaaaattattctttcattcttatgataatataaaatatgatttctcatagaagctatgtaaaatatatatatatatatatatatatatatatatatatatatatatatatatttcataatcaaaagataagtagagaaactattttattatatttatatatctttttaatattcttataactagaaggatataataattattttggtagcctaaaactatatgaaaaataattgatatattgttatagtttgaaactctaccaaaaaatattttgcatatccttacaacctcaaaatcatgtaaaatactttcatagcctaatattatgtgagcaaatatatatatatctcttataactaaaaattatagagaaattattattttatatgttataatagcttaaagctatatgcaaactatttaatatttttctcataactagaaggatataataattattttggtagcctaaaactatatgaaaaataattgatatattgttatatatagtttgaaactctaccaaaaaatattttgcatatccttacaacctcaaaatcatgtaaaatactttcatagcctaatcttatgtgagcaaatatatatatatatatatatatatatatctcttataactaaaaattatagagaaattattattttatatgttataatagcttaaagctatatgcaaactatttaatatttttcttataactagaagctatataaaaaagttaattttatagtctctcttggccaaaagtcatctagaaaatgtttcacatagaaaatttatggtctaaagtcatatacatggaaagaaaaatattcataactacaagttaatcaaacaagaaaataaacacaatagccaataattatgctaaggttattatttatcataaccaaaaactatacaattattggattatttccattgtttaattatttttgttaatattatgaaatttgtgaacaatcttttattcttagtttatttttatacacaattctaaactatgtagaaccatataaagatgataaatttttgaagttattatcttatatattattgcaaaacatacataaagctatgtaaattttttacctttataacctactattacgacaaaattgtgttattttttctttcttttttttaattgaattattatacttgttaatttgctacgaagatgaacatcaaatgaccatgggcaagtccaccatcaaatgggtatcgagtaaaagcttgtctcagataatctcggctctccaacaatggaaactgagcgaactggagtatacccaaacaataaacggcccttgcaatcagaatccgtaccttcgtaagctcattaataagaatgacagctctgtggtcattagtttctctacaccagccaaacaggattgatctctcattgccaccaaaatactttccttctccaagccttggctacttgaagacaaaccatcaattgaatcaaccttggcgccacttgcttccaagcataactttcctccagcatcagcaacaattagctttccagggcggctcagttcaacttcaagttcagctattgtttcgttgaaaagggcttggatgcttgggatttggatttgtttgatgaagaaggatttcgacggaaggctttggaagggctttggaaggccgcgcatgcatggatcacatgcacgtggggaggtctttcttggtgaaagttatttgtgtccagaaggagtcaatgttgaattgtcaccagctttgtcatctgggatcagattttgactgtacttcacatttaacagtctataaccaggctggaaaacatatgttaccatctcccacaatatctcctttgttcaggaattccaccaatcatctcggaatcgcaaattctgtgcaccaccgaaactcaagtttttttatcaaagtgcatgattttagcacagaagggaacacattatgactcgggtactttccaaaaactagcgcttgaatgaagataggtaaggaatggaggaagtggccatgggaaatggcattggtgaagattctgaacttgaagctcctggtgtgtgccttttagttatttgaaaccaatcatcttggcagttaggttccgcaaaggagctcatccaaagtctgaaacttttagatttccattctcaaaggtattatgccctctgtcaatatccccagcagtgcaggagcacatacttcaaaacccgcaatcttgagcacatactatgtaactacactggtcttccatccttctagtgttgtcgctttatgcagatatccataacaggattagcctcaatactcgccaagagcaaacctcccaataatgacatctcaaactttctccaaggaaccgggaacagtggaatatagggaaagagcaaaagacaaggaaaaggagcggggcataaaacattcaccgattatgcataacccatttcattagggtttaataatcagtaggttaattcatggacatggtctcaaaagaaaagcacaaaatccaacaagctcctcaaataagaaacagcgaaccgaagcacatacaaatatctcttgaatggaaccagggaaaagaaagattaaggcaacaataaccttccataaaaacccaacaagcaatgcaaaaatcataggaaaagaggtgggagaagcatgaaaggtgaaataagcgggaaacacataacagccatacctcaaagtctcctctacagaaaggtgtgctgggcttcgggcttgctgctcctactcccaaaactagcaaaaaaaaaaacccgtgaaccatctcttctgttc

SEQ ID NO: 11073 - DNA, 26658 bp, Vitis vinifera
  Intron number 8 from transcript GSVIVT01013143001 (locus G SVIVG01013143001) derived from phytozome v7.0 (chr-ID chr2 ; pos 7653527 to 7680184 reverse strand)
ttaatttcacaccaagcacggaatattgcttcaatgtgagtcactttgtgtgtactgcactcaacatgttggtagatctaacaatataaataaaagaaatataatgcttggctaatttgtaaggaaatagttatttgtttaatgtacccctttaaaacatatgcttttatgaagtgaagtaagacttcttttcccaccacaatttttttctgccctcggtttgtaaagtttgaattttttttagtgcttgattgtatctatgcatgcatgtatgttattttgtattcttaatatgtgtatttgttgtggctcctttagcgctctctttacaaatttctaatcatctattaaaacaaataaggttcttcatttccctgtttttagttgtggttgcaccgactttctctagtaggtttttgttctatactccccaaggacattttagttttccagttttttccttcaaggagatttgagaagatggaggaaagtaaattgtcaattcaatctacttttcttgctttaatatgaatgatatggatgacaaagaagcgtaggatctttaaggataagaatggctgtgtagataatatgtgggatgagcatttctttctatcctatatttggtttttctactataaaagaatctctttgtattcttttgagcatcatttgtttgcattggaaggcatcttatatggataaaaatgaaaagatgatgtcaattgtttgtaggttaatgccataggtggctttaagctataaccttgatggttgtgctttgggcatcttggtttaaggattaaaatttcgcaatatttcacaaaaatgtcatcactattttgcttattagtgattatggtaatgatatatatttgatagaaattcgaccaaccgataattcgtgaatttatctctctctctctctctctctctctctatatatatatatatatatatatattttggtgaatttttcttaattttagtgattttcccaaactttgggatattttggtgattttctcgccttatgtagccacacatccaagcagccacactcacatgccacagcacgtagccacgtaactaaaaatcaaattgagaatgtaggggcccaaatccacatcctttagcttaggattgaaaaacacgttccattgggcaaaatctgtcattgttaatattctatgcatatgtatatatatatatatatatatatatttatattatatgtagtttatttaggattgaaaagcacgttccattgggcaaaatctatcattgttaatattttatgcatatgtatatacatatgatatacatattaggagaaacaaggaaacgaaatgaaatatcttacaatggtagggataggaaagctttgaagaaagctttgggcttgaaggcttacatgatatgggagaaagaagagagaagggagagcttaagaagggaagaagagtgaaaaatgaattgtttttacaactgacgattaggcctccttaaatagctgaaaaatgaatcataaaaagtacaaagtggatgacaggtcactgtgtaacatatagtatccatccgtgaatgaatagtaaaattgactttttactgtagcaatcttgacttgttggcagacgaatcttgctttcgacggaggaaggctggagtactaggctggttaagaactgtagagtcatatgcttgttagacaaaattgctttgggtgctgactgcttaaagtttgtcggtggagaatatttttgtcagtggagagccctaagaagagttgtatgcttgaagagcttattttgatttcctaatgggaggaaggatactatcacagtcatcttcattatccggaaggtaatttgatgtagaatcatctgattcagcataagagtcttcttgggaaaagcttaagctgcttttgtcaagaattttctgaaattcttgaggggtttttgctgtttctagcatggcttggagctgttgtttcttaagaagaaactgtgacttatcatcagtggctgaagcttgtgtaggatgcttaagaaaatattgtttctcaggattgcttttgataatgaggaactttcgattcataggttgaaaaattcttttgcctttggttgtgcactaagttggttataaatgacagtcctcttcctttacttagttttttgattggctaggtgttagttgagggttggttttgtatttcctcttctttttgtgccctttggcgcctcttgtatactccctgtatgcttttgggtcagcctcaaggtgcccttttctaatatatgctttttgtgtggttgcctataaaaaaaaaaagaaaatattgtttcacggcttgtaatgaggcatcatttttcagagcatcccaccatttagtcttaaaggtccatctcaggactggaaaagctactgattcgtctttaataatggtatagtcccattggactatccaggcaataccaaattcattgaagaagaataataaatgaggaaatgctgaaagttctctggggataacaaaagagctattgaatagctcaaatccatccaagatgggttttggaagaatcttaatagtcggaccaaaataagtccactaattgtggaaccaaaatgggaaagaaggaatctgatgtttagatgggaaatagaacatccatggatgatggaagtctttattctggattagaaaagcattgaaccatgctctctaatagtcctaatagttaaaaaatcttggttttgaaggcttagagaattctcttgaaaaaatgggatttccaccccactgcttaactgtaagaattttataaatatggtaagtagaaaatgctaaatccaagttgctgtatttattagcgttgtgcttgattttaacatagccggtttccacaaggattgcttcataaaattctcttgtttttaaaagatcaccagagggataatgaaaattttcatgaaaagcttttgttgcaatctctttagggtttttcagagaaaaattctctttcaataactaaaagaggttgattaaaatctctttgccaatagcttgattttgctgaaagaggtgtggggttggcaaccaccacaatttgcttatttgaaaaagatgagcttgatgctaattccttttgggaggtattagctttagtaacatgcttaaaggtctgagatcctgaaataattggatactgagtagccttgattggttttgaaggatccgaaggatcatagtacaaggacaacatcttattaggcatatggttagaagaatgaagccttgcttcttcttctagctcaacttgttggctccagagcattttatggggggaaggagcttgattggttttaggagattgagattttggtggtttaggagcttgagtattctttttaggggtcatgatttcgtgaatcctgcaaaattcatgagttaagcaattagggattgagttattctctcctctaatatacttaatttgaaaatcaaaactgcttaaaatatcttgccatatagcaaaagtatgcttagaagctatactcttaacattcttatttaaaactgattttgtagatttgcaatcaactcttaataaaaattcttagtttgaaagattattttaaaatgcataaaacaatgcctaaaatctcttttttaatgttgttatgaataagttgggtagtattccaggttcctaaagtatacccagccaacaactcaaggttaccataactttgcttaagaatcccttcataacctatgtttgaggcaacagacttaaaaaacttaaaggctaaacaagatagggccttgacaatgaacttgactattttgacaaaaaagttcatcacaacatcaattgtgaagacaatgaaatctgaaaactgattaaagattttatccttaaaatcaaagggcaatattaacctttgaaggaggtctttcttattaggaatatgatacctaatccaccttaatgcatcattaagaggcttgtagttgatgactaggctaggtgttcctctttctaactcaacttgtttctgaacatagaaggctgaacaactccaaggggccttagacttccttaccaacttcttgttaagaagatcctggatctccttctcacaatagcttaactattctttgttcatctggatgggtctggctttagtgggaatattcttctcactaaagtctggttcataaggtaattctacctcgtgctgtttcctatgccaaaatgcattaggaatgttagagcaaacttctccaacaattttttccttaaatttttctatcgtaccttgggttttcttaactttcaattgttcttctattctaacaagattaatctcttgctttaagagattaacgtggctttccttagctttaatcacctgatcccttaaggtgtttatacttttcttatcaggtgggttggcaaattaaaaaagaatttccttgtctaagagcttagttcttataccttggtcatctactcacataggataaatagagcttaaaaaggggactccaaggagagctttctccttaagatccttaactatggtatcagagccacaggaagggaagtcgggttttcattgcaaatttttgatctatcctaggaaaggtagcaatttgcctgagtgcgatccctgcccggttgagcccgttgttagccgaagataggcgtttgttagggctgtaaaagggttggggtgattactcattaggtttgttaatctgctattaggctctagattaaaaccttaaaatgagttatattttccgaaccatgtctaggaaatctacagattcttaagatgctgtagtaaacagtgaagagatcaattatcctaagatccaaaatgatttagatgattggaagttacccaaggtgtctaatcaagaaatttataagaaaggaacctttaaggtctttacaaactacaccattaggactctggaacagtcagtaagcttagaacaagacgatcaagtgataagactattggagagtaaatccatagagagacataagcgtgactacaacttcatacactttgatatgattcaagttacagctaagcctttgacaagaataggtctaaacacctctattgtcatgtgtttaagggataatagacatcttgattattgagattctattattggagcagtccaagtaggattaaatgatggtcatgtttatttccagtgttaccctaatttcacaattagattaagagttgccgacatcttagattcggttgtcctgcgtgttaagatccatggatttaagtttaaggaaggaaacagtcctatttccatcatcaccagatttgcctataagagtatgactacaagtgttggatctggagcactgtgcaccagtcctaagggtgagactactctcttccactcggatatgctaaacaagtcaaatttcataatccccaaaaagattatgtggaatgaggttgagtttcttgaaacttggcattttgctaatgctgttccaaccatagagcaaaaatttgaaagtattgaacagattgttcaatatcttgatggaggaggagatttgattttctccaactcttttcgtcattctagcaaccctagaatttcagattatgagccctctaaagcttcaagttcatctatcccagtaagaaccactaggatagaagaaggttctacttcaacaaatcctaagaatattaagctaactggtgttaaaagtcacgccaatttggctagacccttttacacggaggaggagtctactcaagaatctcatcaggatgaatctcctgatatgtctcctacttattcttagatgattaacactgtaagcttagatgaggaagactttgagatcaacaaggatctcttaaggaaagacttctattctgaagtcaataaggaaaggagagattggttctttagcaaggtcccttaggacattagaaccctctaccaagaagaattctacacattcttaagacaagaaaaaagaaacattaagtattggatctggtttgaactcttcaaacaagaggaatacccaaattaccctggtaagcgtgtcaataacacatcaacaaaaactaagatatggaaaactagtgacgagactgtcatagaatccatccaccctctaaaagctaagatagaaaagaacattaatggaaccatagtcaaagcttcaccttttaagactaagccagaggataaaggaactactagtgctgtagacgttagaagaatcatggaacaaaacaactacactaacatgtttctaaagactctaggtgatcaactcaacagggttgaggagatcattgaaacccaagatcacattaagacttcgtttgttaagaaagataataagcctttattcaagcctttggaattctctaagaaattctaggaaaatccccatattgatcaagcttttattgatagaataagccaagaggttaaggatagccttgttgtccttgggacacctcaaccttctcacaggagaatcaatatggttaagggagaaattagttctgaagcagaggctgatgaattaaataaaatctttaaggaacctcctaaccagacagttatgaggattatccacaaccaagaagcccctagaactaggaattattaccttagaccaacctttcctgatatgcagtatgaggaaagaaaccagtatactcaagcatcctacactagtggtactatctatgaatggaacagagatggtatgactgagtataatatacttattaagcttcaagaaatgaccatggttagtacaacctacaagttaaacaatagattgtcagaccatgttgtagctcaaacaattgttgctgggtttacaggtcagcttaagggttggtgggataactatctcacttttgaagatagaaatgacatcttaaaagcctataggattaatgaggaaaatgaagtggttaaggatgaaggacatgatatagaggatgtagtagctactctaatctattcaatttcaaaacacttcattggagatcttgcaaagattaaggataagactgcaaatctcttaaccaaccttaagtgtcccaagcttcatgactttaggtggtatagagaagttttcttaaccaaagtcatgctaagatcagactgtaatcagtctttttggaaagaaaaattcatctcaagactacctagacttttctctgagagaattaggattaagataagggaacagtttaatggacaaatcccttatgataagcttacttatggagaaatcataagcattgtcacagaagaaggaattaaactgtgcaatgactttaagcttaagcaacaaatgaaaaatgaacagaggatctacaagaatgaatctggctcattctatagccaatttggattcaaccaaaaagaaaccaaacccccctctaagcaatgtaagaaacaagtaagcagaaaacctagtaaagaaaagttctatcacagtaagagaggtactcatgtaaactatagaatgaatgaaaccaagcgatcaaggcatatccaaagaaggatgaacaaagaagcccataaaaagatatagaagccccttcacaatctaagccaattgtttgctttaagtgtggcaaagtaggccactataagaaagattgtagggttagaaataaaattaataacttgaatgtctcagaagacttaaaaatatgctttatgaagtaatgctaaacacctcagaatctaaatcaaggactgattctgataatgaagttgatattaatcaactagatagtagtggtgagatctcaagccaaacttctagtgaccaagaagaatgcattaagggtaattgtgattgccaacctaagactataaatgtcataagccaggatcaagaacttgtcctagatgttttaagaaaaattgaagatgaaaaaactaagcaagatctttatgaagtttttaagaaatctgtcggtaagcaaaaggttaagaagacagtaaatccttataacttgaatgaaatcttaacaagatttaaccagcagtctaccaaagacgtaaccattaaggatcttcaaggagaagttagacagtataagaaggaaattaaggatttaagaggcttatagttgatgactaggctaggtgttcctctttctaacttagcttgtttctgaacatagaaggctgaacaactccaaggggacttagacttccttatcaacttcttgttaagaagatcctggatctccttctcacaaataacttaacaattctttgttcatctgtctaacttcttcttgaagatccttaatggttgcaggattcatgaaatcatggctcttaaaaagaatacctaagctcctaaaccaccagaatctcaatctcctaaaaccaatcaagctccttccccccataaaatgctttggagccaacaagttgagctaggagaagaaacaaggtttcattcttctaaccatatgcctaataagatattgtccttgtactatgatccttcggatccttctaaactagtcaaggctactcagtatccaattattttacctcccaaaaggaattagcatcaaactcatctttttcaaataaacaaattgtggtggctgccaaccccacacctctttcagcaaaatcaagatattggcaaaaagattttaatcaacctcttttagttattgaaagagaatttttctctgaaaaccctagagagattgcagcaaaagcttttcatgaaaattttcattatccctttagtgatcttttaaaaacaagagaattttatgaagcaatccttgtggaaactggctatgttaaaatcaagtacaatgctgataaatacaacaacttggatttagcattttctacttaccatatttataaaattcttacagttaagcaatggggtggaaatcccattttttcaagagaattctctaagccttcaaaaccaagattttttaactattgggactatcagagagcattgttcaatacttttctaatccagaataaggacttccatcattcatagatgttctatttcccatctaaacatcaaattccttctttcttattttggttccacaattggtggatttattttggtctgactattaagattcttccaaaacccatcttggatggatttgagttattcaatagctcttttgttatccttagagaactttcagcgtttcctcgtttattattcttcttcagtgaatttggccttgcctggatagttcagtgggactataccattattacagacgaatcaacaacttttccagccctgggaaggacctttaagactaaatggtgggatgctctgaaaaatgatgcctcattacaagccgtgaaacaatatttcttaagcatcctacacaagcttcagccactgatgatatgtcatagtttcttcttaagaaacaacaactccaagccatgctagcagcagcaaaaacccctcaagaatttcagaaaattcttgacaaaagtagctcaagcttttcccaagaagactcttatgctgattagatgattctacatcaaactaccttccggataatgaagatgactgtgatggtatccttcctcccattaggaaatcaaaataagctctttaagcatacaactcttcttaaagctctccactgacaaaaatattctccactgacaagctttaagcagttagctccgaaagcaattttgtctaacaagcgtgtgactctacaattcttaaccagcctggtactccagccttcctccgtcgaaagcaagattcgtctgccaacaagtcaagattgctacagtaaaaagtcaattttactatttattcacggatggatactatttgcagttggagtcaaatgttacacagtgacttgtcgtccactttatactttttatgattccttttttagctatttaaggaggcctgatcgtcagttgtaaaaacaattcatttttcacttttcttcccgtcttaagctctcccttctctcttctttctctctcatcatgtaagccttcaagctcaaagctttcttcaaagctttcctatccctaccattgtaagatatttctattcctacaggatatatatatatatattatatgtagtttatttctattctaaacctaaaaaatattatattcatagaaaaaacaaatattagaaataaagtttcataaacaaataaattttaattatcttattttaaaattccattagaatgattattgaaaatataaaaatcatcatgataatctttttaatgagtctttatttacaacttttataaagtatataattataggagaaatataaacttataaatactttttcaatatttttaaataaaaaataatcatacatatatcatcatgttttttatattcttacatacattgaaactagataaattattattttgtattaaatgtgtttttaggtatgcgtctttttggtcaacatgaaaaatttcttcatacaaacgttgttttttttttaaacaacttaaatatgtcgatattttagtattaaatgtagtatttaaatgtcatattgagcatatgcattgaaaatttatatttcttaccagtgtacataagatattattcctggaaatcacaaattttgttattgtttttttcaacaaaacaatttcaatttctatattattacttttttttaatcatttcttggagtttttcccaacatttttatgagttttgattaatttccatcccatcaatattttttgtccaaatttccacctaaatttttttaaatttcctgatatttccataaaatccaaccaccaatattcttgcaatatatgatattttaatacttttccttgttcaataggctttaggggtgtcatcaaagattacaagaatgagttggtacctaatttttgtaaaccttctagaactgggatggttattaaagcagtgttcttagcactcttagatggtttgattttagcttccagcttgggcattaggaatcctcttgtggaaggggatgatgcattagttacttctggcttctttgaggggtcattggagtccttcttactggctcaggagtatccattctttgttgaaggacatcattttctcaattcatgaggttgataggttggcgaaatttatttctttggtctagtcgtccttctcttttctttatcttcttttagtttttcagatttgcctgctttgttgacttgttggatctttgtcttatcatattgtcttatcattttatttgaaggatatttaatttttctttgcacatatatcccttaattagttcaattaaagatgtttgacattctgatatactgtctgacaaacaactaataaaatttaaattccccacttttatttgtgtccgttaaaggcaaatcctcaaccttcttgctgggtatttagattactccatgctccaaatattgttatgtgctattttctatttttttttccctaacttgttcatcattgactccattagtgtttcaataggtttcttttagaagtttcaagtgtgctactaattgtcaccctttttgttttcacattgaaatggatgtttactagatatttccattttctaaaccttgatataaccttgggtgctaatattttcctccttggtcataactgaagtggtctggagtccttttcaggcacctttgatatattcttccttttgcctatcaaaaagaaaaaactcaagtagtcaggactatgggatgttggttgttagaaaaccttagacaagtgtctgagactaaaaacattaaaaatgttatgcaaaagacttagtgttgtattataatgttttactaattatttaatagattatgtcgtatgaagcggaaatcgtcaatgatttgaaagagatggatttaatattttgttattcacatcaaagagctggttggagaagtcaaccaggagttgataatgctgaagattttaaattttgtggtagaatttgataaatctagggaaatttattcaggacttttggcttcatgatgcaatgattatgttagttctttagaaggaaatatctcttttcctcaacaaaatagtcccaatctagtatgccaaaaggtggcatgtagatgtgttgactccttgatgcccaattcttagttagctattaagtattaactactgcatggtgcatcacacaaatatggaggttactctctgttgaaaaagataggatcggtgaaataattagcatattaggagatttaaatgtacaagatattaggagatttattcttttgtaatttgttagacaactgtatattgttaggttgttaagttgtttcctattttagtgttgagaaaatcctctataaagaggaagtcgtgtatacagttttgaatatagaataaaaatacaaaaaatatgttcttttcctattctgtttacatggtatcagagttgtcctaattcacccaaaaaaacccttacgatttttttctttttgcatatttcttttcgtaaccagtagccatgtctgatgtttcttctgaatcaaacccacttgtttccccttccagtccaacaactaaacttgcaacccaaacccataataccgaatcccatcctgttcagattaccactattcacctcaatggtgacaatattttaaaatggtctcaaataagttctcatgtatcttagaggtagagggaagatcgggtacttgattggagataaggtggcaccaacgtcggaggatcctctgtccacaacctagggtgcaaaaaattcaatggtgatgacatggctcgtgaactccatgaatgaggagattggctccaataatatgtgctactccatagccaaagaattgtgggacaatgcgaatcagatgtactctgatttgtgtaatcaatcgcaaatgtatgaattgacccttaaacttggtgagattcggtagggagaagaatttgtcaccaagtacttcagttcattgaagcttcttttggcaggatttggatctattcaacgactacgaatggaagtccactgatgatgctaatcattacaaacagactgtggaagctcataggatttataagtttcttgttggactcaatgtagagtttgatgaggttagaggacagattattggcagagttcctcttcctaaaatcagcgaagtctttgctgaagttcaaagggaagaaagccgtcgatacataatgttgggaaagaaatctaatagtggaagtgttgaaagttctgtttttagtgttgctgaaggttttgccaataaagcagccagtttttagccaaggcttggagaaaggccacaagtttggtgcgattatttaacaaaccacgccaaactcgagaaacctgttggaaaatccatggaaaaccaacaaattgggaaagcagcaagccggagagagaagaaatcgttcaaatcccaaggccaatgttactgtcaatgaatcaaagtcaagtccctttagcaaggagcagatggatcaccttctgaaacttctaaaatccaattctccatcgggtattcctagtgtttctctagcacaaataggtagtgcacttaacgccttttcatgttgtttcaattctactccatcgataattaattctggagcttctaaccatatgactagtttttcaaatctgttcaacacttattcaccatgttctggcagtgaaaaaattaggattgttgatggtagtttctcacctatagccggaaaaggcttggtaaaattatctgagaacattgatcttaagtctgttctccatgttccaaaattaacatgtaatattttgtttgtgagtaaacttaccaaaaactctaattgtcgtgtttttttctataattctcactgtgaatttcaggaccagaactcgggggaagaagattggcagtgctaagttgatagatggcctttactactttgatggtgttttctccaataaacgggctcagggccttagtagtgttagttttctttttgtttatgaacaaataatgcttggcacttcttataaaaaataaataaataaataaaataatgcttggcacttaagactatgacaccctagttttctatatcttaaacatttgtttcccactttgtttaaaggattggattgttcatctttttattgtgaaagttgctatttatctaagagtcatcgtactacttattatccaaaaccttatgttccctcaaaaccattttatttaatacatagtgatgtgtggggaccttaaaaaattacaactacttctagaaaaaaatggtttgttacctttatagatgatcatacacgtttatgttgggtttatttgatgaaggaaaaatcagaagttggaaaacttttccaaaatttttataacatgattgaaacttagttccaagtaaaaattgacatttttcacactgataacggaattgagtattttaatgaatttttgggtagttttttttgaaagaaaaaggtatccaccatcaattcacttgtgtgaatacccctcaacaaaatggaattgctgaaagaaaaaataaacatttacttgaagtggctcgtgcaattatgctttccatgaaattttcagttggatcgggataaggcgttggggcctgatggatttatcattgtagtgtttcaagattgttgggatgtgatcaaggaggacttagtgagggtgttcgtagagtttcacagaagtgggattatcaatcaaagcaccaatgcctcctttattgttcttttgcccaaaaaaagccagacaaagaaaatctcaaactatagacctgttagcttgaacacttgtctctataagataatagccaaagttctatcagggcgattaagaggggtactacatgaaattatccattctacttaaggtgcatttgttcaagggagacaaattttggatgcagttcttgttagatagtgtacagttatttaggttatttatttttccttttccttttccgtttctttcctcattgtattgtgggtctcactaacatgtatatatatacccaagtccaatgtgtattatttacaattttttcaataacaataattaaggattctcccttttttctctttttacatagtatcagagcctagggagaaaaaaaaaccctaattatttccggtttatctgtgaatccattctgggaaatcttttagttatcgtgtttcattccggtcacctttcccatctcctaaagcttttcaatcaactgtattgccgtcagaaaactctcatcgccgtcagaaaacccttatcgccggcgactttttcggcgacctttttccggcgaagtccttttccgacactgaccataccatcaggtgcgcaaggaggagatcttcaagttttctcaaagcaccggagggagattctcatccacgcgccggccacgcgcgtttcttctccggtggcttgaatctcacgcgccgacgcgtgagggcgcgtggagcactttccggccacgcgcttccacctctagtctcgcctgacgccgtctagccaccctccatctgtgcttgtgccatccgagccttgaaagtgcattttttggggttttttgtctccaccagccctctaaacagcctttccggcgaccttcggtgacttcctctccaccccgagccctgcacgtgtcttaggaagtgttcttctacccttccagtggtgccacatttgtttttctttactatttggtctctcacaaccgcagatcctcgatttttttcttctttcagccgcgatctaaagccgtattagggctctcttcgatccaaacatatttcgttctccagataagtagatatgactactaaaagttccactttttcctctgtcatatctggatctcctatgattacttaggagaaattggttggcaatgaaaattatttgtcttggtctgcctctgtggagctttgatttatgggtcaaggttatgaggatcaccttgttacacaggtggtggatatccctgaggtcgacagagtacaatggaggaagatagatgcacagttatgtagtgtgttatgacaatcagttgatcctaagattttgcttcatcttcgggcctacaaaacatgctttaaattttggaatcaggcgaaagggctatgcacgaatgatatccaacgtctttacaaggtggttttttctattgttaatgtcagataacaagacatggatttatctacttatattggccagattgcctctcttaaggaggaattcttgaccgtgatgcctcttactactgatgttggggatcaatgaacatagattgacaagttcttcatggttcttacgcttattggcctccgtccagatcttgagaccgtccgcgatcagattcttggcagttccttcgttccatccttggatgatgtgtttgctcacctcctccgtatctcctccactcagactttgccatttgataacacttcagattcttctgtgttagtttctcaaactaactctcgaggaggacgcagtggtaaccgaggtagaggccaacgtcttcattgcacctattgcaataagcttggccacactcgtgatcggtgttatcagttacatgagcggcctccccgcattgcccacgtggcccagtcatctgatcctcaatcgccttagcctcccagttcctccacatctcagggtatttccctcactgacagtgagtatgatgactatctccgctatcaagccactaagttagcttctgttgcctagactggtattctgcttgtcttacccacacatcttctcttggaccttggattctagattctggcgcttctgatcacatatctggtaataaggatcttttcttttctattactactacctctgccttacctactgttactttagctaatggttcccaaactatggctaaaggttttggtttcgctcatcctctccctttcctacctctccattctgtcctttatgcccctgagtgtccttttaatcttatttccatcagcaaaataactcgcactcttaactgttctatcactttctctgataaatttgtgaccttgtaggaccggattacggggaagatgattggcataaggcgtgagtctcaaggcctctatcacctcacctcgccttcaactcctgcagtttgcatttccactgatgctcccctcctcatccacagtcgcctgggccaccctagtctatccaagttccagaaaatggtcccttgtttttcatctttgtcgtcgcttgcgtgtgagtcctgtcagcttgggaaacatactcgtatctcattcccaaagcgtttgaataatcgggcaaagtctccttttgaacttgtccacattgatgtttggggtccttgtcggaccgcatctactttaggatttcagtattttgtcactttcattgatgactattctcgatgtacttggttatttttaatgaaaaattgagctgagttattctctattttccagaaattttatgctgaaattcaaacccagtttaatatttcaattcgtgtgttgcgcagtgacaatgccaaggaatatttttctgcaccatttacttcatttatgtcccaacatgggatcattcatcagtcttcttgtgctcatactcctcaacaaaatggggtagctgaacgtaagaatcgacatcttgttgagacagctcgtactctccttctccataatcatgttccttttcgtttttggggggacgttgttcttacagcatgttatttgattaatcgtatgccttcatctgtattacacgatcatattcctcattcccttcttttccctgaccaaccattttatttccttcctcctcgtgtttttggttgtacttgctttgttcatattctcactcctagacaggacaaactttctgccaaagccacaaaatgcatcttcttgggatattccacacttcaaaagggttatcgttgttattcctctgagactcatcgctactttctctccgttgatgtcactttctttgaggactcatcgttcttctccacctctgagtctcttcctatttatgaagtcttacccctttccattatctccccacttgatgcagtgccttctcgcctacttcaagtttatcatcaccgtcatcgtgtcgctgttcctccttctttggccgaggtacttgctgactcacttcctatcccttcggcttctcttgccccgactttgccttcttctgctgacttacccattgctcttcggaaaggtaattgatctactcgtaatcctcatcccatttacaatttttgagttaccatcgattatcttcaccctattctgcatttgtttctactatatcttctgtttctctttccaagagcacccctgaggctctttcccatccaggctggcgacaggcaatggtagatgaaatggctgctttacactccaatgacacttgggatcttgttgttttaccctctggtaaatctacagttggttgtcgttgggtctacacagttaaagttggccctgatggttaggttgatcgccttaaggcccgcttagttgctaaaggctatactcaggtttatggttctgattatagtgacactttctctcctgttgccaagatagcttctattcgtctattgctctccatggctgctatgtgttcttgacctctttatcagttagatattaaaaatgttttccttcatggggatcttactgaggaagtttatatagagcaaccacctggttttgttgctcagggggagtctggtttagtgtgcaggttacgccgttctcgatatggcttgaaacaatttccttgagcattgtttagtcgttttagttctgttgttcaggagtttggcatgttccgcaatacagcagaccattccattttctatcatcataactcttcggggcagtgtatttatctggtagtttatatggacgacatcgtcattacaggcagtgatcaaaatggtattcagaaactaaagcaacaccttttcacctactttcatactaaagacttgggaaaactcaagtatttcttagggattgagatagctcaatccagttccggtgtggttctttcccaaaggaagtatgctttagacatcttggaagaaactggtatgttagactgtaaaccggtagacactcttatggatccaaatgtcaaacttataccaggacagggggagcctttaggagatcctgggagatatcggcggcttgtaggtaaactgaactacctcaccattactcgtccggacatttcttttcctgtaagtgttgttagtcaattcctatagtcaccatgtgatagccattgggatgctgtaatccgcattcttcgatatatcaaaagcacaccaggccaaggtgtgttgtacgagaacagaggtcatacccaggttgttggttacgcagatgcagattgggctggctcacccacagatagacgatccacttacgggtattgtgtttttattggaggtaacctaatatcctggaagagtaagaaacaagatgtagtggttagatctagtgctgaagccgagtatcgagctatgactctggcaacatgtgaactcatatggctgaaacatcttattcgggagttgagatttggaaaggatgaatagatgaagctcatctgtgacaaccaaaccactttgcatattgcatccaatccagtcttccatgaaaggaccaaacacgttgaagttagctgtcacttcattagagagaagatcgcatcaggatgtgtggcgactagttttatcaattcaaatgatcaactagcagatatttttactaaatctctcaaagatcctagaattaaatacatttgtaacaagcttggtgcatataacatatatgttccagctcgagggggagtgttagatagtgtacagttatttaggttatttacttttctttttccttttctttcctcattgtattgtgggtcccactaacatgtatatatatacccaagtccaatgtgtattatttacagttttttcaataacaataattagggattctcccttttctctcttttcacagttcttatagccaatgagatagtggatgagaaaagacgatcaggggaggaaggagttgttttcagaattgactttgaaaaggcttacgaccatgtgagttgggattttttggatcatgagttggagatgaaggggtttagtcctagatggaggacctggagagatgctatttgtctatggtctcttatgcagttctagtgagtggaaacgctaaagggtgggtcaaggcaactagaggattaagacaaggtgaccctctatccccttttttgtttactattgtcgcagatgtgttgagtaggatgttgttgagagtagaagaaagaagtttgttggagggtttcagggtaggtaggaatagaacaagggtgtcccatctgcagtttgcagatgataccattttctttttaacacttgtgcggaagatttgcaaactctcaagagtttattgttagtgtttgggcaaatttctgggcttaaggtcaatcttgacaagagtaatctttttggcatcaaccttgatcagaatcatctttctaggttggccttgatgcttgattgcaaggcttctgattggcctatactttacttgggtcttcctttgggagggaattcaaaggcttgtggcttttaggatctagtgattgagagaatctcacagagattagataggtgacaaaaggctcactcatcttttggaggtaggataactcttatccattcatgcctttcccacattcccaactactttccctccttgtttaagattcccgcttcagtggctgcaaaaattgagagattgcaaagggacttcctatggtcaggggttggggaaggtaaaagagatcatcttgttagttgggttgtaatgtgtaaaccgaaagtaaaagggggattgggatttgggaagatttctctaaggaatctcgctcttttagggaaatggttgtggaggtattctagggagagttcagctctgtgacatcaggtcattttaagcatttatgagacagattcgaatggttgggatgccaacactgtagtcagatggtcacatcgttgtccttggaagactattgcacaagtctttcaagatttttccaagtatactcggtttgtggtaggagatggggaaagaattcgcttttgagaatacttgtggtggggggaccaaccttgggattccaatatccaagattatttagattagtcacggataaaaatattcctatatcttcaattctcggttctactcgtcccttctcttggaactttaatttccgttgtaacctttccgattttgagatagaagatttagaaagtctcatgcggtcacttgattgtttgcatttatccccatcggttttagatgtaagatcctgatctttatcttcttcaaggctatttacagtcaagtctttctttctagccttgtcccaccttttcgattcatctccagttttccctactaagtttgtatggaattctcaagtcccttttaatgtcaagtccttcgtctggttagaggcacacaagaaggtaaatactaatgacttgctacaattaagaacaccctataaagctcttagtccagacatttgtaagttgtgtatgaagcatggagaatcaacagatcgccttttcctacattgttcgttgacaatggggttgtgacacagattattttagttagctaagatggattgggttcccctgagaaacatctccgacatgatgtcaatcaattataaaggttttggattatccaagagagggttagttttgtggcaaatcacgtgcattgctttaatttgggttgtgtgacgggatagaaatgtgaagatatttgaggataaagcaaggaattcagagaatctatggaattccattcacttccttacttctctttggactttctgctccatggtttttaagggcattccccttaatgtgtcacaactagattggctagcagtgtgtagctccaacaggatggactagcctagagagtttgattgtttttgtattcttattgtttagtttttctttggtgggaggattcctcatccttctctagtacttctcatttctttcaatatatctctttgtcatttcctataaaaaaaattatgctttccatgaatgttccaagatactattggggggaagctgttttgacagcctcctatctcattaaccgactgcccaccagaattctcaagtatagcacaccactagaatgttttcaaaaagtctttcctttatctagaatgtactctgacttactaaaagtttttggctgcattgtttttgttcacctacctaatcataatcggtctaaccttgatctaagggtagaaaaatgtgttttcattaggtatgcctctaataaaaaagggtataaatgctatagtccccaaaccagaaaaatatatgtgagtatggatgtctctttcattgaagataaatctctttttgacaaaatttttcttgtctctttcattgaagataaatctttttttgacaaaaattctcttcaggaggaaaatgatgtaatggaagaaattttttgggatttatctcttgctccattaccaaatacaattttaaccactccatctcttatttataatcctgaggaacaatgtgataagactaacaaccttgaggaccaatgtgataagtctgacaaaaattctagtcatatagtgccaaacattactgtatttgaaacaggggagaatcagtacaatcaaatattgagcgtctggtttatactcggagaaagactcatcaaaagagtcaaagtcaacatattcctcttggtaatgaccaatctcgacctttgggaactaaagctcctgatatcacaggtagtcctactcctaacctaccttcaattcctgtcatttcttctttagaccttgatattcctatagcccttagaaaaggtacacgaacttgcactaaatatcccattgccaaatatctatcctataaaaaactttttaaaacttgtaaagcctttacctaaaaaatctcacacatgattgttccaagaaacattcaggaagcccttgatgatccaaattggaaagtagcagtgatggaggagatgaatgctcttaaaagaagtagtacttgggtgttagtggatttacataaggagaaaagaactgtaggttgtaagtgagtctttattgtgaaatgtaaagttgatgggagcatagaatgatacaaagtgagactattagcaaaaggatttattcaaacctatggtattaattatcaggaaactttcgctcctgtagccaagataaactcaaccagaattttgttatctttggctgtaaatttcaactggcttttacaccagttagacataaaaaatgccttcctaaatggaaatctggaggaggaagtatttatgaacctaccacttggattcgaggagaagcttcgatcaaagtttgcaaattaaaaaaatccctatatggtctcaaacaatctcctagagtttggtttgagagatttggaaaagctataaagaattgtagctgctatcagagccaagctgaccatactatgttctacaaagacaataaagatggtaagattgctattctgattgtttatgtggatgatatagttttgattggcagtgataaagaagagttggagagattgaaaagaagacttgcaatggaatttgaaatcaaggatttgggagccttaaagtacttccttgatatggagtttgctagatccaaagaaggtatatttgtaaaccaacgtaaatatgtccttgatttacttggtgaaacagacaactaggttgtaaactagccgaaacacctattgaacccaacataaaattgctgccctccaaagatgatgaagtgaaggataaagagcaatatcaaaggctagttaggaggctgatttacttgtcacatacgcgtccagatattgcttttgcagtaagcatggtgagctagttcatgcatgcacctggacaacaacactttaatgttgtttatagaatctttagatatctaaaagggtcacttggaaggggtttactgtttaaaggtcgtgggcacctatagtttgaagcatttatagatgcaaattgggttgggagtgtagtagataggtgtcaacctttggttactgcactgttgttatccgtgcaatgattaatggcgaaaaaggagaaaacgagaaagaagacgaatttaatgtggtccggctaattgcctacgtccacgggaacagggaagagggttttcgctatgttaaaattagggttatataaaagggtatttatattaaccttttggataatgaaattccaaaaatactcctgaaccataccacagggggcattgccccccgcaccccccaacctgttgtttgcctacaactataaaaatgcaagcttgaatgccaaatgctgtcgctccgctacgcttcgacatttgcctctttttctctatatgtctttcgctcagagataattagcaagatattaggagatttattcttttgtaatctattagacaaatgtatattgttaggttgttaagttgttttctattttagtgttgacaaaatcctctataaagaggaagctgtgtatacagttttgaatatagaataaaaatacaaaaaatatattcatttcctattctgtttacactctcttgcatcatctctcttcatttcaggattccttaattttgtcttaaactaattaatctatacatataatgctattatgtggagctattccattctatcttttatcgcatttctggaagcagcttcacaaatgtggaggttgatcatgagtattattgttggctatggaatttctaaaagtggttttagagatgtggagacagtatgactgatttcctttgatgtttcctgggtgctgcccttgccagttaatgacacgtaggctaattgacatggaaagcttatttgaaatggtaagaggaaagtgtagactttggcctttctttgcttattttgttatttatggaagaaaagaaattgaggaatcttctatggtttggagcatttggggctgtatgtcataggatgcttcaaatgagcatcctcatgggtttatatagagcctaggaagcttttggagactcctggagccatctacactaagccattggagggaagagtgtggaaagttctagagatgcctagagatgttcgcacatctctacactatggtggaaggcatgagaggagtccaaggctttctagagaattctagagatctcttgtacatagggttgtatatagaattgtgtagggtattctagaatcttcttgatttgtaaggaaccctccaaggttccagagagttctattggtgcctataaataggtgagggcctcatttggccaagacactacccaaatcacttcctaaccaagcaagtgagtcctcaaagcacttgtaaagccttccttgagtaataagagcttctattctttaagagttgcctactatgccttctacaacttccgagtcgtgagcgtcttagcctagcaagctaagcattggaagtaaggctgacttagcaagatcaagcatcttgacttctttaagtgccgcacgagcttagtaaacgactaagtccatgacatgtagctgaaaagtattctatacttcctgtttgtgtggttaggaagatatctagggaatgccgaattggaagttatcttttcctgatttcattgatttcttgggttgtgttgaaggcttgtgtggtttcccttttttccttggcaaaagtgagtttccatgcactcatacaaaataatcataaaataggaattctttaaaaataattcaagtttcatgcactcactgatcaaaggtagtacctttgattaaaaagtgtatgaaatgctaattatttttaaataactgcttgaaatttgtattttattaacatgggttcctattttgtagttttttttcacatgagtgtatggaaatatacttttcccttttttcttcctctcttttgtagtttgcttgttaggtgctatacgtacttgggttgcatcccttatattaggcacctgttcctatattattattttcctgtcaaatgaattaatatagttcattcgcttgtttctgaggtacatattgttctttgctatttaactccaaaatgttatatttgtattttcacctggcagttgcaattaattgtgtaattgtgggtgttttgcttaattaattaatttatttttttacagtattccagaatcataattaatgcatttggatacacttgatttgatgttgaagtcattgaaatacataagcagattgaggtttaactcctttagttgtgcatcaatattgatgttagtggctttcttgtttgcttgtccatgctccctcaggaa

SEQ ID NO: 11074 - DNA, 9546 bp, Vitis vinifera
  Intron number 4 from transcript GSVIVT01031368001 (locus G SVIVG01031368001) derived from phytozome v7.0 (chr-ID chr6 ; pos 19510123 to 19519668)
ccattgaagggttagctgtgagttctttctcctttgtgaaagtctctctggaattttacttctcaattgatccatctttgatatcgcttatttgtcagtcatatcagatcctctactcaatttaaaactacaataatatgtagtagttcagtttggaaatcacatataaaatatacctggctttatccacttttagtggaatgctgcaacttgggcattccctgctagaggtgaatagcttcttgatacttaaacaatcactatgtgcactagttgcaattcaaaaactgtttaggtcatttctctctcacatacccatgcaaaattggtcgtgttgccgaaaacaatgtttgtctcaatgcaagccactaaaagggtcagcccctttttgttttcctttatgaaaaagaatttactatgctcactgatgtattttttactagaggttttacatagtttacttttggatttccataattttgagaagtaagacttagattttttttaaaattctgagaattccactaactcgttgtatttagtctttgccactcaattgcagaatctattaaatatacacctagatcgagtagctgaatataggcaaaggcactagtagattatttttttaattagaaatgaaatagtactgtataggatggataagagaggcatggttcgtttgtgggcaaacaaaggaaaaaggtttggagagcagctcttttatgtattttttggacggtctagcaagaaagaaatcttagggggtttgataatgaggagcattcttctctttttttgaagatgttgtttctaaggattttgttctattgggtaaagtagtacttatatagatagattctttgtatttctttcattttattaagtggttggattctggttaaggtagggagttgttgttgagattctttaccggtttctgtgcttttaggcgctatttgtatacttcccagggttcaaaatcttagccgagataagattatttgtttacgaaaaattggaaatggaagggagcgagagagagagggttagagtgagagagtgtgagagcaatggaagggagcgaggcgagcggcgagcctcagaagggttagagggcgactagtgagggtgcagaaggggatggcttcgtgggggttaggagcagggccaaaaagggaagtgttagagtggagtcgaaatggtttgatgtagaggtggtggagcaaaaaggcaaggtgcaagccacgattgtggaaaggaaaggaggagtctcctcgtggattaggctgggatcgaagagcattggatgcctctttgatggtctggtttcttgcattaaggttgcgggatctggtatatgggaaaggaagtggatggaaagtgggaggacctactctctggtgcgggatcaaaataaggggggtttttttcttagaataggggtcatggatctagaaaacaaaaggttctacatcttcattccaaaaggcagaggagacaagggcggttgggtgttaatggtggagatgctatggcgtctgggttgctgtgtcggagaagagagttaccagaaagaagatgcgctgctgctgagtccctgcatggggaaaacctatgcggaagtggcgaaatagccaaaaggaagagaaaaagcagcggtgagggtggagttatgtaagagggagttgagccgaaacttggagaagctggctcactacttggtggggagctggaaccctagctctgggaaaggggatgacctaagaggctaggggacatacttggcaaaatattggagtctgaagggtagtttagggttagcaaaattggaaaggggtaaagtcttatttgaattcgagttctcggctgaagctgagaaagccctaaaaattgggggtttctcgttcgggggggtctatcctcagcttggagaaatggaggccagagatgggatgtctgttggagggggaaaaaaggagcaaggcttaggtgcgtattgtgggactacccgtctccctatgggagcaggacaatctgagaagaataggggatgcctgtgggggcttcctcgcagtcgactctcaaacgaagaagttggaggacctacagtgggtgaggattttggtgaagctcaacggcgagaagccccccaatgtggtggaggtttgggctaaagatgtttgctatgagattaccctatggtgggagatcaagcctgctctgagaatggcaagggaaagaaagagcgaaaacaaagtcgtttcagaaggtgaggttgggggtgaggctatcgcacgtgcggttgagcatgtgagggggaaggacggtgacccgagtctcgaggacctattgcagactgatgatgagacgaaggggcaatcttctgggtcgggtcaggccgtggatcctagcttgggctctaagttggtcgggccccatgattcgattgggccgccgtcgctgtgggattcagggccttctgaggcctctgggccctatccgcttacggcttttcctcgcaagtttggaccgcattattttgggctgccacctgttaaggattatgggcgggccttggataagcttggagggcctgggttgggtggccgaggcccgacctcgtccttaaatgtgggtgaagcccaattgggggtggcctgtccctttaattggtcgggcccaagtaatctgggggcccctgaccaatccatgtcttccctttgggtgtttgatggactgtggagaccttcatccgaggagcaaagcttagaggagaacttgaagaccgattgtgctctaatggaggaagcctcgaggtatgggaatgccactaacttctttgggacgctggtttgtgtttccccttctcccccttcttctttttttggtcggactccatcgggggagtattacgaccgttctggggcggttttggacgcatcctagagggaatctccgggccgcatggtgactggaagggagtcttcagtgctggagactgtgactcgtcgggagcttttggaagataataatggtgttatgggagctagtggaaaggagctttgtttagctagtgactcgtctcctaaagtcaggggttgggaggaggctagttgggaggaaagtgatttggcaaggttcagtaagtttttggggttttcgacagagggactggaaaaggatattttggagtttatggtcaaaatcagaaaacgaagggaaagagtgcacagtaaatctctcttggaaaaatcaaaatttgaaagggaattgaagagacttgaatgctccatcaattatgaaagggggaggaagcagaaaggtataatgcaaggaagagggtgccagatttcagttatccaatgaagctaaggctggtgagttggaatgtgcgtggagctaatgatagctctaaaaggaaagtgatcaaggccatgatcaaaagtcagagggcggatttgttttgcattcaggagacaaaaattcagacaatgtcaaagggggtggtgaggagtttgggttctgggaggtttcttgattggggagctatgggttctcaaggctcagctggtggaattttggtttgtggggacaaaagatctttggaattgttggagatggaggtgggtcatttctctatttcgtgtaggctaaagaatgttgaagatggaatggtttggattttcactggagtctacgggccgtgtaacaggaaggatagggaggctatgtgggaggagttaggggctataaggggcatatgggacgagccctggtgtttaggaggggactttaatgtcactctatcccaaagggaaaggagtaggcagggtagcctaaatggagcaatgcgaaggtttgctcaagtggtggatgatctagaccttatagatctccctctgcaagggggtgcgttctcttggagcaggggcaggaacaatcagacatgggctagactggatccttttttggtgacgcagagctggttagacttttttaggggggttgtccagtgtaggcttcccaggtctacctcagatcacttccccattttgttgaaggggggcgggatgagtcggggaccatccccgttcaggtttgaagacatgtggctcaaggttgatgggtttaaggatttccttcgggattggtggcagggaagggtgaggggagggagggccagctttagaatggctgctaagatgaaggtgttgaaggagaaaattaaagcttggaatagggatgtttttggtaggctagaagtgaataaaagctcagctcttcagcaaattgaattttgggacagggtggaatgtgatagggacctatcagaaagagaaatggatctgaaaaacaaagctaatgagaccttcaaaaagtgggttctcttagaagaaacccattggagacaagtgtctagggagcagtggctaagagaaggggataagaacacagggtattttcacaagatggctaatgcccattggagaaacaactttttggacagaattaaaatcaatggggtggagttggttgaggaacaggaggtgagggaggggattgtggctgcctttcagcaccagctctgggaagatccaggctggagagctgacatagaggggctgcacctacaaagtctaaatcttagtgaagctgaagctttggaggcaccctttactatggaagaaatattctcagctctgatggaaatgaacggcgacaaggctccaggcccggatggatttattgtggctttttggcaagcttgttgggacttcgtaaaggaggaggttgtagagttgtttaaggaattttatgaccagaagtcttttgccaaaagcctgaattttacatttttggttcttattccaaaaaaaggtggggctgaggacctaggggagtttcggcccatcagcctgttaggggggctgtacaagcttatggccaaagtattggccaataggctgaagcaggtgttagataaggtggtcttggctaatcaaaatgcgtttgtgagggggagacaaattctagacgcctctcttatagctaatgaggtggttgactatttgcagaagcggaaagagaagaggctagtgtgcaaactggatattgagaaagcctacgataacattaattggaacttcctcatgaaggttttgaaaaagatgggctttgggtctcgttggatggaatggatgtggtggtgtctctcaacggcaaaattttctgtccttattaatggggtgccaaaagatttcttctccagttctaagggcctgcgtcaaggagatcccatttctccttatctttttgtcctgggcatggaagtgctgagtgcactcattagaagggttgtggaggggaactttatttctggttgtaggctaagagggagagggggtacggagatgaacgtgtctcacttgctttttgccgatgacacaattattttctatgaagctagaaaggagcatttaactcatcttggctggattttggcgtggtttgaggcggcttctgggcttaggataaatctggccaagagtgagctaattcccattggggagattgaagatattgaggaaatggcggtggagttaggttgcaaagtggggagccttctgatcaaatatttggggctgccccttggagcccgtcacaaggccttgaccatgtgggatggggtggaggaaagaatgaggagaagactagctctttggaaaagacattatttgtctaaggacgggagaatcaccctcattaagagtacattggccagcattcccatctaccagctgtccctttttagaatgcccaagttagctgttaaaaggctggaaaaattacaaagagattttctttgggaagggggaagcccggaaaggaaaatccatttaatcaattggggggtggtgtgcactcataaggagaaggggggtcttggcatttaggaagattgggttattgaacaaggccttattgggcaagtggatttggagatttgcctttgaaaaagatgtcttgtggaagaaggtgattagggtgaagcatggtctggagggatgtggttggagatctaaagaagttcgtggtccttttggagtgggagtttggaaggagattctgaaggagacaagctggtgttgggataacatggagttcagggtggggagggagactaaggttatgttctggattgaccattggtgcggcaacgcagcgctgtcccaagcgtttccccagctttatgccttggcggtttgcagtaatgcgacgatgaatgaggtgtgggacccaagccttggccaaggagggtggaatctcaatttgtctagagattctaatgactgggagctggtgttaatagaagagttgcttcttttgctaagggacttcaggttatcctcagaggaggactcagtgttatggaaaggagggggtcttgatatttttcggattcgggtcgcttataatctgctggcagcccccaatcccctcgtttttctgaaaaaaagcatttgggtggacaaggtcccaaccaaagttgctttctttgcgtgggaggctacttgggaaaatacgttggataggctacaaaagcgagggtggcagctccctaatcgttgttttttgtgtggttgtgaagaggaaaatgtaaatcacattcttttacattgtacagtggtcaaggccttgtgggagatcgtctttgccttatttggggttcaatgggtgtttccagagacggttaaagaggcgttattctgctggagggccccttttgtgggtaaaaaaaggaaaaagatatggaattccatttcgttgtgtattttttggacggtttggaagaaaagaaataggttagcttttagagggggttctttggctattcagactctcaagaattcttttgtatatagtttatggagttgggccaaggtgtataggggagaggagtcctcttcgcttttaggcttcttggagtggttagcggctccctaagggctagtgaggtgttcctgtttttgcacttttggccctgtggctactttgtatactacctgtatgcggtacggccttcttccctttttaatatattttgccctcatttatcaaaaaaaaaaaaatcttagctgagatcagtacgacttggccatgcccagtactagacgaataaccaagtcaaaatcgctggagaaaataaaaaacaacaaaaatgaagaaattttgaaggacaattcggagcctcagtctcgatttgcatcttcatccttcaaacctaaacttttgcatctcgtatggctgatttatttatgatttaatgccttcaaacctcaaagatgatgtgagaagaagttgttgacatgtgaaatgggtatttttcaaagaaacgggtatcgtgggcagatgttgtgagaagcaaaggaaatgaaaggtgcattttacaaaatggttctatcgcggagagataggagagtattttacagagaaatgggtgtgttgcagtcttacagtgggatgagagtgagctttgttaccataaatggggaagaaatgggtatgttgcaaagtagtgggagagaggaccataatgggagagagggtcttttgaccggatatgtgggactatttatgattataattacttaaattgaatataaatattaatagaaaattttcaaattaatgtatataagcactaaatatatatttaaaatttatttattcaaatgaaaataaaattaataaaaaatcttattgtttttttataatatttttatttagaatatatttgataggaaaaatgatatttatatttttaaaggtgattcatggttatttttttagggttgaaaatatttttttgaaattttaaaatatttaattcaaacaaatttattataaaaatatttttttaccaattttatctaatatttaatacaaggtgataaataaaaaagttaaatctattccataatgttctctctatatatttattaatttttttgtctattttattatatatatatatatatatatatatatatatacatatatgcatatttatttatttatttattattattttaataattctgttaacaatttttgagttcttaaattgacatattttgcatattgtccaataccaatctgagatatcaaaaccgatatgccttaaggccctttgagttaatgaccaataccgcgactttgatccatgatgctttttgtgtactttatgtcatccttggggcgttttattttttaatttttttaaagaatttagcttttattgtccaattaaaaaaaaaaaaaaaaaggatggataagatgctcttcaagctaggactgtaagcagcgggagcataaaaagagcaaacacccccatccccctcttggcagatacaccactattgccatgaccattgccaccactgctgctaccaggtcattttctatcactaccaggtattgctgctgacagcaccaccctttcgattattgccactgttaccaatgccaattccactccattgctactatcaaaactatatcatcaccacaccctattgttgccatctacaacattgtaagggcctccatatttaccattgcacctggtaccacagctaatgccagattgttggctattgctgttgtgccattgctgccgaaacattgcactgtcacctttttgcctatagtaatgttctaccctttgccattgcctggactgctactgctaccactatccttcccttacacagcaatttcattactccaaccactactaccaccaccatctctgtaaccactgccactatatatatatatatattaggtttggactgcaagttaacccagttggaaagtgtgggtcatttccgccaggccagttggacatttctcccaataaagcaaggttaaacaggatgtttctggtttgtatacaaggcagagtagtatggaaaagcttaatttctgaataggttaagtattggatactatatcagcatgtttttgtacagctcaagtttggaatctttgatgtcataactgacatttttgttcctcgcctattccatgagtgcacaattcttttgtattaatccttatttgtgtagcacaaacagaaataggcacacctcctccccttatccccctctcctttctccccaccaagtgaataacacatgtaggattgtgtggatggtgcatgccttctggaattgtggtgcattaatttttggttcacttaatgttttccttttgaggtagcatatcattttgctttctttggttattcattatttttttattccatgggaaaaaagttccaggctaatttctttaatcaactcccacgatataatacttatctgcaacatagtttattgattttatggtcaaaagttaaattagaactagagagtacaaatttatggaagagttaagcttttcctttttgtttgtcaaattcataccatagatgctttcatcaaccgtgacttagttcagctatgcaggttagtgttg

SEQ ID NO: 11075 - DNA, 5887 bp, Vitis vinifera
  Intron number 3 from transcript GSVIVT01020663001 (locus G SVIVG01020663001) derived from phytozome v7.0 (chr-ID chr1 2; pos 3319048 to 3324934 reverse strand)
gaacttcacatctgaagtactgattgtcctcattatttggagctttcttccaaaagaatatggatgaccatggtccatgttagattctcaatttttttttaagaccattgagcgctttaggagcaatttacgaattttcagatttattcagtagttgttataagccaagaagcaaattactaaaacaaagctcaatcatgaccaccttgatactagtcattctcgaggagggtgatgatcaattgtaatacagttgtatgttatgaatcattcttttagattttaggttgacttgtaattatttctgtaaatgtttttccaccattttgtatgtattggataaagcaagttagtgaattcataatacaatacacaaaatctctttgcttatttcttcttatggtatgagatttgtacagctccaacaggcttgcatcttcctttttccctttcattcaccatgtccgaagaaagtctggctagctcccaattccatcttgttgcttcctgcaacttcttccaactacccatcttacaaacctcaatttgattgcttgctagttggttatgatctgctgggtattctcaatggaactcattcatgtcttcctgatcagtttagtgaccaggatggtaaatctacaactaacctggcccatgtcctctggtttgaataagataaactcattcttcacatccatcttcacttccttatctgaacaccttcaacccgtacagggcacccctggtgatcttgttggagtaagagggctgaaaacacaagaacaattacataatttcataaagataaataacaaattgagaaaaattaatgaaattttattgtcttctatttgtcttgttcaactattacacaaaccccatattcatatttaatcatatcaaatcaaatctaaaatttggaaactttctaacatcaattttacttccgaacttgcctcctttgaacttgatttttaatttaaagtagtatttttatccttattatatgtttaagaaaggctagaaggagccaacatgaaatcactttgaccctaaatcaaagggattttttgaaagatatgaggtagcgaaacaagaaagttctcaccatcatctaatggatgaaggtacttttgagaatatttcaaatgcaaccacctccatggaagtatgagatatattacaaaatacacaaaagggaattgataaggtaagaaaagttcgtcttcaaactcttgaaagagaatttgaaaatttgaatatgaaagaattggaatcagtcttttgattatttttctagagtattgactattatgaattttattaaaaagaattagtgagagtttaaatgatgtttgtgtgattaaaaaataaatatttagcaagaataaatattttttacttgatgattttagtagaaaaatttgggtgcattttttgaaggaaaaatatgagtatttagtgttttcaagaaatttaaaggacttatttaaaaggtaagtgtccatgatataaaggcaatgagatcgatagaaaaaggtgaattcacatcaaaagaatttaaaaaatattgtgaaaatcaaattattcgtccatcttcttttgattagagaacacatttgaagaaggaagtgcaattaaaattttcaaaatctcaagattaaattgctgatatttttaccaacctttacaattttggagattttagaaggttgatgatactacttgaagtcacggatcaagtttaggagacaagttggaaatttaaacttgatccaaaaattttaaaaatattataattaaatttagtctctaaaagtcaagggagaaatgttttattttggctcattatttcagtttttatttttgagttgtcaaattagaaaatttctattttgttaaatgtaagtatctataaataagagattatatgatatttgaataggagagagtggtgaagtataatttaattctcccaaattttatctcattttataattgtgtctcccttttaactctattactccaacaaattagtatcagaatttccgcatacctaacaccacttttttggttttaatctagtttgattgcgagaaaatgtcaaaagagaaaaaagaaaaaaaaaaaaaaaaagataaaaaaagtggaagtaagattgtgaatctcataatttttttccctctaatttgggatttgcacaaactattctcatgataaaataaaaacgcatgccttagggcttatttgatttttttttttttttagaatagttttttgttcttcatagcaaaaaacacaaaaagcacattggacaactaaaaactattttctattttctaatcttaagaacaaaaaatagggtgacatcttttagttgttttatattgttttcacttggttttttagggttgttttaaaaaataattatacaaagaatacttaaaaataaaatactagatataaaaaatatttctaaaatatattaaaaaatattaaaaaatggttaaaatattttaaattttcaaataaacatttgttctctaaaagttagagaacaattttaaaaaattatttttcaaaattttatttaaaaatagttatcaaatagacccttagagttcttcatatattactccttcatatgctagactttgttaagctttaactattatgcaaggtgtcaatgatgcatggtctttttttcctatatggacacacacatatatcttatctcaatttgtaccattgcttgaatagtattttttcattgttcatttaagatcaaatctaggtcaaataaccgaaaatgagtttctttgtccctaaaatataattttggctaataatttcattcagtagaaagaaaaaacgaatgagcttgactatgtgatacatgttagaggtcaatgtatggtttttagcaatgttttcataaccgaaccaatcatcaaactagaaaagttattagttcatggttcattggtcggaccggcggtcgaaccggtgatgtcatatatatatattttatataatattaaattttaaaaaattaataaataaaaataataaattctatctaaattttgatagtatctattatgtttattgagttttttcataaaattttttagttgtagatgttaatcaatccaattttttcaatcatttcaataaattaaaatttcaatgtgtaataaataaaaaataaaaaaaattaaatattaaacatatcactacaattataatcaattaaaaattaagaaattaaatataaaacatcaaaattaaattttaaaaaacaaaaatggaaggcagggctatttggaaaccgaaaccgtgaccagccgacggtcgaaccagttggttcggtgtggtttttaaaaccatggtttttaggaataattctactttaaagaaagcaacaagagaaatttacttgcatggagaaattaatttcttgtaccttatccatttaaactatggaataacaaaagactattgattttgatctagttcatgaattatgtgggtgtgccgacacaagctggggagccaacttgttgacttatatatttcaatatggatctaattataccattggggttgggtgttattgtgacatcccacatcggatagggggaaagttcttgatgctatataagtatgaacttcttttaactctgtaaacgccttttaaagccgtgagggcccctttgggtccaaagcaaacaatatatacaacgttggaagcgggttattacaaatggtatcagagtcgatccccgatcttagtgtagggtttgtttggtctcataagggtgtttgtctgtttggccccataagggtgtttgtttgtttggccccataatcccgtgggatacaataaggatgttgtgtttacatgaggggtgtttgtgacatcccacatcggataggggagaaatttttttacgctatataagtatgaacttctcttaaccctatagatgcgttttaaagtcgtaagggttcctttgggttcaaagcggacaatatctacaccgttgggagaaggtcgttacagttattctccattttttggcttattttgatccatgggtggccatctcctgtccatgccatgttgtgccatattttaccttcgttctttcttcctaatttgatatctttgataataaaaaaatatatgtggaaaaattaaatttgatttgaaaaccttgaaaatattataattattatattaataggaatttccatttagttaagtatgaatatctataaataaaagattatataatattggaataagaaagaataatggaatatattaaaattttaattcttcttaattttatcttcctttataattgcatgtgttattttctctttcaaccttattactccaataaattgataatatctgttctttcaacggatattcgtcttataattcaagccacattaaaacatgatgatatacctcttatgtatggataaactttatctttatataaccacaccaatgaatgacttatagctttcaagtacacaaaaaatgacaaaagaacgtgcatgatctagcaacaagatgtctcattccttgctgggttttcttggtagttgttccccttcacattggatccacataattgacctctctcctaacactacatcttgaattgggaaaatgcaatctgtgtgcgtaattgtttaagaaacgtgccaagaatgtaacatttgcagcaatgaattctatggtactccattatgaagacaagccacatcgtattgaatgattttggaatgaaatcttttagcatgaatgagattcatgtgccatttgcagcaaacatatcacgttgctttgaaaagaaaataaaattcacatggctgatgggcataagaatttagagggaccagtcccgattcgcgttgctttctacctaccttacgcgcattgactaaaattcatggggacatgacaattttcagaaaatgaccagtccacagtccacattgttttctaactacttcacacgcctactaataatgctccaattaacacgtgaccaagacagaaaagtcttgagttaaatgattgatcataaagtttgcagataaaccattttaatattattttggctaactcttcctctgggctggtctctgatggagttgaagatgttcatcagcaatcagattttattgtttttgagcactggccttcatcagatagctatagccagacgattggattcatgccatgcaccaccactgtgcctggaaacatgttccttatctgtgtatgtttcattgatgttgtttgcagccaagctctggtatgatgggagtgaaattctggtggaagttgctagtcctagaatttctggtggggtttttctacctctgctcggctcgcttcttcatgctattatcagctttggtaagattgatttaaaccaatctctctcttcaaatttatcacttctttagaatgtatggttccatttctcaacccatgccatttgttgatttcaaatatctatatctatatctatatatatctatatatatatacatcttctctctcttgcttcagcagtagccattttccagaccgaataccattgacttaaagttcccaattagtcaaaaaataaaaagaaaaatcggtaatatcccaaaacatccaccaatacaatctaattattttttacacactgatagaatgttttattgttggcattttgaagcatccagactatgtaggaacacagaaactgctgaaaatgataaggtgtcagctgggatcggcttgctaactggatcaactgctatgcttctgatgttactaggggatccttcatcatagttggcaagt

SEQ ID NO: 11076 - DNA, 3052 bp, Vitis vinifera
  Intron number 8 from transcript GSVIVT01033319001 (locus G SVIVG01033319001) derived from phytozome v7.0 (chr-ID chr8 ; pos 21547011 to 21550062 reverse strand)
aagatatcgtgtgctcttataccacaggtaggtatatttgactttttgcaattatttcctacctgagaacagtatataatgtgcactggaattccttaagtttcagaacttctacacaaaacaacttcttatctatgctttgagtttttatcttgttgacagcaggagtggcctgttttctgggttttattttactggtattagcatctgaatcatggtagttatggatgaattccctgtgaatcttgcaggcatattttatacttatcacatgctagttgttatagagttgtagttgttgtgtgtcttttttattttttggcatttccatagatcttttcatattttcccttgggcttgaactaagaagataaacaactgataaacttacatggaaggtaaacctctagatttaatgtttctatcctggcataagaaattatattggtttacttaaggctgaagtatttgtcttatgtaagtaggaatttcttaacattatagccttagtttatgctcctcgggtgcaattggaagaaagcattaaatgtcaatttctggggcacatggacagactacttcaaataggcttctatggaggggggaataaaatggtattttatgatgaaacttaggtagccatgaaatcagtatgacacataatgcgatgagctacagaatcttgacatgttattgacacatcaatgcttcaaattcttagaattggagagtagtattcatgctatagatttacaaagctcctgttccagaagcatccatatcatgttggttcaaactaattgttggtgcatttggtgctcactgtatagtacctgtacttggatgtgctccctttttgttaggtggttctaatttcatattcattctttctctttgccataaataaaagagagagagagagagagagaaacaaatagctgctggacccttagaaacacattgcatgtccacatgtccaactccgtgaaatggctagctttgctagaccttacaattcaggagcaccttaggcttagacggtatctacctccttacttgtgaacagttcaattaatttttttccatctcagccctggttgctgctacctgaaacttttattcttcattatttatatctaaccacaagacagaaacaacttctttagaagtgttcttgctacttgggttaataatttcattttttcttttattatgcaagtagtagaatacattaaaatgtgcaagtgggggcacaacccatgtacacagtaggcatatggagagcactacaagaggacaagcaaaggaaaagaagacttaaaaaccacaatccttgcctatcctatcctaaaccatcaatgaaggctaacatggaacaaccctcttaagtccaaccctaatgggtctctggactgctccataagagatttagattctctttctttgaatttctaatcaaaatgttccttttcattaaaaactctttctgatctcttcataggcactggagcaagcatctaggagccaacctccaaacctttctctgcttcttcttgaaaccttttacgtggtaacttaatagaagattccagactgacctgaaagaattcactgaatcctaaaaatagtaaataagaaatcccatatcttacacaaactacatctgtttgccaaatgcaatcctcatctcattaattggtcagtgacacatctcctaactaacctatctgtctgttcttcttgatgattcacagaagtaatatgcttcgtaaatcaacctatcacatataattcccagtcctaaaaaaaccttcaaaatctaggattccaatgtgctattggagtcttggcccttctctatccccccccatatatccaccccacttgcattttggcaaaagtgaaacagtagataccatgtctaacttctcactagtgcattgtaaatattcttcaacctggcaagaccaggctaattaattttattttcttgcatcttgagcctaattagtgccacctgctatttattgtagatgtattcatttgttgttctagccaatcttgtcttgctaagttgctattcatctatttcagcatcccatatgttagttaatctcattttatttgcatatcattttacttaggagcctatatttttttctgagggaccccccaacattctgcactgcaaagcatggatggtcctttagctgttctgtaaaactttttccttccatttgatatgtatacacttatgacacaacacacttgagggatggttccacttcatctatcttgatctatttcaatgggtaacatctaccaaaagaagtgcacatcctatatgtaaaacactaaggttttaatgtaaaattacagacaccatagttattgaagctagatggtaataaaagtacatagatgacattaggggaccagtactccctcaaatctgtataatttgatccattgaattaggcctaaattttatccaattgggttgcctatgatggttttaggctatgtggtcctacagaaatagaaggagctatcaagttcattttctacacctgatgggcgacctatgccaaaactatccgttttatatacattttggttttatacaaaattgtagacatcttatgtattaaatttatgtgttagcaaaggcaaatcaaaacatttgggtccacttactcaaagtctggttatgatggtactatcatctatcttattttaggcccaacatgatctgaagagtcttgtgaagttttcctagaactagttctgggccactgtggcatgcaggtctgctcagctgaaagccttgatgcctattttcaccaatcatagagcttccctggcacgatttgcatgtgaccaactttaatgatattcagctgttatatttgaagtgttcatattatatatatatatatatatatattttttttttaatatttgtgtttagaatagttatgtatagtttgaactaattgtgcaatttgtattttcattcctttcttggatctattgaagctttgctgcactg

SEQ ID NO: 11077 - DNA, 15024 bp, Vitis vinifera
  Intron number 4 from transcript GSVIVT01013979001 (locus G SVIVG01013979001) derived from phytozome v7.0 (chr-ID chr1 6; pos 8387143 to 8402166)
ctccaaggccgatcaagtagaggagattgttgagggcaccccagctgaccaagaaatcgccaaccgttattccagtacttcaaccacctttgaagcctcgatcacagaccttaaggataatgagaataatgacgatttaggttcagaagacattccactcgctagtatatttagtgactggtcccgtccagaagacatttcagtcgatagtatatttaatcagtcgatagaaagggtactttagtcccctttctacacaataataatggttcatttctaggtctctaatgcgtgtataatgagcccctcatgtatttgacgtgtatatcagaggatctgatcatctccaattgtaatacaactctaccgtttgaatggtttgatgaacttataacaactgccccaagtaagtgattcaactctttgaagtactatcccgcaatcacataattcaaccttggagttagattaatttgctgtaagatcgtgacaattcccagcacaattaattgggggaccttgactaattatcacaccacacccacttcttttgctaatgagaaagcatattaccccgaaggtaggaagttggatacgaaaagagctgtaggaagtctgataggaagaattataggatatgtcggatacaacgataggaaaagagttgtaggatatgtcggatacaatggtcacgtacagagggaaaagagctgtaggatgtcggatacaaacagaaggaaaagagtgaaagagatggtgggatcgaaatcgacgtttttatgaaccttttatgattgaaaattgaaatctaattggaacatggaagtgtctttaagtgtcattgtttccttttctattgcaatgatgggcgggccctcctgccttctggcatgtttgttccaataaaagaggtctaacgtcaaggccttcatgcatgctatacttttgaacttttatgactgaattaatatccaccaatcgactatatctttgtcacaccaataaatatggttgtaaaatgatatagaaaactatatgttacaagtcattttatgcctaagagcaacttattggaatgatgtataaatttattagaaacttatttgtcatcaacaaatatgaactcctgaactttaagaaatggttgacaggagattctaatagatggaagtaaccttttagtaagaataggatgagagtcatttttgcaaattcaagttgtagaaatctttttttttttcttcataaaattgaattgaaaatatttttgtaaataaattttggaaagatattagttctttagtaaatagaagtcaaattgaaatatttttttttcaataaagttataaaaattcattctttttctagtaaaagcaaataaaaatcatttttattgtcaaatggagatttttgtaataaattcttttgataaaatgagtgtaaataactttttttgaaaagtgaatacaaataaatttaaatcaaaacacttattgcaaataaattaaaactttttgtttataaataataaaattgaaatcattcattcaaaattgttttttttttaaataaaatcctttgaaatttcttgaaaactaattttttgaaatatcttttttagttaattcaataaatcattttgcgtaactcacttgtcatttattttgtgcattcttgtaattagattttatcatgatctttgtgtatattgatttgtgcctttaatctcggtatccatgattaattaattaattgtcacaattccttttattcatttagtatagaccgtaggtacaagggattagaggagtgttacggtttatcaccataccttcctgataggtaacctaaccctcgaatttagactcggtttttgtagacgtgtcttttccaaataaagagtcacataagactttctttcttattttgtttttgattttttttttaaaactaaaataaatagcgactccaagtctttttctaaagatcaaattttcactaaataaaaaacaagtcttgccattgagtggggacgcatgtgaaaaacaccggtccacaaaatggcgattccactggggatgttttaaagggtcaaacttggacttgagtgagggaaatgtggtgtttgattaattgatcagtggataccctctcattgtgcctgtattgtatatttgcttgttttagggcacataagtgttgacatgatgattattttgtatatatgttgtatatgccttgccacgttttcatattcgcacattttttgagagattcgcctttatcaccttatcattttccctcacgaagcttgagttgaaagtgaatcagggatatttgcctttatcacctgatcactttatttttcacacctcattcattttccggatcactgatagaaattctttagtcacatttgtagccatctcacagtggacacctttatgactttagagtttttgtcatacatccaaatgttgattgtcatcacaagaccacacatcgtgtgttgtgttatttatttattttacttgaggcatcacttcacttacacgttgtgatcatgagacataacccatcatagatgatattgagctttttgacttgcactaaaggcttgacccagggagttcaggattgtgactcacctatttgatgatcagagcagtacctacccactttgcaccctttactcttgcgtgcctatctattttgagccttttgaagcatcatccctcacctcgttattacttggcctttctatccccagttgttctagctttgcacatctcttcttcgatccgaccaagtagagtgtgaggagtatgagccctaggttgatcttgcatggtgagggatgacttatgatctttaggtggcttatggtgtgaggattggtcgattgcctgatgggactatcacttatttttccatgagtatagatattgattcgacatgatgagagttggcttgtgatgagcagttgtgcttgataagatcgtcgtttactttgctttgagaggatcatatttgagattattacgaagcatttgaagtagggtttgacacacgattcctgaggattgaggtggttatatcaaatggacattgatatttggtatcaatcatttgaggatttgagagcatggtgtttaagaccatggttgcaagatgggtgaccctcatttcggttagcttacaccctattacctttattgacatctgaaccattgctagccttttgagctttacatgagcatcatagtttttttttttttcttatagccttactcaccttttacactttggtgtatatatgctttatttaagagtttcataatccatagacttattggctcacattctgcattattttgttattgttcaagcatcattcttcatcatacttcattgtttatatattttgtttcatcttgtccttgttatgatgtttctttccatgccttgagtgataatatttcacatttcagtgcatgaaggacggtcatatccttttccactcccatctcatggacattgttttagagttccttagttgaggcgatcatcttgtaagagagagttcatctacatcattgtttgagtgtgtatccatttcattatgtattcttagtgaagctcatttgttgatatttagagtatgctcaagtaaaagaaaaaaaaaaagcgcatgtatttatatatgtatacaatgtcattttccattgagtttgtatattgtcaattgagagctgtcttttttagtcaattgcttatgagagttcgtatttaagctttcaaaggtcctcatctcctcatgcttatcttgttatgtattatatgtgtgagagatagatgaccttttcctagagacttcggatcattatcttctccatcattacatacattggtgatttgactattctcaatgacttgatttgagtagatcagtgctcattcattttctgttcattcatctatttttctcatggtgtcttattcactttacctacattgttctttgttcatataaatttacattccgtgttcaataatattttctttacatcattcttatacatcccgtcaatattttgatattcttcctctcttctctttcatcattgatatattcatctcaaattctttctttctcatcgatatattcatattgaatgtctttagatctatggctcatgagattctctatacatattgcattttatacacaagggtatggggttgtatcattgggattattgagcctagtttcctttcatttcttcaccatattaccctagcctacgttacgtcccgggtcttaagacaaccctaaggccatgatatcacacattgttttttgatagctctcacatgggcgatacttgggattggttagagagcattttgattatgatggtttgagagttatggtatgaccccacactggggcatagccatctcagagagtttgttggatatgtagccactctattcgatgtattgcattggggcatacccttttcagctagttatggattcttatgacaatttacaccgagacatgttcattcctaaaaggagatcagacatccccttcatattggagtgtgggacgattgagtgatttcatttgatatgactatgtcgggacatacccccctcattggtgttgattggttcttgacaataatatatgggcatattccttttagtcgatggtggtttttgaggcatagttgttccttggaggtgatcagattccttttatattgaagtgtaaggcatgaatgggagagttcatttgatgttcttacacagggacatacctctctcagacaatgataaattttttttttttcggagtatatccctttcattggtattgatggatttttgagatgattggatcaggacataaacccttatgagagcttatagtggattttagtcctctcatggattgccttacgctagatcatagtcttttcattggcaattgatcatagagatacctgtttacattgagacaggatcattttagaacgcattttcattgaggcataccacttttcttgattatccacattggggcattcttattctttagaggagatcagatattcccataatgttatagtatgaggagatttcagagtgtagaaatataatttgacttgatgatgtatgatgaattgtattcctcccgttggtgtttgatttggagatgcttatattggggcataccctactcatcgatgactaattttggaggtatttgttttattagaggcttgcctattttgagaggatgtattcataccggtgcatagccaccttgttgatttttgacattgagacttggctttctgtttatgattgttatctttgatggattatagagatgatgacaccttaggttttaactcctcatcatacctggtttgatttggatgtttgcttatattgcatactcaaaagccccatttttaacaccattacacctacattcatcttgtttgtcagagtcttgtcgttatatcactttgagcctacatatttcatcatcacacatgactttatcccattcttttgatcaaagaaggatgaaaactagttgtgagttttgtaatctacttttcatatgcctttggatattaggttcaacatcttccatgaaggtaggacatgttagattgttgatgtattagtggtgatgttttcacgttaatggttgatgtgttgtgtcttattttgcttgcattttaagacttggaatcttggttagcatttgtttggtatattattttagttttgctttgttagcatagtttatgtgatgcatggtcttatttaagcatttattcattaaggccatatattttcattgcattattgttgagcatatcctagagtgtcttctgtagtgacattatgtgtatcatattgatcactatctcatattaaggcatatcccttctctggatttattagatcttttgttaacgttatagtcgcttgatccatttatagatacttgtgagtcaccatactggggcatacattttttcttattgagtttattatctctgtcactttttttttctgggtttttttgggtgtcttcggttgtaaaccacatttcttggttcttgttttgctttatgtgtttttgattgcagatcgcatttcattcctacttcttcaatttgtgtagggcatccttctatcgtcagtttgtttaagtcatccccattccttcagtttgtttagggcattcctctaccatcagtttgtttagggcatccctattccttcagcttgtttagatcatccctctacagtcaatttgtttagagcatcccccttccttcaacttgtttagggcatccctctctcgttagtttgtttagggtatcctcttttgtttagcttgtttagggtattcccctacagtcagtttctttaaggcatctctcttccttcagcttgtttagggcatcccttttcatcagtttgtttagggcatccccatttcatcaatttatttagagaatccccttaaagttagtttgtttaaggcatctctttgccatcagtttgtttagggcaccccattttcaattatctcaccattatggattagacatccatgggcactccagttatctcactaccatagatttttatctataggcatttgattcagttatctcaccaccaaggatcaaacatccatgggcacttcaatcattttaccaccatagattggacatctatgggcattttagttgactcactactatagattggttatctatgagcctttgagtatcaccaccatagatcagacatctataggcatttcagttgattcactaccacagatttttatctttgggcctttgaaattatcaccaccatagatttttatctatgggctttcgagagtttcaccaccatagattgacatctatgggcatttcagtttcaccaccatagatttacatctatgggcattttagttttcaccatcatagattagatatttatgggcatgtcaaattcaccaccatagaatttcatctatgggccttgattagttttcactaccatagattttcatctgtggaccttgatcaattttcaccaccatagattttcatcaatgggcaattcagattcaccaccatagattttcatctatgggccttgattagttttcaccaccatagataagacatttatgggcatttcagttttcatcaccatagattttcatctatggtccttaatcagttttcaccaccatagatcaaacatctatgggcagttcggttttcaccaccatagatcagacatctatgagcatttcagattcaccataatggatttttatctacgggcattttagattcaccaccataaattttcatttatgggtcttgattagttttcaccaccatgattagacatctatgggcatttcaatctttactaccatagattttcatttatgggcatttgttacaattatttcaccaccatagattttcatctgtgaccttaatcagttttcaccaccatagcttttcatctatggcccttgattagtttcaccacaatggatcagacatccatagacacttcatttatcttaccaccatggattgaacatccatgggcatttaagtgattctcaccaccatagatcagacatctatgacatttcaattgattcaccattgcaaattttcatctttgggtctttgagattatcaccaccacatatttttatttgtgggccttagagagtttcaccaccatagattaacatctatgggcatttaagttgtatcaccaatgtaagtcttcacctatgggccttctagtttagtgtttagagttaggtttttggtttggttttcaaagccattattttctcagtttagtatttagagttggtcttatcattcggaaccataactcttgacattcatgatcactagcattgcatgccttgttctcgtagtttcacattccaccatacttctcactttgttgtgtatgtgcttttcacttcttcatcatactattttggagtttctcctcctccattatgcacgatatagtccttttagctcatacccgagtttcgatcatattgtttaatatcctatgccttgtgtcctcatatagcacacgtacaattttttccttagtatgtgtttgttcttgtgctccttggtagcctggctactactcgactttaacatcgacttttgagtcatttttggagactttttggagggggtccaaattcatagtgtaactttagagacaccttaagagtttccgtttttaccctttttgtagggtttttagagtcattttgttcttgttttagtttaagagagtttgtgtcatattggaacagtaactccaatgcaaggttttattgccttaaaagtggatttcaatgttcactcaataaagaaaaatgcaatcagtaaaatttctttgaactctcttatcatagatgaaaatattgacatatatagatgatatatcgtgtatactataaaaacgatattagatgaagaaatatcgttctgacgaaatttaggaaaaaattgctatatttctcaatatatcggatggtcaaaacatgtcaaatatgttatagtgcgtctactacagtaccatcagttacagtgctcctcaaaaatgctttgtgatttttgttgttaaggggattcaaacctcgaacaaaaggtttgaccttcaactcacgttatcactggagtaagtttgtcccttattaaatatattgcagtaaacataaatattcaaagtaatcatataaagaaaatatttaaaaaaatattttaggtaacaaattaattataattattttataattaaatgcaaaaaatttcttttaattgattatcaaaaatataaaattattatgataattttctttatagtgtttttaatatcattaatagattaattaaatattaaaaaattgtacatatatcacaatttattttatatcatttaatataattgaattaaatggatcataactttaatattaatatatattttaaaattaagcatattataataaaaaataatatttgatataatttaataataaatgtatacttataaaattcatattttttatcgatacatacgatattattatcaaatatgataaattatattatatatcaaattctttaataaaacaattttaaaatatctattatacttctaattacatttttatgaagtttttcttatacatatatttataaattttgatcaattttagacctaccaatatttttttccaaaatatccgtcgatatatttccgatatatccgtaaaatcgaagtaccaatatgttcatcattggttttattcaactcatgaaaagttttctaagcccgtgaattgggctatttttatttgggtattctctaggcccaaatataaataacatgtgagttttggtatattgatgaaaagtggtagagaaaaaaagaagaaaataaggttgcactattctaagtgatgaagggccatgttctttgatcaactttttagagagactcacgtggtatgatttctttattttttggcaatggattctgatctcaagtattaatacatgtttctaatagttatcaaaatgaaaaaactagtgaggatttatttgtatatgacaacatgatcatcagtttgaggagtttttgcgttgtgttgcaggtggaatcaatctcattccaatcttggccactccaaacaacctagcaaaaataacccaagagaaagcccaaattaaacaaggacatattctccatcaatgatcataacccaagcccatgaaccaagtccaaattagattttaaaccaaaactgaacccaaagcccatacaaacaaatgaagcccaaagcaacccaaataacaatcagacaccctgccaatcaaataagccttgcccaggtcttgaaagccctgggaatttggaacaaccatctttatagaaatgaaccttaatgtctcctatattaacatcacaatatgcaatttacactataaaatcctgtttttattagcattaattttgtagtaattacttgcataatcaaattctaattccattagtatcaattcatgaagttctaattttgcattacttttttcttatacaaatctaagaaaaattaaattctaagtccattattatatattcaatttcataccaatcaccctataagaatcaaatcttaatcatttaaatttatgaaaaaaaactttaactatttataagtatattttaggaaataaactctaacttcattaatttctagaattgtaagacaatttatgtaataaaaattttatgatttttttttaaatgatcaaaatagtgaaaaagtacatttacttttaaggtaagtttttacttaaatcagattttatcttttgtaaatataactaaagatattattataaattttatataaaaaaggcaaatatgagtcacaataaaacagattgttggtttatctttccttttaacaatgttataaaaattgaactaatcattaaattggaaaattttccaatttacagtttagtagtccaaccaatagaacctataatcaaatcgaattcaaatcgatgacgttataaatatataatttatatattatcacatttttaaataattataaaaatttaaaatatatataaataaattaaaggtaaataataaaggatatgacattttttttaacccagtctattatcaccctaagagaatacttgtaatcaattggtgtagtatacgattgtttatctgagacctatccttactttatttctccctttacccattccctctctctttctcaccattttcccatcttcacccactgcatcctcccctcccaccgccctcactccacccccacaccacccatgactctttccatctccatgatttgctgcaaattagggtgaattggatgtaatttctcttattaggacaagatgacggaagcaactaggccaagtacaaactttaatttgtttgaatgacacggaaagagtaggtaattatctttttgtctaagaacagaaaattgacataaatgagagaagtgagattaaatattaacgtaaattatatgagtaaaaaatcaattttgggtcccctcaacccaagaaaatatacgcagtagtcatgtttttaaattattgttcaaaatgtcatagcatgtgtagaagggatggtttgaccgtatacgatataacatgttatatgattagttaaacccttgtacgataaaccgctttttgacatgaaattaagggaagtgggggtggggctctccatgcgccctcttggagttgcttgactccaaaattgacttttttactttgaaaatttggatcgaacaccattcttgatgttgaaagtttgagattattattttaaaaatatcaagaaatcaaaatcttaccttccaagagttatgagattcattgttagcttttaccaggcggttgggaaagcttagctgacactatctgccacagaggaaaactccgcctaacatatgcaatgggacccagcatcctaaggcgtatgttcaacccagcaatgggaaatcacaaatatgtttgacccaccgtgctttccagataagggtctccaatttagtttgaaccgaaaaggagtaattaagcccgcctaacatatgcaatgggacccagcatcctaaggcgaacgtatgttcaacccagcaatggataaaaattggtttatattaactgtattattatttttatatatacttaaacttttataaatttttttactagaaaaataaactgacactttttattgaatttattaatgaatttaataattttttaaaataatttaaaactaaaaaataaatataatcattaaaaaaaactaagaaaggaaatttgatataccatgagtcatgactttactatttatcctatacacatagctatttaaaaaaaatactaagtaaatatattataaattaattaaatataattaatatttttaattttttaacaaatcctttgatttttatgaatactttgtaataaaaaactaatctaattaattatagattaaatcaaaatattatataatattatatttaaaattaagtactaaatgtgtgcatatgtaataaaaaaacttaactcatttatatatttaaaaaattaaaactttattcattatccattttaagtaaaatattattgacaattagtattattcatttttaataaaaaaaaatacaaagatgttaatatcttatggtaacgaattttgagtgtgggcaaccatcgtctccatcagtttatctcccagggttctacatcgagtgtggggcaaccatcgtctacatcagttttatctcccgggggtttttgggtattgccagcgtgaaagcctcatggcctgggcaatgcagtcaaatgcacgaagtgtagaagtccatggaagcgtcatacatgggtgcaatgttggtgaaagctaaataccaacccaaacaaaattatttactaaaataatttcatacttattaattctcggaatcaatacggttctgggtttgacatatcatctccaaataagaggtttttcaaagttcaaactagccgtgtaagttaaaaaaaagccccacatgggctttttttttacttaaacggctattttaaaaaataattcttagaaatgatactttgaaaaataattcttaaaatatagtactttgaaaaataattctaaatctatggtactttttgccattttaaaagtgtttattaaagagacaccttttttattattcatattgaccataaatgttaaagaaaaattgaatttacaccgaaggtatctattcaatagacacctttcataattccataaaattgaatttatattaaagacatctcttcaaaagacattttttcataattttttttattaatcatacatgttaaaaaaaattgaatttatactaaaaaaatatcatttccacaatactataaaatcaaattaatactaaaggtgtctctagaaaaggcatctttgataatttttatatcagttacacagtgaaaaaaatttaatttacattgaaggagtcttaacaattccacaaaattgagtttatactaaatgtgtcttttgaagaaacacttttcataatttttatattagtgacctataaaaaaaattaaatttatactaaaagtgtcttttgaaggaaaacctttcaatataaatttaattttatagaatcgtaaaatgtgtcttttgaaaatacacttttagtataaattcaattatttcaatggataactgatacaagaattgttgaaagtgcctcttcaagaaatacttttaatataaatttaattttgtaaaattgtaaaaatgtgtcttaagaagacatctttaatataaattcaattttttttattatgcaactgatatgaaaactatgaaaatgtctattaaaagacacttttaatataaatttgattttgtaaaattataaaaggcgtctcttgaaaaaacacttttaatgtgaattcaaatttttttaacatgtgttattgatataaaaattatggaaggtgtctctttcaatataaattcaattttttgaacatgtatcatttatataaaaatgatatagaatatgtctttttaataaacatctttcaaagtggcaaaaagtgcagtagatttgaaattattttttaaagtacaattttttaagaattattttttaaaatagccgtataagtgaaaaaaaaaaagccccaaataagccgaatttttctttccaaaaaaattattatttttcctgatacaaactttaccatgagagagagagtaagtgaaagagaaaggatgtgatttttctcctgaaaggaggacacgtctacagactgatgaaccaaggacggcaccgaatccctttgactttcctctttccttactcatccatctttctctatgttttatatatattattctcaaaagactctttacatacttccttcttcacatcttcatattttcctaatctccatttttctatggaaaatgggaagagcaccatgctgtgacaaaaatgggttgaagaaagggccatggactgtagaggaagatcagaaatccccccattataaagaacaggtttgtgttatagcaacgtcatgtgccctcttatatcttcaaggtctcaaatttcaatgattctttgttgatttgtttgtaatgttcagcgtggaaaatttacgtggttttcttacatcttaatttgcagggaaatagacaatgagaagagatcgatggtcaccggttgaagacggcaaactctctcgatatatagagagaaatggtggtgagccaagctcctgggaaaatgtcccaagggatgcggagctgagtttgaggactgcgaagagttgtaagctaaggtggaacaccaagctgaggaaagatatcaacgaaaatcccttatctgcagaggaaaaagccaccattatccgattccaaaagcagcatggcaataagtaattatcgtcttgttcgcatcttttttctagctattagggtttggggtttagagtttactgtacttaaaaggagcttgtgttggcttttcaggtgggaagaagtagcaaggctcctgcaagggagaacggctactatgataaaaaatttctggaatgcccttcagaagaagctttcgaaaaaagacacacaagtttctcccaggaacccagttgggatcgctttcggagctacgagtagtcctgatgcaagttccattcctgctccggtttcagcctcactggagccctccaaggccgatcaaggagtggagatcgtcgaggacaccccagctgaaaaatatagtgactatttctt

SEQ ID NO: 11078 - DNA, 6656 bp, Vitis vinifera
  Intron number 16 from transcript GSVIVT01018298001 (locus GSVIVG01018298001) derived from phytozome v7.0 (chr-ID chr 15; pos 11567017 to 11573672)
gtctaaaacatttgcaccaaattggtgagtctctctctctctctctctctctctcacacacacacacacacacataattattgagattctatgcaatcatatctccaaaggcaaacttgagcttaagttaccaaatattttatacacaggcatttactgatcccatagagttgtgagtcttaatatgtgcatcacaactccattattttttggaagagaagctacataacatttcttgtgtggttatcatgaattgtgggtaaatccatattgtaggatattgcaaggccatctaatattttagtaagtttggcatgtattctaatgtcaattcttgaattgtatcatttgttgttaatagtattttttcaagctaaaatatttaggaattccctcctctcttcaatgtacaggggaaaaaaaccccaaaagaccaattttgaacaggaaatatggggaatgaaaccatttgatggagctttctggttttgatcttagaaggtagtcacattttgatactattgtcctaaaatgtagtttctttgaagttcttaattgcttttcattcttggaaggtcttcacccaagttttgtcagttctttttaattttgataaggcatcaatcaggatttcaattatggctggaaccttctggtttagcctttggttttgctctcataggctgcatgttaatgtttcagcagtgatagattatcagttctgacattggaacacctagagtactctaaatctgcccataactggcaactgtcaaaatcataacctattaacattccctatgtgctcatattttggtttaactcatcagttgctttgagaattcatgtgttttggtacattcagatgtgattttttttttttttttttttgatgggttacattcagatgtaaattttgaaaatgggcaccaccagtttcctacctaaagtggttgccacctgctaaccttagtttgttcaatctccctgttgccacttgtaatctgtgttttctcatctttactattgtttgtcctatttgagcttcctactgatctaaataagtacgtattaagttttgtatttttctttaaccttcactatcagtctgttatcaaagcctgcctggttagatattcctctctatttgatattgacccttggagaagagggcctctaatagtcacaacacaaatagacatggtttctaaaaatttgcgatacacgatatgatacattttttatggaaatcaatatgtattgcctttcatatcttatcttaaacaatcctacaattcacatacaatactaatacttttatttaatatattagtttttttttttagatttttttttttttttttctatggggaagaaatggtgatgaacatggaaatttgaactttattgatgagatataaagacatatatatcaacacaaatagatattcctttttagaatttggaactaaaaattaaatctaaaattttaaaaagttcatttttatggattttgtgatgaacctatatatgaattttgttgaattgaacttttcaaaattcttgtattcaatgttttcatatggtatgatatagttttctttaaatcctactatttttaatgaaattggttatatattattctatacttcatgcttcaatatatatgcttcaatagaatttttttgtcttggctttctctaaacaatactcatccttatgtgtatcctttctctcttttattgcaatcaatgtttttttccctgtaaatcaaataataatatcataagatgttaagtggagatttagactttaatatactggccaaccctgttccaactatttgctttagatttgtagattaaattataatctaagtttgggatttattaccacaagctttcaatactgccatcaattctctatgaattgacgccaattcctgagaagctaattggtggcgggagtgaggcccaaatgaatcttggctaagatcagttagtgggtaggctctttaaagataccttcagtctcatctttagagcagtggggggtatctatcaggctataggataaagggcaaaagtggagatggggttctggtctctcatttgctgttcgctgacaatacgctggtcttttgtgaggcttcccaagatcagatggcttattgaagctggttgttgatgtggtttgaagccatctcaggtttgagaatcaatttggataagagtgaaattttgccagtagggagagtagagaatctagaggctttggctcttgagtttggttgtaaagtggggaggctcccaacttcttacttggggcttccattgggtgcgcaacacaagtccgtggctgtttgggatggggtggagaagagattttggaaaaggcaatttatctctaaaggagggagaatcactctgattcgtagtactttgtatagtatgcccatctacttgatgtctttattgcgtattccaagagtggttagattaagattagagcaaattcaaagggattttttgtgagaagggagagctttggagaggaagcctcaacttgtaaagtgggataccatctgtttggacaaaaggaagggcagtttgggagttagacgtctttctactctcaatagggcccttttatataaatggaactggcattttgcgaataaaagggagactccttggaagcatgttattagtaagaagtttggggaggaagaagggggctggtgtactagggaagtgagggaggggtttggtgtgggattttggaaggaaatcaaggaggaagggtctcttttgcaaaacgaagttgtattttctatgggggatggtagaagagtaaaatcttggaaagacaaatggtgtgggaacattgctctttgtgattctttcccctctttgtatgccgtagcagcttttaaagaggcttggttagtggagttgtgggactcatcgggagaggaagggggttggagtcctaggttctctaggcccttcaatgattgggaagtggaggaggtggagaggttacttgtgacaatacaaagaaggaggcttattcctaatttggaagatagggtgctgttcagtttccaaagagcatcatttggagcccttgtgttcctactaaagtgggttttttttgcttaggaagcctcttggagtaaggtgttaactttggatcaacttaaaaagagggggtggactttagctaatagatgcttcctttgttgtgcggaagaagagtctattgatcatattctacttcattgcaccaaggcaagagttttatgggagttattgtttgctctttttggcgtaatgtgggtccttccttcttcggttagagatacccttcttggttgacgtggtatcaacatgggcaagaagcgtagtaaggtgtggatggcagcccccttatgtcttgtggtttggaaggaaagagatagaattgtttttgaaaatgagaagctttcgattcataggatgaaaaattcttttgtatgtaatttttggtttgggactaagtcgactatagatgaaggacctcttcctttaatcagcttttttgattggttgggttctagatgagagctggtgattttttgtatcccctcttctttttgttcttgctttttggtgcctcttgtataccccctgtatgctttgagtcagccttaaggtgccctttcttctaatatattttttttgtgcgttaacttatcaaaaaaaaataataataatgtttatgtagatgcaaaatagtaaatagatactaaagaaattagaattcaaaatccatggactataaagacaaacagacttctcatgcaaaatacacttctgaggaacctagaatgaaaaaatttatcttttctcaggaaccttgaatggaaaaactcaactttccctttcctagaaaccttgaataaaaaaacccaatttacaaagtacatatggggaaaaaccctacatgcccatgcaatgattataggctaaatcaaagcttagtgatattccccatagatgagtcacatggttattatgttggacatctgggcaaggctataacatcagactctctccaccatccttttccttttctttccttttcttttcttttctttttttttttttttttgttcttggatttttgtgtttcttttttttcccaaatatatgttatacccaaggttttcaaaacttggcgttctgttttttttttctttagtttttttttttctttagtttttttttcttttattggtcaaaacattcatgataaattacaatcaggcaactaactcgtgaaaatctaaaaccaattggtcaatttgttcaattttttaaaactttacttttgaccttcattcaattcataaacagggttagtgtcttacaaaagtacctctgctttcatttaacattgttgtcccttcatatttccaagtcttttataaggtgaatttcctttatcttttcattttatataagaaatagtaaccgtattaacaaaaatgtgtgtaagttgtggagattgaaaggtagaggtgacttctaaactgggattttttttttcctgaggagaaaaacaaatgagaaatccttcccttgtaacaaaactgtacataagtctgatcaagagcaagaaaatataacatcagtatgcagggaggtggaaagtccctcacagaagagatcgaatgtttgacatacaaaatggtttggtcatgtcaattataatctcctcatcagcttattcatatgttcaatcatttgggaaaatggggacatgggcatgattattagatgtatctcaacaatcagggtttcaattctcttaaatgaaagaactctaaaggtgttttcaacagttccttgttctgtggcaggagacccattatcttcattcctttttattattgtcccggtgacttgtaaactttaaaagtcagggtgtgcttaatcctgtttggtcaagaggtgaatggggaaggatgcctataggtcagcattcagcacctaattttggttactaggttggggaactgcaatctatttatttgggttttccttagaggcctctcttaaggtgaagaccattgtaaaactcattgatggagagataacaaatgaggttgaaaatgtggaagagacggtattttgaaaggagtgagaatcaatcttatcaaaagcattcaatcaagctttgctagtttgcttttggtttgcatcttctatcccattaatcccaaaaaaaaaaaaaaaaaaaaaaaagaaaagggaaaatggaaagctgatatcatcgaggaggggaagaggttgcatcctgtagacctggtggaataagccattaaaaacttgagccctctaaatcaagctcaatcaaggaacaagtgtggagactttttatcagagaggtatctatggaggaaagtagtgggaaaatgtggacaaagagggggctggttctcccaggaggtttgggggttttatcataatggtttcttgaggaatatcggaagggcgagggcatcttccagtttattttctgcagagtagggatgactagaggttaaggttatgggatgatttcctctctggttacagatgctagggccactttcaatgaagatttacttggaaattcagtgatcaaggaatggacatggtttatttctttctggaaagttgactaggatggttcattttcaattaagtctgtgaatcccagatgttgacagaaattttcagaaaatcaagggggaccacgccccccctcctctctctttcttcccatgctcagcggtttttgaaggaagtttcacaattgatcacataatgaagaggaggaaaatgcttaaaaactactgctgtatatacaaaaaggtttaagaactgccaatcatctaccattatgttgttagttggcgagggttattgtctctgcctttcatactaatttggggtaagatgagtatgttgaaattgatgcaggagttgttggcttggtggcacaggacaaaagggtctgtgggacagccttttatgtgttctttggtgtatataaaaggtctattgaagaaattttgatgggttaaagttcagtatagaagcttaaggagattatcttacaaactttatatgtggacaagggaagctattgtgaataggagagtttcatttctattgacacaacatgggagtccaagttcaggaatgatttgccgatttcttctttttgttccagatttttcttcattggatcaaaccatatacttcccatgtgcatggcttatacacccactttgatgtgcatttaatataattctgattatttatcaaaaaagaaaagaaaattaaaaaatatgtcaatgcagggaaggacaaatattatagtaaatgcaattgtatgatcattttgtttattataaaaaatatttgttatttacagattataaaaaaaaataccttatttacgcattaaagcatttgtcttcatttatattcttggttcgtagttctattgtgtctgtattctgtattccttagatgttgcttcatttcaattgacttgtcttttgtgtttgctgtaaagaactaacatgatagttttgacaggccattccaccaacgatactg

SEQ ID NO: 11079 - DNA, 1428 bp, Vitis vinifera
  Intron number 1 from transcript GSVIVT01036719001 (locus G SVIVG01036719001) derived from phytozome v7.0 (chr-ID chr1 9; pos 23354142 to 23355569)
ccgttctccgaccctccgctgtcctcactcgccaggtactcaactaccgccacctacctccacctctctctgtctctctatctgtataaatctctctcactcgaactccctcagtctcacactcaatcactgtagcaaactcctcatatgtaaatctcagtctcggtctcgatgttgaacttgttctgctgtttatcggtgatttttggtggcgcattgtgtgaaattgcatatttgttgttgttgattgtttcttgattttcacgaccaccacatctatgtcttcgcactcatatactcactctctctctctctctctcactgtagcgcgctgcgacatgtaatctcgatcccaatctgagttttcaatggtttcatttcactgttgctgcagattagctcgatctgtttgtttgattgtttgttttttttaaatttttttttttttttgctgtttattggtgattttgattagcacattgtgtgatttcccccctgttattgattgtttcttggttttcataatggagctaagaatgtatgtatgctccaaatctcacttgcagtgcctcaaacacactgaagtgtccagagatgtaaacacagttccattccaattttgatgatctcagtttgactttttttttttgctgtgtattggtggtttttatttgcagattgtgtgaattttctattttcatcgtttgattgttttttgatttcataattgagctgaatgtgtatttttgctgttgaattcaaatattcaatagattgccgttgaatataaatctcacttgcagtcccatagacacagacactcaccactggggctaagttcatatatgtcatcacaatctcaatctcagttttgataataacaattcaatattttttcgtgctgcttttggcaattttaatttgctagttgtgctgattgactactttctttttttggttgtttgttttttttatttttcacaactgagatgtgaatgtatgtgtcttctgttatattctgtagattttgttctattttttgatgagcaatgctatttattacaaatgtcttcaccaagtagattttctgctattcagggggcatttgggcaggaatatcatttttttcccttttagtactttctgggtactctgtgagtgtactcacactgtatagtgaatacctctgcattttttttgcgaaatactctgttctttatactgtactccatgtagtgcacgaataaaagaaagatatgatgattatctcagccattgatgtcttatttagcaattttcttttatgattgtttgcctcatcttgatactaaggtgaatttgtttcatgttctagaaattgttttcaattcatattccaaatgtgcaaattcatctgattgaaagagggtttttgatgatcagataagc

SEQ ID NO: 11080 - DNA, 3376 bp, Vitis vinifera
  Intron number 1 from transcript GSVIVT01033177001 (locus G SVIVG01033177001) derived from phytozome v7.0 (chr-ID chr4 ; pos 8999370 to 9002745)
tctggagtctgcctcactcattcacccctagtcaggtaactcttcatcatcttcactcttgtatttactcctttttgctagcaaaaataatcaccaaaaatataaaaattaacccaaatagatcataattcttgtggaaatttttaggaaactagttttttttttttcctttttcaatccttcaaatcaaatcaagcccttaatttttctcttctttttttctttttcccatattttaatttaatcctaatgttttaaaaaataatattaatcttagactatgctcaaatattaaattactcattttgttgtatgaattttgcacccttttttaaataataaaaaaagtataacaatcaatacctattaaaaatcagtatcaaatgttatatatatatatatatatatatatatatatatattgatcgtattgtatatacattgattctatttatttatattttatttttataaactcgtgatctatattttaaggggaaacaaatatcccaagaatcccaccattttccaaaaatttaaagatgaattgagaccttgaaaagagtgatctttgcgattttgttttgcctttttattttttaagactatttatggaaaatgcaagagatggatctgtgatggggtccccttagcatgtgatggctcatctttttgtactggaggatgagtcatgtgtttgtgcgcttgtggtctgtcaccgtcaccccaggggaatcttcgcttctggatgcgcccaaaattataccacttgcgcagaacttggtccacaaatcacaagaagcaaaattccacctcgtcccaacatttgctttaagctacagcggttcacatggggcatgctcctccataaatctgtcctctgtcaattgtgatatcttacctaaagagataagaaaattatttattatttagatataaattttaaaaattaatattatttttttatataataaaaatatactttttaaaaaaatcacatatcaaattattattctaaaatcactaagtgattttttatcctttaaaaaatatttttcaaaaatttctcacatatataatttttataagataatacaataaggttattgatttatccataaatgaataatttattactatatcgataaataaatatttattaatttataaaaaatattatgtttctactatataatatttttttatgtacgatttacaattttaaaaactataaatgtgataaaaagttaatacataagagagtctaaaagttaaaatataattccccattgcaaaagataaaaacactcctaaaaagaatatatatggtgtcaaaatttaatatccaaaaaataaaaaggtttcaaatatgtgataattccgaaaatgaatgaattcataaactcaatattttttatttatttcatcaattattaatttattttttgtagacccttaaaaattttaaaaatattattatttatgcatttaataatattattaatttagtacattgactcaagttaaaactagaaaattttattattttagtaaggttattaattcatcaaaaattcatttatcaacattttactatatttttaaacatgaaaatgtacttatgataacatttttttaatattttcatgtgtttttaataaataattttccaaaattatttatttttctttatataagaatattcaagtaaaataatgaaacattattctcaagacataaaatccaatccaacataccatgtgaaagtataattctcccaagttttttaataatgtgtcttttatcttgtcaccacctttggcattaaagtaatggtgcgtgtttaaatattaggccttagtttaagacgaaataattttgttgtataaggctacatataatattaaaaagtagtgattttgtttcacaagcccaattgataatattacaaaattaaaataggcgtgctaaccctatgaaattagtggaactactaaggaagaaaagacttaaaatattatagttatattaagggtagtcatcatgtgatttagattcgtgtttataatcgattcaaaaatagagtgaaatttgatttaaattcgtttgtaatcaagtcaagaacaaagtaaaattgattggtctttttataatttaaattgattttaagttaaattatatttaaattgttgagttaaaatttattacttaatttttattttaattattaagattatttaataaaattaatttaaaatttattataaatcttcaaattaatatatttattctcataaattataattagggtaaaaaaatgtctaataacaatggagatcgtgcaatggtaaaagaaattgtaaagataagtaaaacaaataaaaataagaaaataaaattaagatatggatttaagaataaattaattggttttatttattatttaaaattattttttatattaagttttaccgttaagttattttatcaaacatacttagtttacttaataacttaaattaaattattaaattatttaataacttaaattaagttattaaattacttaataacttaagttatgaaacacccactaaatcccaatataaaaacatgtcaataaaagttaactcagtaaacattaatcacaatcatgatttgattccccactacatcaataagaaatgcttaaaaattcagaaaagtatatgatttcagaaaaagcaaaatcaacatcctcacatgtcacccatgggatacttatgtaggagagagagagagagagagagagagagagagagagagagtaggctcatctcataaagttgaatgagcacggaatcttaaagaaaatgacaagatatcggcatatgaccattagtgtagtgaaggctattcttcacaaactttgcttctaattcttttcattttcttgaactttgattaaatcggagtcacgctgaccaagttggacacgtttcttatcagattagcattagtcctgctccgcgactaacatatttcctaactcttattacattttttttatataattaaaaatactatattgatataatcaaattaaatttagtgataataaatttaattgaatatattaattgatattaattaactttttctatttacgtaaaaaacaagtatcatctagttaagcattttgtatgctacccaaaccataaaaaaggaaaaattaccactttgttggaatggcagccgtgaaattcctagtctagagttgggcaatttctttagattctcacataaaaggccgctcaatctcagatccaatccagccgaaaagtaatcataattaagcattttgtatgcgtttggcaggcgagaaagagaaagaaag

SEQ ID NO: 11081 - DNA, 3204 bp, Vitis vinifera
  Intron number 8 from transcript GSVIVT01014249001 (locus G SVIVG01014249001) derived from phytozome v7.0 (chr-ID chr1 9; pos 2006583 to 2009786)
ttctcccacaattcaaacgcaacacttcctattaggtatttcccacaatttaagcacaacacttcctattaggtatttatttagttattttttcctcttttgatattttttaatcaaaaacaaatatttcattaccatgaaacaagtacaacgaaggatgaaaaaatccttctcccataatgcaatctatacataaatttgatcagaattagaagacactatactactctcgaaggcaaaggtcattgcacaactgaaagttgttgcagttactgtagcaccatcaagatttaatttgatgcaagccattataggagtcgtccatataaggagtgtccttggctcacctagcagatctgcatactaggttgcaatctagcaaaacaattctcaaaggggtgcccatgcatgttgcactagctgacgcccaaaagaaggggggaaattaaatctcacattagactccaaattcttccatttgccctcaaaaaccttgcatttctctcttgccaaatagtcccaattaatgtgagactagcaataaactggattgacttaccccttggaagacatccaaaaccctgctaagaaatggtttacatttccactatatgctcctaggtggaacccaattaaatctggcaactttgaacaacctatgctataatgtcaatgtactcaacaatgtaacaaaaggatggtccactattttcctactcttacacgacattttgctctagactaacagctttgtaaggtcgtcttatttgcagcaagccattggttttaaccttcctgttttcgcaggtcatgtgaaggccttaactttcagtgaagttttagatttttaaattaagtttgcaaagttttagattttgaaattaagtttgcaggaaaaaaggaacattagatggtggagaaagggttttaaagattgaatggactgatgagataatgagatgattttaaacatgaaaccttcacgtcaagggaagtggatgataacacacacaaactacagttgacgcaaagagaataggtttctcaataagtgaagataataaaattagaccttaagaaaacaggaatctcaagagatgcaagaatctcttgccatcaccactctatagcggtttgggaattgaatgcaaaatggttgatcacaacaagtatattccagaaaatgaatttttatacatcacaacaagtgtattctggaaaatgaaattttgtaccatcacccaggattaaccggtgaaacaagagaaatcaaagaatacttgtggaatggccttttgaggagtatttggctaaattcattaatttattgtgctgggtcataactgtcatctgataatattcatatctccaaagacatagcctgttcaaccaaatgaatggttgtcataacctgtgtgcaattagtcactggtacgagttggtagagcatccacaaattctaacttcccatttatttgatctatttgaatttggtagattggcgttgttttctttccatgataatggaaaccatgctttgctctgatatcattagtagattatggatcattatcgttcattgccaaacctagaaatcaaaccatgctttgctctgatataattagtagattatggatcattattgttcatccccaaacctagaaatcagggtttctatgacctgtgtatgacacatcaatataaattcatgtacacattatagaagatcctggcaatgagaaatgaattttttggcaggcgtgtgttcgactcatccccatccccatcttaatgaaaacaaaatgcatttatatttatttttgatttaccatttttttggtcaagctgagttaatttaaaaagtttctcctctgtttctttctcctgtgacatcttcctcaatcctcacgcaattattaaacctagctgtggccaattcttaaattcatcaagtgtggaatgtgtttgggaggggggattgaatctgaatgttatgtgactaagtcaatatgggaaactgttggtaagctataattttgtccaagcctgggatggccaaactcatggactgacttatggaagattcttgatatttcacatgataagttacccccttatcttcttcttttggggaaaaaaataatgtaacaaaagaagaagaatgtcacagttttgatagccattggattaaggagattttcaagagttaggaaacacatataatggtttcaactaataggaattgctgtgaaaaccatcattaaagatcttatcaagaaaaaaatatttttttcttgatgccttatgtgcttttcactcatatcaggttggcaccttgccatatagttcaatttatgaagaattctcaagcagcctggaaacaagactacctctaaagtggtatgtggcccatctctgaggagatcatctccagttcccttgctgttttggttgcctaatccattctccttataaagggaatggatagacttcttatcacggttctaaagttcgatgactggttataatatagtcagttgaatttggatttcaatggcagctggatttgaactgggttggttagaaaaaaatttgtcatatttatttttgttcagggaatcatctcattttaataatttcatcatttcatctgaaagctcggagtgtcaaatttctaaaatttgatgaaaaaataataataaaagtagattctcttgttgtcagacactggtcactggtttcgaaaatctggattggcactgaaaaatatggagccatcaattattgtaatagaatgccttgctcggctacacttcctttattatgggcttgatgatgctttcaattatgatgaccttttgggcttgggtcaagtatccaaaagcaaaatcagaggtgattgggtgtttagggatgagtggattagaaaagcacttagaaacatacaataaaattgtattttgtaattcaatcagttagatatggtttacgaattctattttttgtcaatttctgagaactaaattgcacaatcttttgctatatattattgttcattacaattttgttctaagctgtagagttggatatccttgccatttcatgtgataacattttattaaattttgagaaagaactgatgtaccccctcttttttgctttttctcagattgagggctagtgttctggagcattttgatcgtg

SEQ ID NO: 11082 - DNA, 3389 bp, Vitis vinifera
  Intron number 7 from transcript GSVIVT01024519001 (locus G SVIVG01024519001) derived from phytozome v7.0 (chr-ID chr6 ; pos 9341745 to 9345133)
gctaatagtgctcgtgaagaatcccacaggtttttcagctcttttttgttgatagatatttgaatgattcattgttgtctccatacccattaaaatgttatcactaattccatgtttgtgattacatcattgtacgccttgttgaagtataattttccttagtttcctattttttttaaggatttgtgcttgtgaattgtgatcacctatgtttgcctcttgtccttttttaggacattttcattgctggatctacaaaggagtcttctctccagttggttgaaataaaaacatcttgtagtcttcagttatttgaaaaaagtatgttatgatatatattagtactggttgacgggataggatataatatgtatatcctaagatatcatatctcatcagataggaaatgcatatcttaggatgtgattttcaattagatatgatgtccgtagatattatatccaatggacatgatatcttaagttagtatatccaataggatatgttatgttatgcttatatttagtttgtgaaatgaataaaaaaataacatggaatatatattatttttcaatatttaaaataaaaattatattacactccaaattatattacgctttatgagtaaattttttttacattatgttattcaatatataataataaataatacacatattaatattattttataatatattttttagttcttctcacaaatttaattttataataaaaaaatttatttttatttttttgatagacaaagagaacgtatattaataagagaaatgccaaaaaagcgctcaaagtacacaaagagtataaaataggtgcctaagatgcgataaaaaatcaaagagggacaacaagaaacaatacccctcgataaggccttatcaaattcacaaaatttacaatagaagaagggccaaaaactataaatgaattggaccacactcaaagattacacaaaattcatttttttttttttttaaaaggaagcaattttgactcaactcacgatatcaatcttcataaaaaactattttccctttaaaaaaaaagttgtgattctaggtttttttttattttttttatttttataaaatacagtttttcacttaaaaagcaagtctcgccattggttgggggacgcacgtgaagaatgcaggtccacacctgactccaaatacttgtacaaggatttaacaaaaaaatttccatcctttgcccttgtccacaccaactcatcctcctcccaacacaccttccacccttgcaacctcaagatgaatcattccacaatatctacttcccaatcattgagtcgcctagagaattggggtgcctaacaaccctcatcagatgaagaaaaccaaacctcctccacctaagcctccttaggggtggtgagtacaaataaagagggaaaatatgtccttaaagatttgtctccgcacaacttgtctgtccaaaatctcaccctcccctcattgtccattgaataagcaactctactactcaaaatgtcccaatccttgcaaatggttttccataatcctaccttacacccatctctcacttcttgatatcaccactcagcatcttcttccccatatttaccactgattactttttgccaaaaggtccttcctttcctctctttcctccacataatgccaacttcatttgcaaagcaaggctctattggaggatgataaatttctcaccttaaacctttttttcttttgtttgagcatatgatgacccactttaccaaatgaggttttcgttccatggcccctcctccctagggaaaatccctttgattttgcttcaacctcagcttgagtgtcctcaggatacaaaaaaaggatgtcaaatagataggtatgctagaaagggtgctacaaatcaatacaagtcttcctcctttggaaatgtattgacttttccacaacactagtcttttatgaaacccctcctctaaaccgtcccaaaccgaaattgacttaaaaagagtacctaacaaaaaatctaagtatgaagaggggagggcatcgtagggaaatggttgtggaggtaccctagagagggttcaactctatggcatcaggttattttaaacatttatgaatcacactctaatggttgggatgccaacattatagtcagatggtcacatcgttgtccttggaagactattgcacaagtctttcaggagttttccaagtttactcgatttgtgataggagatggggaaagaattcggttatgggaagacttttggtggggggaccaacctttgggatcccaatatccaagactatttagagtagtcatgaataaaaatatttctgtttctttaatacttggttctactcatcccttctcttggaagtttaatttccgccgtaacctttccgattctgagatagaagatttagaaggccccatgcggtcacttgatggtttgcatttttcaccttcgggttcagatgcgagatcctggtccttatcttctttagggctttttgcagtcaaatatttctttcttgccttatcccaattttccggttctacttcagttttccctactaagttcgtttggaattctcaagttcccttcaaagtcaagtcctttgtctggttagtggcacacaagaaggtaaatactaatgacttgctataattgagaataccctataaagctcttagtcctgatatttgtaaactgtgcatgaagcatggagaatcaacagatcatcttttcttacattgttctttgatgatggggttgtggcacatattatttcagttaaccaagacggattgggttcccccgaggagcatttctgacatgctgtacatcaattataatggtttcagtttatctaagagagggatagttttgtggcaagctgcgtgcattgctttaatttgggttgtgtggtcggaaagaaatgcaaggatttttgaggataaagcaaggatttcagagaatctttggggctctattcatttccttgcttctctttgggctttttgttccgaggttcttaaggggattccccttaacgtgttagaacttgattgactagcggtgtgtaattccaatgggttggtctaatctagagagtttgtttgtttttaccttgtattttcctgtttttgtattattttagtttagttttctttggtgggaggattcctcatccttctcttgtacttcttttttctatcaatatatccatttgtcgtttcctatcaaaaaaaaaaaaaaaaaaaaaaaaactatacctttttccatcttattgcttgaccaggacttgtcatgaagtcatgtgtcactgactcttttacttgtttcagaatttttataagag

SEQ ID NO: 11083 - DNA, 2667 bp, Vitis vinifera
  Intron number 10 from transcript GSVIVT01020780001 (locus GSVIVG01020780001) derived from phytozome v7.0 (chr-ID chr 12; pos 2090951 to 2093617)
aagaaagaagcctgtaagcactatacttctgtgttttggatggctactgttgtgagttagtataaacctatgagttccacataacatgcacatatgcaaactatgtagatccactcctcacttatgtaacatctaaaactatccccacaacttgtgtaagtagctttgtgaatctttatgtcagatatttctttattagtagctttgtgaatcttatgtcaggtatttttttttattactattaaagttaagattctgttaatttacttgagaaaaagggaatcagaaaaccttttaattaggggaaaactatatgatttatgttgatgaaaagaggataaatcacatgaaagcctatatcaggttagaagaagatgagtgctgaagttctgccaatggctgagaatatcccattatatctcaatgagtcttgctttatctccccctatttttatgatttttaggatgatattagaagaattcaagattgatggtatatatgaataatatggaaacaaatatcaagtatgatatgaggtgacctgtggaaaagggaaacattccacttcactacctattattatcattaaatactaataattttggcttataaaaaaataaaaattcaatacaaataattttgaaaactatggatatgtttagggctccgttatttatagcatcataccctaatctggaataaatgctgtaaatacctgaaacaactcaattattgccatcttggtcaagctgaggacattaacatcaagttgctctgagatagcacatggttaaaatgtctattggtttgtaaaaatgaagaacaatatacagtgaatgtttctaatgtctatactatgtacatttgtttcagcatgtgaaacctagtctaaatgaagtgatgtgctctatggtaaagtgactaatggaaataaagaacaaatcattcacacagcttacctaacttggatcctcaaatctcaacagtttgaaatcataaacatgaagatctctggaattgatccatgttatgtttactaatcaactccccaattcacaagaaggcactctcaaagatccgaactccttcaaatttgtcttggctaaatccttaagcaaaaacatgaacccatgagcaagaataggttgtgccggttgtttcattgttgaaagaattatgtgtttaaaggcttggattcggatctcccaataattctcatggttcaaagtcatggtattggttgctaactcagcaagttctaaggtgtattgatctcaatatctcagatcggtattagatgatacacacaatatactagtttaaaaactaaaagaattctaaaaaattaataacaaattttagaaaaataattataattaaatggactcaacaaattaataaataaacgtatgtcatatttgccattatctaacaacataaaagcacaaaattggtttatgatagtattaagatataagaatttttaaaatatttttgtattcatctttacatccaataccaaaatttcataattgttatatcttgaaaaaaaaaaaatgtttgaaagtaagtcaattttgtagttttggtgttcctactaatgtattaaatatatatttttttaattgataagaggaatctaagatatttggagattatctagttttttttttccttccattttcattaaatttgagtcattttgttgtgactccaagctgtttgggagagtcaagcaattcatatttgagttggaactaagttattcttgaattgcatgataccaactcatgcatcagactcatagcggccatggctgagacggatgctacttggtcaatagactcgatactttgaaccatgatcattcttggaatttggggctgagttttatatgctccagtagcaaaagaactataaatatgttccatgaaatccttgagtgtacctgaactgtagaaatgggtcctgaactagaggtggtttgatgggtgctctttgggtaaattttattgacctgttaattagttgagctgggcactcaatcagtgcacaattaagtctcaattggttatcatgtgaatgccattgaccgacgcaaaaagctgaagttaaatctatataccaaaaggctcaatccagtggatggagttcctatatgtggcatagcatattttagagatctgatttgaagaagttatggtattgaaagactaataatgcatgttgagtatgcctgagtgttttcgatgactagcacaggtttatctgtatagtatagcatgattgaaatgggcattgtgaaggatctttaaccaccttttgtaatggaatataccaagactaaattcctagtgggcttatatctaaagccaataaaggttagagcttccaaagtataaggggtttgattcttcccccatataatgtagttctctttactatatgactttactagtgaaacagcattaatgtgagcttttccagttctgtcatagcctggactttgatggcaaactatcctctgtttcctcccatttggggttgccttttcttttaaaaaaaatttaaatttagagttaattctgtatgtttattatctaaaatgatcactataaggttcctctatgtggttgtttccaggtttgaaaaatccacttacattg

SEQ ID NO: 11084 - DNA, 4023 bp, Vitis vinifera
  Intron number 5 from transcript GSVIVT01012038001 (locus G SVIVG01012038001) derived from phytozome v7.0 (chr-ID chr1 ; pos 1934618 to 1938640)
gtcactaaagaaaggtaatatatgtggtcctcataatttatttgtattttaactttcatgatttgcaatgttttttaaagcccttctttcatgtttttagtaatactagtcaatctggcatactttctatttttaatttttgacaagtagttatataatggatttctatcacaaccaccacttctactattagcatgatattgttgctgccaccatcaccagtatcagtgtaattgctgccacttccagccctccctttgttaaacatacaccttcattaattactactacaatgccatcatattcacacacttaaaaccaaaatgtatccttctttggggggaaaaaccatgggccagagtggtgacaaggaaacttcattaaattcatgaaaattacatagttttacctaattatgtacaattctgaaggacctaatcttgtctgcagtcatatacttccacactttcttgatgccatgatactcatcacactttgggagttccaattgaaaacacttctccagagcacaactctttagcccctttgagagcctctttagcccctttgagagccctgcctttgttgggaaaggtggatgtgaaccaccactcatgagatcaaccagtgagatatttgggatttttgattatcaagatgttgtaactatgtctcaaataaagaaggaaattggtctaatcactgtatctacatcaataaacttttattagaattttattcaactaggaaggatacccaaaaatatgggcagggtaactttttccttgtctggtcaataaagtcatgaaacattgtaatttctttggcttttttttattttttattttttattttttattttattttataaatttttaatggatttgcctagaacattacaagatttttttttgtagtctagctgggtattaggtctttatgttaggggtctagaagtggcattactcactaattcaatctcgtttacgttttcattgagataggttcttgttcatacatccttattctatattccatgaaactgccatttggtagttgtggcacaacgattcttttgaaaggcataaaaagtctcctaaatcttagatgctaggagcaatacaaggtacatgcatgattgaagtgagacgcaatctagggtgcatgttaattttacaaaatgcgatccaatattcaatccaagcaacaaaaaaattcaatattccaagcatttaaaagaagcctctaataaaaaactgatgcaactatataatttcaatttataatcataattttaagaataaaaatgttaaaaaattaacgaagaaaataaacaaggcatgctgcactgacaaggcaagcacatttgtaaatgaggcattatcattagggagttattgcactttaggcctggggtagcctaatgtgcacctttaacaactatgggcttaactccctatttacatatttatatgggagctacaaatttttttaatcataattgtggtgatgttcacgaatggtccaaaacatttacaaagattttaatctttggaattgaattactttggtattttgtaaatttattttttgctccacttactgctgttctagttatgtcaatttaggaggctgtttaaactataagattgttttgtcaaaaaaagtattggaagagctccttgtagaatgtaccctgctgtcttttctctaaagtgccatttatatcagaaaaaatcaaaatcctattagagatgagttgtctcaaaatttttgggcttggcccaataaaaactgatttttaaaataaaaatccaagcacaaccctgaggggtagctcagttagtctgaccttgggtttgctccccaatggtcacaggttcgagtcccctcagggccattggaggtttacccggtcgttaacttcagggccccgtgggattagtcgaggtgcgcgtaagctagcccggacatccacggttatcaaaaaaaaaaaaaaaaaaaaaatccaagcactaatcaatttgagtctagcattgatccatttcttgaagttgaaggtactctaaacaattgctcaacatactccaatttctttttcttcatttttcaaggttgaagacttgatttattgcacttatcgaaactaaaagtttgtgtatgttaaaagctatgcatttagtgtagattcttccaatttcatgcactttcctttttaaagaaggttcgtcaccataactctacatctcttttgaggcctaaccttttggttcccgagggatgtgtcttatttactttggtgtactgttttcttttgccatttatatatacacatctttctttgcctatgaaaaaaaataccatgactctgcaactgcacactagcccctaggaaattatgtgaaacagtgaagcttaggctggatgtttggattggaattgccaacacattttacatacactattactgctgctgctactatccctactgcaacaagtaccattgtcactatcaatattgccaccattatactactatggcattcccaaaattatcattgtgatccttgcggttgctattgccaccatcactaccacaatttccctgtcatgactgccatgccagagatggcaatgccattgatgtgggtgccccgctttctttgttctttttgcttggtgccctctgtatactacttgtgtatgttggtgtgccttagccctatctttttttcatatttataccattttctgtgtgcttatctaaaaaaaatatcaccatccactcgcaccactgctgccactaccatcattttgacatcaacatttcctccattgctggttccaggttcaccatcgtttccttcattggcaccataatacctatttccaccatcaccatagttttctttgataaaattgcatatgatcaattcatgacttctcttagtggtttcctaatccaattgtaatcatactcttaccaaacatatttttttctatttaattaatatttagttagtttaccaattagggtggtgataattctttctatagctagacaattcaatttattaaaattagtggtcataattgttttaagatttcattcatatgccgaaattcatttaataattcatatatttttggcctaaatactactgtattataataagaggtggttgttaaatcctattaaaagaaaaaaagaagaaggtaggtgtgagtgtgtggcacaaattatttcaattagcaaagatggattgggtttccccaaggagcatctctgacatgttttctactaattttaatggtttcggatcttctaagagagggattgttttatggcaagacgcgtgcatcgcgttaatgtgggtggtgtggcgggaaagaaatgcaaggatttttgaggataaagcaaggaattcagggtatctttgggattctattcgttttttggcttctctatgggctttttgttctaaggtttttaaggggatacctcttaacgtgttacaacttgattggttagcggtgtgtaaatagagcgtttgcttattctctctttgtatttcttatatttgattacttgtagtcttgtttctctttggtgggaggattcctcatccttctaattgtaccttctttttatcaatatattccgttgtcgtttcctataaaaaaaaaaggtgtgagtgtatgaaggtaatgatgacagtggaggttatggtggtgacagagtggctaatggagaatggcaatccatgatggtggttgctttggagtttggaggtgggctggtaatggtggtggtgggtagtggctctgcttatgaccatggtggctcatgacgcttatggttgctcatagtgtttcagtattgcattagaatatatgcagatttttttttgcatctgtatttggaatataaatgatgtcaatttttcaatattgaattctttatgctctcattattctactgattatttttatgacatttgtttctaggggatcgagtaaaat

SEQ ID NO: 11085 - DNA, 4898 bp, Vitis vinifera
  Intron number 2 from transcript GSVIVT01010106001 (locus G SVIVG01010106001) derived from phytozome v7.0 (chr-ID chr1 ; pos 15601343 to 15606240 reverse strand)
tcataatttcctcaagatcaggtattggctttttgtgctgtttattctttctgaagtatttagcttgatctattgtaagaaattgtgccattttccacgaggtttctcttgacatcaatttaatgccctaattgtattataaatactctccaacttggtggagtcataattatttgggaatgggagcctcatgagtatcattaaatttgatgagtgggcatgataccaaggtagatatccagtttatcagagatggtgatgaataagaaaagaatcacctcttttttttgtttaaggaatcatgggaaaagagagagaacaacaagagagaagaattataaacagaataaaactctacctgagcaagggtcagctccactcatatattgtgtttgagtatctgaaacagttagaagactaaaatgttcttcacaagtaacaagggctgttcaaaaaaaaaaaaaaaaaaaaaaatcctataaatgttagaagtgtcagcaatgctgacaaaatttagaaatctcaaataaaaaaaattatgttttggaatccaaaaaaagattgtgtttgattgagtttttgttctttcccacacttacaacccacctccaacgagcaccccgtcctcctcttttgattcctattgtaattttaagaaatgagggaaaagttataatacatataaaagaaaaaggttaggaaatgcaaaaaacttcaaaaaaatcgtctcttcatatttattgtgtactggaagaaaaacttgcttattgaccaactcaaactgaattaactgaagaataacatagaagttataactaatttatgaaaagataataaaatatctaattgggatttctattaaatttggcaagaaagggtggtgcattttataatttactcttaagacctaaaagctagttctaattgatttcaataattcatgtcatcaaggttagggagagttctagttccaaattggcagcgatcatcaacacaaggatgccaaagtggtttagttggaaagagagagaatgaaaaattggttgccaatggaagtggaatacttgttagacaagtacctttgttatgtttagtaaatattattttggtgttggcattgtccctttggtgagctagttggaaattacattcacatgtcaaatattataggtaggagatggtataaccattgcatgaggaggtaaagttgtaactgaatatttttcctcattatatttaatatagcatggatttattttcttcttcatttttctaattgtgacttcttgttttattttcttattcctctctatcatttcccctcatcatttggtatcctaatatgtgctattttcttggtttgacttctttttatgttggtaagaaatagaggaagacgtggtgatgctggatctttaaaattccagcactattgaagttttttttttttttttttttttttttttttttttttggataaaaaaaaaaatgatagaaaaggaaaaagaaaaaaatatatagatttttttttaaattttttttatgggtaaaaagtaaaaatttaaaaagagaaatgccaaaaaagtgccccaaagtacacaagaagcatacaaaaaaacgcttaaaggcaccacaaaaaatagagggacaacaataaacaacccgcctcaacttgaacccaactagtcctcaaagtttgtagtggaaagaggactaagaactatatacaacttacatcacacccaaagattacaaagtaaagaaaatttaagcccttgaaccgacgaccccttattttcaaatgccttattgtttatttccttccaaattgtccagaaaaggcataagggagtagctcaccatgcctttttccattttttacccacaaaagaaccttgccattctaaaaacggctctctaatcgaagaggggagcacccatgacacgccaaatggggagaacaaaagatgtcataaaactcttaccctgtcacagtggaggaggatgcgatcaatggattcttcctatttaaggcacatgaagcatccatttgccaaagaccaacctctcctctgaatgtgatccaaagttaaaaccttcttccaagtagccttccaagccaagaaacccacccttggcaacacccaaaagttccaaatcacactttttggaaaaacaccttgtcttcctagctccaataccttgtaaagggtcttaagcaacttatgtgaaaagaaaaggaaaaaaaaaaaaaaatccttggtaattacattgattttcctatgaaatcacacctagagaaggtaatcacacctttaagaaaactgtgtagctactaatttctctagaattcctgtacataaaattgaaagattacataggattttatatagattatggaactcttttcctaataagactaagagcatatttcctaatgggaatatagtccctttcctaaccaacttagaaactaaagcaaataaaaatttgactaaaactatttaaaattaattctagtatgtaaaaaatacactccaactaaaattgtatcctataatgtggtaatcatataatggctgatttaggagagagaaatgaacttcaagcactttcaaatcacattgagcaacttaccatgcaagttgaacatgaagaaccttttagtgagtatggtgaaccaaaattttctagtgacaactaatgagaatttatttacccattatgaagaggtccaattagagagttttttttcttgtggtttaaccttgaaactggaagctaaatttgctcattttggtgatgttcatagtctgtatccatcctcatggctggcattaatatttctcagatctgtgcttttacctataaaaaaaaacagtaatatttctcagatctggaaatgtggataaagatctgcaaaatctctaaattgtagaaaggttgtggagctgcactttggagttttccccatggctgtctgtctaaggtttaattttgatggttgctctttgggtaatcctgggcagataggtattgcagagtgctcagaaatcagggtgcatctattgttaagctttttctaagcctgctgggatgagattactgtagaggcagaattgctagctatgttgaaagggctggcccctgacagttctttggctttcaacagtttccttgtggaggacaactcaaccattgttttttttttttttgacctctgtgagaaatgaggatgttacaaactggatttaagatcttggatttatctacactgttgggatgctcttattcatggatactgtttgactaacttgactgcttgtatgttgtctaagtctggtgcttcgagttgagaggtttttgtaagaagaggaggtcatgcctccttgagagtgtacctctgacctttctattggattgatagtttcttttttagactgttgctcttcttttgtaagaagagaaagtttctttttttagacttgctcttcctcttctctctttttgtcttttgagccatgaaagataattcatactttttcacctttgattaatggtgcaatgaaattgttgtttctaataaaagaaagttcggaaggatcagcctgaacctgttccattaatatatcaaggcaaatccctctcaaaaaagttcctaaatggatggaagaccccaaaccaagcaactaatgttaggccagtttgcataagctgatcttctagtctaagaattgccacgtctacgtccaatatgaggatgttgtaaggaaacttctgaggatgctttgattcttcaaatgtctatgctaagaatactgtattgatgagcaccacaatgctttctcatgtgacagtgaatgatagtttgtgagatgggatttaatgaatattttcaaagaaaatttaaccttgaatcatgaatttcttgttcagttacagaaattctaaggataactattacatagccatatggagcacttaatcgtttctagttgaattaactgagaggcattttggtctcttcttgtgaaaataatgtgtattcagtgaagatttcggctcagaaagatttagaaaaggcctccttttttcgcaaaaattttgtagttgtgattgaaccttctgttaatggaaatcgaagagaaatctaatatctaatatgtggatctattaaataattaattgtatagctctgacagttgtttgttttagagggttaaattttttaagatcatatgaatacaagttggattcattaaggggtttcccatcaaatgtagagggaagcctccaattgagaagcatgggtttcttctccgctcataaactacctaaatctccagcaacatatttggaaaacaaatagtaagagtgaattctagttaattgtggggagctgaagctcaataagcatgtaggcataactcatgagtggcatgttcttcaaagttagaatggggctaagcttaaaagtaattgtcattttagggtgtcacgacgatattatgctgagtgtttctacatttctggaatggcctaggtattctattgtttgttgatctaaatcatccactaaatattatgtttggtcattattgaagggttttgttttcatctatctccagcctctttgttgtcttcttctatgtcattctatctgtttatgtatgttctagggatggatcatcattagactagctatttttattttcctggtgattctcatcacattattaaacatatttttgtattcaacatatcccacagagaatgagaaactttcatttgaaaagctgttattggctttaaaaaaagttaatggctagtcttgactcttgagattaaccaaaactttcacagctgaacgggtggaatcttctgttgagagcttaaga

SEQ ID NO: 11086 - DNA, 1569 bp, Vitis vinifera
  Intron number 1 from transcript GSVIVT01037513001 (locus G SVIVG01037513001) derived from phytozome v7.0 (chr-ID chr6 ; pos 12438592 to 12440160)
atgtaagccgatttttttttcatttcttgctctatgcaagctgcgtttcttggctttgctattgttttgtggttcattgaaatgtctggtatttttttttttgtgatgttataatttcactaagtagatcaaatgccggaaattagttgactatggaattgagaccaccctaagttatatgacctagtggctatgccaaatattcacaagggtcagggtgtttattctactagggtttagtttgtatatttcggtaaggacattaaaaaggagcaacccctaaccgtgaatgacatggaatatgaaaattggttgtatgatgtttatcgtagtgacagctccaacattccagttctacacatttgttttgttctttgaatggtgtagcatacattagggcgattcaatttttgtgagaaccttaagcctcaataaatttcgatgggtcacttgtgttgaagtctgtaacattttatgctacagacatgatttaattcttttttcttttcctccggccattgtgtttactgaaattttagttaacacatttcattgatttgtcctttttttttttaattaaattttttaattttctatttttataaaaccacataaaaatgaattgatggaaggttttcctccagaaattgctttcactaaaatcttacttcatgaatattttatggatttgccttcaattttaaatttttctataaatggatgttataatgaaccaatgcaaagtttctctctctcttggggccattttatggttttagttcaggatttgcaattcaaatattaatccaataatgccctaccatgatttgagttggataaatgtctttatcttaaaggtaatacatgctcattaatcttcttttattttttactttttggttgttctcttatcaatagatggggataaagtggatattttattgaaaattgttattttctagatctattatatgtctgttgcttattgcttgaaaacatattgcaatttcaatattattctttatacaaataatttgatacaaacaaccccacaaaaagatgtttggaaaaagaatgaatgtttactcaatgaggctaaacagttaaagatgccttcattcatgaggagcacataggaaatccaaaacaatatgaggattaataaatggcaatatgaatggcattgattatggaaatgttttattttaattttagagttgtttgtgagttcacacatttttaagaaggtggcactttcttttggatgagatgattttgtgcttgtctgcaaatgttgataaaagtaacatgtttatgcatttagaagtttgtgtgcattatcctttttaggaagctatgttatttagattttttaattaattttgaaatgcttttattttgctattagattcttacattctttctccttgaaagatttttttttccttttgttttgttttgttttccaaattctacaatttttaatctagttcatgtcatttaacaaaaatggctcgttatttaacttccctgactttgtgaaaattgtttgtattctattatgctaga

SEQ ID NO: 11087 - DNA, 4670 bp, Vitis vinifera
  Intron number 1 from transcript GSVIVT01013568001 (locus G SVIVG01013568001) derived from phytozome v7.0 (chr-ID chr5 ; pos 21047728 to 21052397 reverse strand)
ctccatccaagatcgaaaggacgaggccctactcggttagttcttgtcacacttcgatttgttgaagtatttatgtgaatttgtttaatttcgggtttctgggttctttagtctctctgtaatctttgtgggttgtaatttgtttatgaattgtttatctagagtttgtagtcttggtgttgggatcattattgtttggctgctgagaaaactaggaaaaggtgggaatttggcaaatgctcctgttcttaatcttgttatgatttaaaatcgagcaaacaacctgttgctttaattgaggtgagattacattttttgaaattaaaagaatataacaaatgacattcaagaatttatttacttatcttttccttaattattttcccagcaaactaatagggggttagagggtattgtagtggtttatttcaatgttttatgtggtccgttcatacgcgtgcctccagagcattacaggtttctagagataaatttacagctattttttttcagatatcattgtgggttttcgggaagatgaattaatagaaagaataaaaactatgaactaaccagaccaaagagccgtgacaagccaaattgggataagattgtctatctataggggaattctaagttgaagggctaaaacaaacaagctaagaaccgacgaaggtcattgtgagcctctctagacctcagaaaatgggtcaaaatgtttcaaaacttataacattttaaagaaggaacaatattcgtgttttcaaactattgacaaaacccgcactatgacatgtgacagaacatgagtggttttgatttcttacttcaacttgagccataaacaaaataaagatgtgtgctctttttgaattttcaaaatttctatcgtatgtatattctaaaagaatttttcatgcctagtctccttcccaaacccagaatgctgatttcttataatttaaattcatatattggtgttcattagtaaattccatgttgtttggactctatgacacacaaaggaacatactttaaacacattctgcataaccaaagtgtcttccatcatctccctatttcaattaccacataataccattactcaaccatcttcaaactacagcatacttaatgaagagaatagtaaaggactttctccagaaacccctttaaacagtgtgtaaacacccaacttgtaaaataggagatgggctaagcctatcaataaacgaataaataagtaaactttccaacttctcattgcaataggtatatattaactggtaggagtcttaactacatgtgcaatgcacatgtcaaaaattctacatggcaaaatggcaagcattttgcacgttttcaaataaaagttgcaaacttagattgcataagagcagccctacatatgtgtgatcttttaatgattcatctaaaattttgttatttttttcagtttctgttttttcatttttctttcctgttttcatgagtgggattttttatataaaaagttggctgaggatgacaacacaagataatgcagagcatgataacaagaaagtgaaaatcgagtttatttgggaattggcttagctttgtatttgaaatagtacaatccaaaattagttaggagtcaatattagtaggtttgggcaagtttcattgagaagtctgatagcagcagtatattaatatggttatatttttatttttattttcttgtgatttctactttgataattagaatctttcttggattgcaaattaaagactaggtgtttgataaaccttttatttgaagattttcagggcttactggtcattctattggttaatcttcttctaggacttgtaaggtcaatatttccaaataaaatagggaattttttgaattaagaaaaaaaaagttgtttatttctatgagttttcttgtctcggaaatactagagtttatttctacgagttttcttgtcttggtaatactaggattgcttagttaccgtctctttaatattttttaataggatattttgtatgtaatcttattcctcttttctcagtcttctctcaagggacctcccacttacactcttgctaaacctctctccttattacacataattcactaccttctttttgcaagagagccattaacctctagtgttcagaggttgtcctacattatttttaatgccaaaggcctttctcacctctccagcactaagataagttgatggtgcttgttgtacatgctctgtgacttgtggcctgagagaagtgtgattaatatttgggtttgaggtccctgaaaggaaggattgccatcaaacttgttattacattagccaaaacttgctttgtgccctgctagaattgtcttttattatgattaggtcccatactactgtaggtgatcactgttgtgtatattacctttgctatgtagttattaaagtgtttgcagtaagctctaaggggaggttaaccgtgtgcaagaacaaatatttcagcagttttctggtatttctgttccgaagacacatagacatgctgaaattctattttttagcatgttatctatattgataaaataatttcaatatattgatttgtcagtatactcataaatatccccaaaaatatggtctccaaagagatgtatgggatgtatctttgatatttgctaatacatgccaaggcgaactagattatagggtttttcaatccattgattggtcaataatggagaaatatgctaaaaatcatggtctatccagaaatatgtgagatatatcactgatatgtcaatgatgtatcattgatacataaccaaagagagaactagattaaaaagtttggaagagagggagttcaagccttcaattatgatgctttcttaaagaatgaagtgtgaatagtgagaatatagagcattctgttcatagactaaagattccttcctttgtaatctttggacttggtctaagttgtttttagtttctagtccctagtcagtagtagattttgtagactggttggctcattttgaggagggcggtgtttttgttgcctctttttgggaggcgccttgaggcggttgttgtatatgtcccgtgtactttagggtgctttgcaagcgtcttttgtttttaatagatcatgctttattcatcaaaaaaaagaatgaagtgcgaatagtgaaggagctcttttgagaaacatggaagaagtgtcaaatagggaagagagacaaaaaagagacaatagtgagaagtttgatggatttctcaccaaaaatagttatgatgtattgcatgataccataacgattgtgtatggcccatccaagagtacaaatatattagaaaaggaatgaaaagtgattgcatgcagattgctttttttttttttttggtggcaattgtttaataattcaggatacattattgttttattaaaaattctcaaagtccatttcaaatttccattttttatagaaattttgtatttttaaataaaaaatgatattgatattttatcaatatttccacatatataaaagatcgatatcaatatcctcatcattgcccatgtggatgatgattggtgatgtcttggcttaaggagaggagagtgacctaagatgaggatgagataagggttaatggcagtagactacgagggaagaatctctagtctcaagtttccattgcgaggttcccaagtattggctgattagagctccctgtatactttgtggctttttggcctcttttcattatattcagcgcttatctatcaaaaaaaaaaaagtattggctgattagagcacttcttatgtgacctattatgcttctatagggtcatggaatttgcaagccagtcgggatgtaggcttcaagccaatgaacactctttaggatgcctgatgtgtacaaagcatgcaagcccagtggctgaagcatgtaatcctcacctgatgctgattggttaactacctatcaatatagcagttcatcaaattgaggtgacacatgtttaaatggtaagtaaatatcctggcttcccttccccttaagttggctgagagggtttgatacagctcatactcgtgtgatcatgcccaccaccaagccaagatcctttatctattctaataacttgacagtaagaacctgactctcacattggcaagagtggagctttggtcaagctacctgagttttcagcaccatcaagaggtttctttgagggctttgaaccagtaaggctgtaaccatccttggaatgggcttccactatagtaggaatttgcattgaagtgtctttagacatgattccttcctcaatgataaagcttatgtggctcatgcagctcatgccacatgttgaaaatatacactacattttataatactaatggtaattgttgaagtaggacacacaaactaacaattttgaagttgcttaaacatgcctgtaaaattttaatttttgtttatgcttaaggaaatttttatttcagtttaataattaataaaaacccctgctatttggaagtcccaatttttaaacccaaaactagtgcacttcataggtaaacactctgttgtgttcatgaccaaagactggttggtttctgcattacagttctgaaatctgatttg

SEQ ID NO: 11088 - DNA, 3964 bp, Vitis vinifera
  Intron number 1 from transcript GSVIVT01014168001 (locus G SVIVG01014168001) derived from phytozome v7.0 (chr-ID chr1 9; pos 1034904 to 1038867)
agatcgaagccctagtctccgataagcttcaagtggtaacaacaacaatcgcctctccctttagaatttatgttcatctgctttgtagaatttgtatcggattttttctgttaattttccaattcttggttctgtttttgtttatttatttatatattttttcgggcccgtgtaatcagttcggagggtttggtttctgcaataaatttttgagttcgtaagtgaatgtatacaggtattgggaaaacaaaggagactggagtgtttgagaaaagccattttattgatttttttttcaggttccgattgaaaagaaacataaaggggattgaattaaattctgttgtggggaatgggaaaaggataaaattctggaaagacatttggtgtggggatgaacccctttgtgtttcttttccttctctatttgcattggctgtttccaaggatgcttgggttaaggatgtttggaggtgcaatgagggtgggggaagttggagcccgttgttttctagaccgtttaatgattgggagttggaagaggtgtgcagtttttttgtggccttaaataggaagcaaattcagcaaggggtggatgatagggtgatttggagagagactaattgtgggaagttttcggttaagtctctctacaaatcattagtatcaggccatccaatctccttcccatcgtcggctatttggaaagttacggtgcagcctagagtgagtttttttgggtgggaagcaacgtggggaaaggctctcaccttggatcagcttcaaaggagaggttgggctctagcgaacagatgttacctttgtcaaagacatgaagaatcaattgatcacattcttcttcattgtgaaaaggttagaaatctttgggtgctgctctactcaatgttcggggtgcagtgggtgctgcctgccacggttaaggagacgctttcggggtggaatgggtcttttgtggggaagaagaggaagggtgtttggaaagcaagtcctttgtgccttttttggacggtttggaagacaaggaacaaagttgcttttgaggaagaggagttgtcaatccaaagactcaaggcttcttttgtttattttctttggtcggagacgaagaggtctataaaagatggtccctcgaccttagttgattttgtcgggtgggtggcttcccgttaagggtgtggatagggtggctcttcgttccttggcaggctgctagggagcgtggggtgtttttctttctttttcttttctccttcttgtacttttagccactgcttcggtggtttttaatacaatctctttatttatctaaaaaaaattaaatcagaggatcatggatattgattctggtatttaggcttatagattatgaattgtaaaaaaatttagagtgatatcttaggactcttcatcaggttgtgttgaaaaaaatgctaatggacaaaaatcgtgaggataaggtaggagttcttttattaagaggagtttcactgtctgtggttcgacagggctatgtttggatattagaagaataaggaaagggaaatcctgataattgatttcgaaaggagatcatcctttgacctagttatgggagaaagcctcttaaattatgctcacgggaaggattggaaggaaaagaataaataaacttgaagtgacttaatatcagttggaattaaatttatagagtagttaattattagaatcataataggaaaattagaattagagtcctaatagactattagaatcctagtagaatttgaattttttagagaaacctacgaataaggcaaattgaattaaactaagatagagtgattaaataatattagttcattttgcatgcgttgcatttttcaatggtgaaactccattgattttcttctaggtgagatttttagaaagccttaatgagattctaaagtttatgtctctctttcttatctttctttctctttatttttgctttactctttcctgttgtcatgaaattttgttccttgtttctctccttaaaccctaaggttatgtttggttcccggaaaatactaaggaaaaaaaaaatgcaaaggaaattttttttcatgtttggttgtcctatgaaaaatatcaaagaaaatcaaatataattaaaaacttatgtatttttaaattatttaatatttatattgataagtgaaaataaataaaatgagtttgaaataacaaaaaaaataatttatcgacttttaatctattttttattttccttcactttttctttccttctatttttcctttgtattttctttcccttgcattttccctcaaattttctggaaactaaacatagcctaaaagattgaaaccctagcccacccatttgattgttgacaaccattctaagtttgtcccacatcactaagcttttagcatttataagatctatgcagatagacattgtattatttaattgtgttgagggttgcatgtatttcatgtttgttagcctatatcagtggcataccttaatttgaggtctgtaatggaatttgggttcgattggatcacatgtcttttgataagcagtgtttagaaattgagaaactgtttatgaaatccctatttatagaacctttctatgatttaatcaatactagactctatatacttttggatcttaggttgtttctgtatttaaattagaaactggtattttgttttctgacaatttctagtggtatagcttttgatttagagaataaagagcactaaatcatgatgaaattgtgtgcttcagtcagttgctatggagatatgacttaaatggagttgttttattcgactgcagttgttgtgttgttttgattctcttgtaatggtactatagcattataattggtttggtaatgcttcttgtctttttcacctcatgtcaaagtggttttctttttgtgctctacgcctgcatcatggaatttcaataagtgtttttctttactaattagacttacaaaaggatgttaagtggagtttggaaggtgacaattggaaaataatttttttgatttgtacttgggttgtgctccctctttttgttaggcacctcttaatttgttctgtttgtttgccaaggaaaagaggttggaaaatgttttttccccactattaagacattgaatttatgttcaatgtggactcaacaaatttagttttcatttattttcttctatgtatgtaaaaatgaggaggatcagtttctttaaaaaaaaaaaaagttctcactgctgcccatcattttagttgcatatatttttttaccattgtgaaattagggctgcaacttgaatataaactcaagccaaccaaccaattgagaagcttggattgaagtttttcaacttagagataggcttaagttgaggtgtcaggtaatctggccaattctaatccatacatatcgttttatgtgcaatttgcaatattgttatgtttatgtaatgtctttttaaaataaactccgcagcaatttaacgttgaatgtactttccctccataagaaccatataatataacatttttatcgattatgatcaacagtgaggggtctttgtgctatcccttttttgatccttttatgtaactcttgggataacattcacatggtgctaccatgtgtgccattgtgttgctcttcgtactatcccattttggatccttccttgtaaatttttgtgagattttattatccattacagttagaggttgatgcttttcatagacttggtgacaccaaacgttgcatacctgtttacattatctgccctttcaactgatgccctcatgtgttggagccagatatgtcttcttgtgcagcggtattctgatttgaattgtgttagtaacttttcatgtttgcttctcaggtttcctacaagtggctgagtcgtagttttttggt

SEQ ID NO: 11089 - DNA, 3097 bp, Vitis vinifera
  Intron number 1 from transcript GSVIVT01034226001 (locus G SVIVG01034226001) derived from phytozome v7.0 (chr-ID chr9 ; pos 13036164 to 13039260)
tccacttttactcgacatcgttgatctgatcgaaggtaaccctctgttctattcttcttttttttttttttttttttttttgtaatgtctgattgtcttcagatgttagttagggttttgggttttaggatttcaataaagcagtcgagtctcatttcccagtacttctctctctaaaaccctcattctctattctagttcacatatgcaagtgctctgtttagggtttttgagttcacgtgttgcaggtccgtttcttttttaaggaagaaaaattttgtttggtgatatcttgttatttagagcccgtttgatatggttgttgtctcattgttattaggattttgtggtttgtttgattgttgtgatttttgtggtttgttgggttattaggattttatggtttgtttgattgttgaaacctaaaggaaaatataagaaaattttgggtttaatcttattaatttcatattatagtttgttgggtagagcatttgcgctcaaactgtttgttaggatgcccatgagagttcttagaccttgtggagacctaggaaataatcttgccagtgttcctggagacccggcttttattttctctttgttgtaaatggtcagggaatcagaacttatgttccgggtggaaagagcagggaatatgtgatgagaattttcaagtgtttgattgcttcttttttccatctgattattttttatgtccaattatgttgttatggtgttaggctaaactgcacagaatttatacttcatagaggccaagtctaattaaagtcatgagttgatgctcttctttctctttacttgtgtctaactagaaagccaattcattgtttcatcaacatacaaagtgcacagaatcaatggtgttagtgctttactccaatatctactagcccagcccaacaacctcaatttcagattttctgtttatgtggacagggctgagaaaagacacaagtaccaatatttcaataagaagccttggagttgagtggcaaagtattcttagtttatgtggactaggatagttcggatgaggttttcttttgttgatttgatgtatgatgttggtggacacaggtacagagagttgttaccgtggcatcccgaagaattggggcatatgatagttactgtggggtccacacaacccagcttaccatttgattgtgttctagtggcttattccttatcagcacataagaatgggcctagcggcttaccttcattggattttctgtataaatccatcccatagtgttgattactcttcatttatctctgttttcttttctcagctgagatctttaaagttgatcagttgtaaaccattcaatcatttatcagcaccgctgaatgtaaatttgtttttttctgtataaaaaaattattgacttacattgcatctataaaatttaagtttacaaaagatttaaagttttttcttatgtagatatgtaattttcagttgctaggagtgttcaatcgtaaaaaatgagctttgcttgtcaagatggttctcttatgatttagtaacttcctgaaattctaagatgggcaataaagttctcagattgcttgctgacttgtttgtgagtattgtcataattttgaaaatgatgatttgttctttatttttgactggctttaaactagttaaacatgagcctggtgtcaaatggaaaaaaatttccatcttaaaacttttcaaagttttaggatggggaataattttcattgatattgcttgttacttgtttattataaattgtccttttaaactaggtaaaatgggatcctggtgttgaagggagcatcatagaagcatatttacttgtggcctcccttgtttccatatggaacctgaaaatgaaaatgcttgaatatttcatgagattaggttgtgtatccttgtgattgtagggaagttgtattattgaagaatttccttaaaatgagatgtttattgatttagatgttttttgtaaatttttttaaaattttattatagtgataaaaaaattattaattttaattagaaaagtctttttttttttgagaaattaataggtaatcatatattgttttactttgaaaattatcttttattcaatgttcttttttattgatttagatgtttcttgtaaatattttttaaaattttattatagtgataaaaaaattattaattttaaactaatatataataaaataatttgttatatcatgattgatatttatttattaatccaattctttttgtaaacatttttcaaaattttatttaaatcataaaaaagattatttttagttttatatatatatattcttttaagatagatgtttatatattttgttgtaatgaaaagttttttgtttatcatactattttctttttgtaattaaaattgtatgtcctttttggtaatttattaatattaaaagtctttttatacttatacaacatattataaaaaatgctattagagtcgttttttatgattctcataaaagtgtttttcacagaaacactgcagaaggaaacacttccaataaaaacactttcactagaatcactgcttactacatttggataaaaatgttctcattctttttttataaaaataatattttttttaaaacctacatgttaatacttgaaatagttaagggcgtttatgtcaaaaataattactcttcaagaaaaaacacggaagatgttaaattcacaaatatgatattatttcatcccttttaaccaattaattcatttatttatcaaatttatgaaaccttaaacctcaccaaacttatcatggattgaaaatgagattattcatcaaatttgtgatacccaaaacctgacttaaacgtaattgaaataatcgtggattgaaaatctttaaagcgtattgtcgagttgaatttgagtgacaacatttgatccagaggtttttgatctgttgaaatcagcccaatagttcaaaaattggatgggcccaagctgaccccattatcaatcgactggtgctaaacttaatgtgtactctgttttagggcttgctggccagtatca

SEQ ID NO: 11090 - DNA, 2859 bp, Vitis vinifera
  Intron number 1 from transcript GSVIVT01025271001 (locus G SVIVG01025271001) derived from phytozome v7.0 (chr-ID chr6 ; pos 2560064 to 2562922)
tcggcctattgaacgcagaatctcaactgacacatgtcaatgggtccccgcagaatgaactccgggaatgtagattaaaaataaggaacgaagtaggaaaggcaatatgtgttgaacccctaaacctttttctctctttttttttttctttttttccttttctctgaagaaattatttttttaaatacagaaagaaaaatatcttggtttgtgaaatgaagaatggatacgagctttatttatttattttttcgttatgcataatagttttttttgtaaaataaagttactaatatatgcattcggttacatcaggtcaaaccaacaataactccaagttacttcaagtcaaaccaacaataactccaatttaggaatttttcaacgctttgtatccagatttgtagagattgaagttatgttatatgatttaagtctttgtctttaatccattattaggagttgacataatttttctaatgtatatgaatttatgaataaattatatatgatgtcattaattaatagatttcattatagattcaaaaagaactctttgaaatgaatgtgtgatgttgagtggatgggtgcccctagatgataatcgcagtagatgcaatcaaaatttagaaagttcatattaaatgcttaagtcaacctttaatgcatgcaacagaaagagtcatgtcataggacaagtcataagaacaaccctcgagtatttattatcataaaaacaaatgtgcaaattaaattaagttgaaacttaatttatcctctaaggtccaaagatgatatagacaaccatacgagacgtaatatgttgtactattagtgtgattgtatcatcagtgttggatattcgttttgtacatctttttatttcttattttaaatgttataggaaaacaaacttttttaatattatatagttaaagataaagtaagtaaatatttcaaaatttttaattatttatagataatttatttttcttatatccaagcttgtgtttcttgctttccccttttttatggacatttagtccaacccaatatgttccatgtggaagaaatttaagaacctctagcacacatctctcactaaaatttaaggactttgaataaataaagttaaaactaaatacacacataacaaccaaccattggaagccagatgaaaatcttagctcttgaatacaacttaagtgacaattaaattctataccaaatcatatttatgtggttagacaatatgagtgataccttgtaggtgattataaatgattatatctacttcactaaataaaattaaagaaaaaggtaagattttatagatttagagaagggcttcacaagcaggagagagctcattgatgtaaagatctcatggatttttctaatggttcccaccacatgatgaaagacatagtgaaggattctggaatttggaatcagtgtgaaacaaccctggaaagtgaaatcaaatcaaataatatttctcaaatataaatacataaaatgataaaatagatgaaagtattttacatataatgataacaagaaggtccaaagcgatgccatgggcacaatgacgatgatgaatacatcccaactatgataaaaaaacaaaagcctttttttctccctttttattccttccttttataacaagttttttttttttttttaatttaaaaattgtgactcttaagaataaataagtgagataaaaaaaagtgtattttttgaggaattatcacattggtgtccttcttgattattttcaccaaccgatcctattcaataatttttgttaaatgattattatgatctaaaaaaaaaatttacaaaacccattaaaaaaagaaaaaaaatccaatacccaatgtttttagtaaaaacaaaatgcaaaggagaaataattagttggttaaaatgaatgaaataatcttcttatttatgagtttaatcttttccattatttttttaatataaatatccataattatttcaaatatttacatgaatgagttatttttaatttttttaccaaaaaaagaaaaagaatgatttatttttaccaaaaaaagaaaaagagaatatttttatcaaaatgtggtaaaaaaatgatggaaggtgttaaattttcaaaattgggtttttaaggtcctttttaatcaaatgatccaaggaaaaacatagataaaagagaaatatttttggattgttaaaatcaggtttccattggcatcgttttcaactacaataaaaaatagaaaaaattggaaaaaaagagagaaaaatatgccatgtttaatgtttttaattatttttatcttatattctaaatataaatatttttaaaacttttaaatttaagtttccaaaataaaattttattctaaaaaaataatgacaactgtttcaaaacttcccgaatcatttgtcaaatgggtgaccaattaaaagggataaattaaaaagaacaaaaaaaatatgaaattataaatctaaatttatattttttttacccataaaatagccattttggataagaatattgttattattttcttacaaaaatacatttttttaaaaaatattgaaagatatttaagtattattattccaaattaaaaaaatgatttagactaattatacaaatttgagattttttttatccttttaattaattaatccttttgcaatcagctttccatcggcatcattttcaattaaagaaaaaaaaaaggaaaatcaagaaatatcagctttccattcacatcattcgtatatatatattaatatatatatatatggaaagtctcgtcgtctccctctgctgtcgcatttgaagct

SEQ ID NO: 11091 - DNA, 4660 bp, Vitis vinifera
  Intron number 7 from transcript GSVIVT01035561001 (locus G SVIVG01035561001) derived from phytozome v7.0 (chr-ID chr4 ; pos 2317229 to 2321888 reverse strand)
cacaactctcgccacgtttctgtcatgtatgcaatgaacttctcgttgtctcagtaaatctttggaaactatgtcaaaagcgaaaattatttattgaacttatcatccctgttctgtttgtttttaaatgtaaatcattttatgatggaaaaagaattgctcaaataggatttactagtgaaataatgaatttccatttacttttatgttactttgctgaaagtataaactacaagatgtaatactctcttttatatattcacatgtttgtgtgttggaaaataaaggaggaaaacaaaaaggatggtggcatgatcttgctgtctatccttgtaggagtgttgctttttatttgattcattgttcttaagtatccatttcaaaagtgaaaattagttattgatccctgttctgtttgtttttaaatgcaaatcatcttatgatggaagaagaattgctcatataggatttttctagtaaaataatgaatttccatttgcttttatgttactttgctgaaagtataagctacaagatgtgatactctcttttaaatattcacatgtctatgtgttggaaaataaaggagaaaaacaaaaaagatggtggcatgaacttgctgcctatccttgtaatagtgttgctttttatttgattccacattcttaaccatccaagcttgatgtaggacaaccctaggatgttgcctactctcaaatagttgggttagggtttttacttttagggtgtaaggagaggaacaaggaataaagtttatggtagaggaaaaaaaaactagagagaaagaagatatgatgaagaaaagatggaaattttagagtctcattaaggccttcaaggagtcttaccattgaggattgtaatatttgcaataaaaaaaaaaaacatcatattattaacatcaatcaattcatcattttgatttacatcaattagctttatttataagcttctctaaaaaatccaaagtttactaggattctaataacctattatgactctaattttaattattttataacttaattagttaatcctaatttaactccaacaaatattaatcctaatttaattccaactaagactaatactaatttaaccccatctaatactaatcttaatttaattctaaataatactaatcattctttaattgaacaaattcaaattccctttcttgatgtatattttagagattcatcctcatcaattccctccgatttgaaaaaaactcgatcttgagttttagtgattttgcatggtcaattgaaattccaagcaatgccttccactctttctttctttgtcaactatttatcacgataagacaaaatgtcgaaaaactttccaatgctttaaagcaagttgatagttcttgaaataattgtgtcatcaacaagcttgtagagagttgcttcccacactcttcttgtaagttgtcttgtggaagaataagattcttgaattccctatattcaaaagaaatttcagcaattcttattatatcataggattcttcatgtttgccaccaatcatgataatattttgtcttggaaattcaagcaccggttcttctgaagcttttacaacttctttgagctttcctacaagttgttctaggatcggttccatcaccttttgcattctagattcatcattggcaatttcttcctccttactagtaactttgaattgcttcttagtgggagtatttgatggtgctcttggtttcaaggaggctaatttttcctctgattgctgatgtggtggaatttccttcattggacgaaggatcttcttacacccattgtgcacaagtgtgtaagtattctcatatccgtcatgttggaccctttcataaaaaggacatagtcttccaagcacaatatgggcaacttttatgggaaaagcatcataacatgctgataattccaaaatcattactaaaattagatgtcaccaaacaacgaaaactcaccaaaatagatgtgttatttacccatactatttttcatttacccatgctatttgatggcgatttggatgctcatttgtctttagattaagcttctcaacaagttcctttgaagctaagttggaattactacctctatcaataatcatagtgcatagtctccgtttgcaagcaacataagttcgaaagatgctagtacatcgctaatcctcctcttcgtttagccttggtatgtttaccgatggttgcataaaaaagttgtagccttcaaccatggttgcatctattgttgtactcctcaattgcatacaccttcaagccaagaatttttgctttgataccaaaactagtgtatgacaaccttaggatggttgcctgcactcaaataggtggattagggtttttatttttaggatgtgaggagaagaacaaagaataaagtttatggtagagaaaaataaaataaaaaaatggagaaagaagatacgacgaagaaaatatggaaaccttagagttttacctagaagaaaatcaatggagtctcaccactgaggattgcaacacttacaataaaaaaaataatattattaatatcaattaactcattactttgatttacatcgattagccttatttataagcttctctgagaaatctaaaatctactaagattttaataactattatggtataacctaattagctaatcctaatttgattccaacaaatactaatgctaatttaattccaacgaagactaatactaatttaattcccactaatactaatccttatttaattccaaaaaatactaatcttgctttaattacaactaatataaattccctttcttgatgtatatcttaaagattcatcctcatcaaagctcctccttcaacacttttaatttgtttggtgggaaattagacaagactagagagtaatatcacactcaagcaggggtgcagagccaatacataatagctcaatgccatttcacttctatatagagggccttgtgctgctattcacttgtttgtgtgtctgaaaataaaggagaaaaacaaaaaggattgtgcatgatcttgctgactatcctggtaatagtgttactttttatttgattcattgttcttaagtatccatgtcaaaagtgaaaattacctattgaacttatcatcatccctgttctgttttagtaaaataatgaatttccatttgcttttatgttactttgctgaaagtataaactacagtatgtgatactctcctttacatattcacatgtctgtgtgttggaaaataaaggagaaaaacataaaggatggtggcatgatcttgctccctatccttgtaatagtgttgctttttatttgattccacattcttaagtatccaagctcctctttcaacacttttaatttgtttggtgggaaattagacaaggctagagagtaatatcacactcgagcaggggtgcagagccaatatctcacttctatatacagggccttgctattcacttgtttgtgtgtctgaaaataaaggagagaaacaaaaaggatcgtgacatgatcttgctgcccatccttgtaatagtgttgcttcttatttgattcctcgttcttaagcatccatgtcaaaagtgaaaattactattgaacttatcatccctgttctctttgttattaaatgaaaatcatcttttgctcatgttggatttttctagtaaaataatgaatttccatttgcttttatgttactttgctggtagtataaactacaagatgtgatactctcttttacaattcacatgtctgtgtgttggaaaataaaggagcaaaacaaagaggatcatggcgtgatcttggtacctatccttgtaatagtgttgctttttattcgatcccacattcttaagtatcaaagctcctctttcaacacttttattttgtttggtggggaattagacaagactagagagtaatatcacactcgagcagggttgcagagccaataagtaatagctctatgccatctcacttctatatacagggctttgtgctgttaaagattttgttcttttccaaattccaaggatccaagggacctctgttttggcatctttcatctgtgttgaggggttgagatggaggatgaaatatgggggagaggataaaaaggaggagagactgagaaaaagaccctagttcaatgtcatcccattttaaaatgtagggttcagatgttgcatgctttttttctttttcctttttatagtatcaaaatcataggatcctaggtttttcttttttgacctttctcatctgcagaagatagaggtgacgtggacttcaaaaatttgtcattctatgtatgcaatcttgtagttttttctaggtgtcattgtttaatattttctgcattgttttatagtaattatttgtatataaatttcataatactattgactgcttgttcttgtcttttgatctcctgctatatcatcttgcattttttttgctgtagttatatgccaaccttattatgcttcatctaaggaaagaaattttaacaatattttttctcatgatcacttttcttttttggatctttttggttttgaagtgctgtggaccctggagcagtggaaaccaacatca

SEQ ID NO: 11092 - DNA, 4390 bp, Vitis vinifera
  Intron number 23 from transcript GSVIVT01011157001 (locus GSVIVG01011157001) derived from phytozome v7.0 (chr-ID chr 8; pos 7469707 to 7474096)
cagtactacaagctataggtgcttttcctgccctggtaaaaactttaaaaccttctacattatggcgcttggtaattgcatgattttatttataaatgatttatttcaatattactgatgcatattggttgttaggtaaataaacaaatattttagcagcacatactgaaagaagatttcagattttagacctattagcttgatcacttgtctctataaggtaatagccaaagttctatcagggcgattaagaggagtactacacgaaactatccactctactcaaggtgcttttgttcaagggagacaaattttggatgcagttcttatagccaatgagatagtggatgagaaaaggtgatcaggggaggaaggagttgtcttcaaaattgactttgaaaaggcttatgaccatgtgaattgggattttttggatcacatgttggagaagaaggggtttagtcctaaatggaggaattggatgagaggttgtttgtcttcggtctcttatgctattttagtgaatggaaatgacaaagggtgggtcaaggcatctagaggattaaggcaaggtgaccctttatccccttttttgttcactattgtcgcagatgtgttgagcagaatgatgttgagagctgaggaaaaaagtatgttgaagggtttcaaggtaggtagaaatagaattagggtgtcccatttgcaattcgtagatgataccatcttcttttctaactcttatgcggaagagctgcaaactctcaagagtttattgttagtgtttgtgcaaatttttgggcttaaggtcaatcttgacaagagtaatctttttggcatcaaccttgatcataatcatctctctaggttagccttgttgcttgattgcaaggcttctgattggcctatactctacctgggtcttcttttgggagggaatccaattgcttgcggattctgggatctagtgattgagagaatctcaaggagattagacgggtgacaaaaaggcttacttgtctttcggtggtaggataactcttatccactcttgcctttcccacattcctagctattttctctctctgtttaagattcccgcttcagtggttgcaaaaattgagagattgcaaagggatttcctttggtcaagggttggggaaggtaagagagatcatcttgttagttgggatgcagtgtgtaagccgagggtaaaagggggtttagggtttgggaagatttctttagggaatctcgctcttttagggaagtggttgtggaggtatcctagggagagtacaactttgtggcattaggtcattctaagcatttatgggacacattcaaatggttgggatgccaacactttagtcagatggtcacatcgttgtccttggaaggctattgcacaagtatactcggtttgtggtaggagatggggaaaaaatttgcttttgggaagatttgtagtgggggactagcctttgaaatcccaatatccaagactatttagagtagtcacggataaaaatatttctatatcttcaattctcggttatgttcgccttttctcttggaactttaatttccgttgtaatctatccgattccgagatcgaagatctaggctgcctcatgcaatctcttgattgtgcgcatttatccacttcggcttcagatgcgagatcctggtctttatcttcttcaggattgtttacagtcaagtccttctttatagccttgtccgaaatgcccgatttatctccacttttctctactaagtttgtatggaattctcaaatccctttcaaagtcaagtcctttgtctggttagtggcacacaagaaggtaaatactaatgacttgctacaattgagaagaccctacaaaactcttagtcctgacatttgtaagttgtgcataaagtaaggagaatcagcagatcatcttttcctacattgttcttcgtcaatggggttgtgacacaaattatttcagttagccaagatggattgggttcctccgagaagcatttcagacatgatgtccatcaattataaaggttttggcacttccaagagagggatagttttgtggcaaaatgcgtgcattactttaatttgggttgtgtggcaggaaagaaatgctaagatatttgaggataaagttaggaattcagagaatctatgggattccattcacttccttgctcctctttgggctttctgttccgtggtttttaagggcattccctttaacgtgttacaaatagattggctagcagtgtgtagttccaatgggatggtctagccaaaagagcttgttcgtagttttcatagtgtagtttcttgatcttttattgtgttatttagttttatctttggtgggaggattcttcatccttctttttctatcattatatatatttgttgtttcctatcaaaaaaaaaaaaaaaaattattgtggctccattggattgactaatttattgacaagtgactcccaatctctaataactgttcaagtttttgaataatgttgttttatttattaatgatttcctaatggttaattaagtttttatattagtatttatataaggttaatttcattgatctttcctaagattttggctaaataacaaatgagttgggtagggccgtatttgatgaaatttcaaaccaataagagccaaacgtatttaatcaaaacctcaggacaggtgagtgaaatcaaccccatttatacatatacatacatatgtatgtatgtatgtctatttataatatttgtaaccatattccaagttggtgcatattttataccttagaatgttaattcacgtagcgcatactggaagaaaactattccaagtttcataattgttttaggctccattacaatagataattttttgactagtgactcttgatctatagtaaccattctagtttttggctaataaattgtcatagttaataatggtttatcaaggttttatacaagtttccacacacccacacacatacatatgcgtatctgtttataatattttatccatattcaacattgttgcatatcgtaaaccttagaatgctaattcactattaaaaggtcctccaattgtggcagtctacttgtaagagctgattcttaaatatatgtttccacaatcattccatactattctttgggtttaaactttaattttagataggtctttaagaatatgtttggttggctagataggatcagatgagatatacatattatgccgtatttatgtaatgcttatatatatacatagatagatattgcataccaatgtttgctattaaaaaaatatgaaattgatctcatgtttagcattatttgaaaatcattctataatctataatctataatttaataaatcatttcttatttctttgttaatagtattcatgattaaaatatttaaaatttataaataaaaaactatcacattatgcttttaaatacatagtagcaatttgtatatatactaaataatactatatattagcattattttaggttgagttatacacatttttttaaattatacacatttttttaattcttttcttttttgagctaaaattttatttttttaatcaaaatttcttgttttgcaaaatgagcaacataaaaaaaaaaaattaaatgaagaaaattgataaaagaaataaatttatgatccattggatatttatattctaattctcaactttgaattataatatcccatgtagagatgatataaaaaaggttagataccttatctcatcctttatcccattagcattattttaggtggtactccttaagtactatccaggacatcaacaaaatctacaaaaagggcaatccgtctctactcattgttccaatttaaatgtacttcatgcatatatgtaatttttttttctatttatttttcaaagtgtaaaggaaaagacttaaaatacacaacatgaaatacatgaaaatgggaaaacaatacctgatatggtttgcaagttgataactatgccttgactcaccgaaactgttccttgtctaaaatcacgctgaatttggaaagcccttatacttgcagtcgaaccaatgacctttaatccaactttggtgagctgactagtattgtatcatttctactataaaatccagggccctaaccccatctctaacatcatagaactgccaaaactactaattgaaaatttacctgcagttcctacattttaattaaaaattatcttcatttttctaagaagggaattcaccaagttgttcacatttcatgccttttgatattgaattaattacttacagttgactgctgcttaatatgctgtaggtggaattcata

SEQ ID NO: 11093 - DNA, 3946 bp, Vitis vinifera
  Intron number 8 from transcript GSVIVT01018061001 (locus G SVIVG01018061001) derived from phytozome v7.0 (chr-ID chr5 ; pos 6013695 to 6017640 reverse strand)
gggcaacctttcgttgaacccagatgaaagtggttcggaataattaatatagagagtggccaactgcgacaagccttctgcaattgaatatgctacaaccacaatattaagtgcagcaacaacgattccccccacggcattcactatatcatcagcctttgtcttgctgctattgaactcctgattcccattctcatcttctgaattccacaattcaaacggcaaaccaacgacactacaagaaccacaaaagcaactcagaccagcattatcaaggatgaagttaggttgttgagccagacttgtgtatgtatctgttctttatatattcacggcagattgctcatggatgtcttccccacaagcatctgacatgaatatcaattggccatctcaaaaacaaggacagatcctgcctagtatcagcctacccgtttcagacaaaatcaaattggatatcgtcgtcggcctgatcagatcataactggaggaattgcctattttccttgagtaacataacagcagggacatcactgaccagaaagacagccacaaggaagattccacaccgtaacccttctttcagcccatgttcattaatggcaagagaaagtgcagcacaagctacaagtatgaggatggtaaaaccctaatggaaagagcatttttaggtggctttgccatgtttgaggccttcttcttcacatcaccttctattcctccaaagctagctttggccttttgtcctccactatttcaggtgaggcttgtttcatcaatcatggagaagtcatacccatgcttaacattgatcacaggtatcagattgattgaatctttttggcatgccgagtgaggaccctgtacgaccttatggcaatctatgatcaagtcattttatttatgcagtgtttcaatttcttgtgaatctgatatcaataatttttttggcagttcaagtatactgctgtttctttcctgtacagtactgtcagtgaggggcctccctcccttgtgacttgaccagcttaacagtatgttttgcgtctgaaaagtcaaaataatgataagataatgtggaaaaggtaaagaaaaatgaaaaaaagaaaagaaaaataatatgacatttccgacgttattttcaaacttcattgtgattttgtaggatatcttacgtgattggttcaaggtttaaatcacatgtgctggcttctctcgacgtggcatgtgaaaggcgacctagtcaaccgaatagcttttattttcatgcattttttattaggctaggtccacagaaaaggattgacataacggaaaaaataaaaaataaaatcaaaattaattattatccttctaatttttggcaattatcaaatcaaaattaacaaaatggaacaactacgctgaaggattaatgaatcttttaatttcatcaacatctcacaaagataaaagttgcatgcgaaatacatgaaaatttaggtacaaaaacactttttgccgttcacatatatctacttacattgttttttttctcttaattttctcgttatttattttcgagattaaacctttaaaaatataatttacatgcatgtatttatatcttcgtatgtatttaagattacttatattaaatgcaaaagacctttaaaattgtataagtttgtctattatgaatatatttatttattttattttttcacttatttcttatatatttagaaatattgtttatgaacatgcataaatgtcaaatactttttttttttttaaattttcttatatgtacaagttaaatacttgtagcaagacatttatattagttgtgcaattttttacaagtccatttattgtaaatatatttacatatttttcttcattgtcttattttttatacaaaggaaatattgtttacacacatgtataaatatcaaataccatttttttttatatataaaagacatttgtattatgtatataagatatttgtactaattgtaccatataacccaaataaacatgttattttgaatacatttgcatatttttatagatattaataaataaaaaaagtcttatagatttagtataattatcttgcatacgggtggaaatatatatatatatatatttgatatttgggcatgtgtagataaattttttagtaatttggtatgaaaattggtcaaagtaaataaataaaaacatatatataaattcatgatatacaaagtttgtatatggcttatagagtcatttaattaaatttcaaaaataaaaaattataataattaaatgttaaattaataaaaaaaataaattaagataatagttgtacttaaaagaaaaaaaaacaaaataaaaattatatgaatattaaatagattttaagaataattttatttgttattttttaaattttaatatattaattatcattaggacttaaagataaattttaatatattaaatagttgcaatgctccgatgcctataatccaattccaaaaacttacatctttgggccaaatatgcattttatatgaaccttagatccatttgctagaaatgaggttctcgccttttaaaaatcatattgaatgtatgttgggtatttttgggtgataacttctccatataaccttcaaagcaattttgaaatttgctcaactattttaacttaattatgcaaaatatgtgacttaaggtaattatagatttatatacccttttaatataattatacatgttaggattataaaataagttgttaactgttagtttgttatgttgttagaggctgttagattgctatgacaagttgttagtgttgaacacgtgtaaacaagtttgttaatgggaagaaactattgtagtataaatattgaagtttgctttgaaaagaaaaaagaggatttcttccatatttcacctgggtcctttcttttcctctttctcgcttctttctctctttattctcttgtttctaacatggtatcagagcactcaacttcagcaatggagaaatttcaacaaaccctagaatcttcttcctctagtcattttgtcccgatttcgttcagtcattctacctcaattaagctcgaaaatcataatttattgatatggagaaaacagattttctcatcaattcgtggtcacaatcttcagcattttgtcactagaattcatgatccaccgttaaaatttcaaagttcagaagattgatatcgaggaatagtgaatcaagattttattgattgggaacaacaagatcagctcttggtttcttggcttctttcatcaatgtcagaaggagttctttcgaggtgagtaaattgtgaatctgcttttcaaatttggaagacattggaagtatattttgcttctcaaacacatgctaaaatctcacagtataaaaccttgctttaaaacaccaaaaaaaaaaaaaactctaagtaagaagaatatttgcttaaaattcgtggttttgttgatctatttgctcttgttggtgtgaatctctctgtaaaaaatcacattgatgctatcacaaatggactgcctagtgaatacgacacattctttctcacaattaattctcgaactgaggattattaaatataggaaattgagtcttttttattagcacaagaggctaggattgagaaacaaagcaagagtttagactttgaaactacttttgttaatattacacaaggtccaggtaactttggtagagataatttttctcaaggcaaaggttttactagtaacaatcagtttagccctaattttggtagaagtaatttttcttccagaggaaatggtggttggagatactaaaatacttggaataataatgctactggtaatactgaaaaattagtatgccaagtgtgcatgaagattggtcattctgcagataggtgttactatagat

SEQ ID NO: 11094 - DNA, 7392 bp, Vitis vinifera
  Intron number 5 from transcript GSVIVT01019024001 (locus G SVIVG01019024001) derived from phytozome v7.0 (chr-ID chr4 ; pos 17618116 to 17625507 reverse strand)
ctggattggctatttcattagtttcagttgtgcaagtaagctgattcctccctggtccctttatttctctattacatcttccattggttattcatttatttgagaagggccaataggttcaaattggtgatagccaaaatgatctccaaggcccaaaatgcctttgtagagggaagacatattttggatgcagtgcttattgccaatgaagcaattgattcaattttgaaagcaacaattgtgcgattctatgcaaacctgatatagagaagacttacgatcatgtagattggtccttcttgctttcaattatggaaaagatgggtgttggagagaagtggattgggtggatcaagtggtacatatccgcacctagtttcattgttttggccaatgacacctcttcaggctttttccaaagctctaaggaattgaggcaggggggtcccttctcacttatttatttgtgattgcgatgaaggcacttagttgtctcttaaagagagcagtagctggagtttttttgttgggttgccaagtgaggaataaggatggtgaagggattttggtttcccatttgttgtttgttgatgatacgcttgttttttgtgaggccttttaggattagataacctatttatgttggttgcttttgtggtttgagactattttggggttgagaattagtttggataaaaacgagttaatttcggtgggtagagcggatattgtagaggaattggcttctgaacttggttgttaggtgggaagtctcccttcctcttacttggggttcccgttggttgcttcatataagtccatggtagcttgggattgcatggaaaagaggcttcacaagaggttgtccatgtggaagaagcaatacatttccaaaggagggagaatcatcttgatttttgtattattttgtctaacttgtctatttgtttcatctcattactttgcataccaaggatggttagattgaggttatagatagattcaaagggactttctgtggggaggtagggcttttgagcggaaaccttatgtagtaaggtggaggattttttgcttagacaaaaggaaagggggattgggggttaatcgtctttctactctcaaaaaggctctcctttgcaagtggggttgacattatgtgaatgagaaaggggccttttggaatcaattgatcaatgggaagtatggggaagaaagagggagggggtggagttctcgagaagtggaggggtatggggtcgggttgtggaaagctataaggaaggactaggactttgtcaattgtagacttttattctttgtgggtaacaagagggggttgaaattttgaagggataagtgatatggggctacacctttgtgtgtttctttcccttttttgttttctttagttgtatccaaggaagtgtgggtggaggatgtttggaactcttcaatggtatgggggagttagagccctagcttcactagaacttttaatgattgggaggtggatgatgtgaaaggatttttgttgcgtctacatgggaagagagtccacggggatgaagaggacaaggtgctttggaaagagaccaagagttgcaagttcataattaagtctctttacaatgccttggagctgggcatttctgtttcttttctaatgaaaatcatttggaattcatgggtgcaacctaaagtgagcttatttgcttgggaggcaatgtgaggaacaactctaacttttgactaaattaagaaaagagggtggtccttagcaaataacgaataaatgttatctatgccaattggatgaagaattcgtagaccacatcctgctccattgtgtaaagacaagggttttatgggatatactctttacacgttttgggtgcttctttcgtcaattagagagattttgttatgttaacatggttcttttgtaggtaaaaaaacataagaaagtttggagagcaggtcctttatacatcttttaaactttttggtaggtaaataataaaattgcttcagaagatgatgtgctctccatccaaaatttaaaagcctcttttgtttgctttctttggtcagagactaagatgtttgtgaatgatggtccttcgacactagttagtttcattgactagttgggctcccgttgaggttggggttgtggtaatacctcctttttttgcagcttcttttttgtttgaaatgtttaggggtaggtgtatctatcttatatactttgggttgctcttttggtgcctttttttagtacatattcttctttatttataaaaataaataaataaataataataataaaaaaacttaacatgggggtagttatttttgaatttgctggatgggccttgcttttgtgtaaaagatgccaaggataaagtttttaatgagggagcaggaaaacatccttatatatatatatatatatatatatatatatatataaaagaggagttacagaaaaaacctacaactaaggcagtccaaagtgcacaaggagaatacaaagggtgtcaagcaaaaagaacataaaaagaaagaagtagaaccttcccccatgtacttcaaacctaaccaattaacaaaatcaatcaaaggcatagatatttcttctataccatgcttaatgcattccaaaaaattacacataaaaaggattttagtgatttttctgaattttccacattttcagatgtcatctcatttctctcatgctgaatgatttaaaaataaataaataaataaacacaaaagggcctaattgcactctttttttccttttcttgacatagaacccattctagtttaacaacatttgtcatattagaacaagattggtttgttcattattctactaaattaattgttggtatttttgttgtttttctttagaatgggtgagattgaacaagattgttgcatctgagcaatggaggaaaatgctggttcggttacttttggaggaaaatgttggtttggagtggagtcgaaaacctttgaaatctaattggagttggtaaaaagtaaggtgatcgggaagattgtggagaggggtagagggttttcctcttggattaaatttggggagaggtgtcttgttgccttactagagggggtggaagactgctacaaaaggaagtgtagggagtctttcagaagagtgtgtaatgaaagtggaaggggctacaagttggagctgcgtaacaataaacctggaagatttctgctttgcacaactttatgtgtagaagagaatgttctccttggttttcccagagggaaaagatttcctagggggttggaagatccttgccaccaaaccaaggagcactggggttgttcccgagcctagacctttggaggcttcaaaaagaagtttgtaaggtgttaggaggaaaagagaggaggtgctcttttaaaccaagcttcctttgcagagatgttgaacagatgcaagagggatgtgaggcaatgtggattgagagcgagacaaaggaggttttgagcagcttggtgtctctcaagaagtgtctggtggggtggtgggatattccttcaagctgtttgttggttttaggctcattgaaatcttgggtttgacattcttggggattgaaaggtgagttacatctgtgtttgttgagagaccctctcattttatttgaatttgaagatgtttttgaagttggaaggatttttcttttgggcatattctgttcgagggaagaaaactgcaattggagtggttgaggccatatgttggctgcttcagagaaggtgcttgcctcaatgaagtgtgggcgagggtgttgggtttaccaatgcatttgtggggaaaagatttcttcaagagattagatgatgcttgtggaggtttcattatggtgaatatggagatagaggaaaggtgtcacaacccaaattctgggcaacctatgacccttacggtcaaaggtttgactgttaggattaatcttaatctaagctggcagtcaacctcaagaccctgattttttattttttatttttaatgaaataaccacagtttaaatttaaataaaattttctctgaactaaggtttcatttcactgacttataaatattattaaagtttagcttgagaaaaaaaaaacatcaatgtctctaccccaagtttataacacaagttccaacaattagttcacaaccattcaaaaataaaatcaaattacataagctgaaattaattaatcaactagtacaagtccaaaaattaaacaaaacaaatactaaaaattctaggtagctcctaaacttcttagggcattttggaaccctccctggtccactagtcggtccttaggcacgacatctacatctaaaaagttttgagaaggaagggttgtgcatttccatgttgctcagtaaggtgttttacacccaaaaaggttaataggtaaacactaaggttcaaacatattaaaataaacacacaaacattaaaatagcattcaaacattaaataaacattcaaccttaaaccaaaacattttattttatctaacttcacaacttatacgcatcttaataattaaataaaaatgcaaatggaaatatgacacacaatcatacaatgcattgttgttctcaagctttcacggaggatacacgttcgtacccaaatatactcccaattcggagtcctcttggggtaagtttttgtgtcttttacactaaagatctcgttcccttcttaattcaccctctctcaagccttcactcttcatcaaatttttttttttttccccatttcacacaacatttcatcattattatttttcacatgaaattgtactagaacccaggcaacataggacaagaacaagaatgccttatacatgaaatcttgtctaaagaagaagaagagtccaaaggaaagagtatttaagagcatgtttaaatgatccacatttccaaatgatctatgaattctcttaccatataatctgaaataggcacagtggagcagctttccatgactagcaatgattcttctccacaaaatccccttgccaactgattaaagtctcttttactgaagagatcaacacccactttacatcaaaggaagagaataacagatcccataagattcttgttttatggtagggtaagagcatgtggtctagtttttctgtacccttgcaaagatagcattgatttgccagaaccgatcttcttcttttcaaatgatttagagtcaaaaccttccccacattgcttcccaaggaaagaacctcacttttgtagggaccccaaatttaaaactatctttctaagaaaaatacctcctacctccaacttcaaatgagaaaggaaggttttgaccaaaaaatttcccatctttagaatccttccaaaccagcctatcctcatcattcctcatgatggatctctcttgaagcctctttagaaaaacctctacacttcccaactcttgatcatggaactgtcttaggaagcaagggctccaaagctgtaccctacttgatttgttacatatttctgtaaaccaaacattcttaatacattaataccagccatggagaaccaagggggaaaaagatactcaggcaaatcctccatcagatatcctgctagaactacgctttcttgccatcctccacaactaaactgatctgactattaaagtcttcgaaatctttccttgtagtctaccttaccctcgccccctcccttgtttcacaggagcactatctgtctgcttcttccccaaacttcccaacaatgatctgcctccataaaagctccctctctgaagcaagcctctaatatcatttgcccagcaaagcctcattaagaatagagaaggcttgaatgcctaaccctttcctgttatccaagcaaacagggttgtatccacatgttaactatgatcagcaagactaatgactgcttgattaattcctttgggaaacaaactgagtgggatttatttcttgaaaattctccgtgattagtgttggcttcttgaatttgcttatgggaggataatctggtgtctaatgtgtatgcaaaattagcaatgcaattgcatagattttctgattaagcaatctagatggtagcagtgatgtgaaacttcagttctttggtggtaagttcaaaattttccacatataccacttttggtggattcatcaatatatgctgttgtagttttcatttgaagtattaaagaaacttcactgatggtgtttcttgattagttgagaagaaatactgtctttggaaactgaaaaactagggttatggatccctgattatcaaatgcctgctataacttttgatcctttaattgctttaatctgagctgcatgcttaagttttgcttaccaattaatccaatccatacatttgttggggtataattatttttacattttaagctggaaaaattttaagtttctgcatcaagtactcttaagccattatagtgagtttgtccatgctattttgacagtgaccgagtaactagcaagtggtttttgcattttttaggatttattttacttgggttttcattagtttgaatcaacttaaggcttacaactaattgttatgagagtttttagtttataaaaagagttattatcatctcttctaagttactgatgcttgaggattgagactagaagctttaaaactttgcttcgaagatgcagttgcctagaactctcttcccctttccctcccttccaatttccccttttctccaagcttttttgcaaatacattgttttctgttctaaacaaaaaactgcagctaaaacagttaaaatggcccataaaaatccttagttataattccattgttatctgttgtagtatgtggctcatatttgagcgaaaagacatatggagaaaaaggggcaaaatgctggagcgagatagagatagagatagaatgtcaacttctgatatatctgtgaggtcttgaataacctaattcattggacttttggactgttggaggggaagagacagagtggtgcgtttgtttatattgcatggtttatatttgcatcacaactctcttctctaaattgttcctaacttatgcttggtttctattacacttgcaggaatcctttttttttttgtgccatttgttttatatgtggcttctatgtttatgatgtatgtagcttgaaaatgagaccccctttttttgttttcattttgttttttgtttgttgttttgttttgtgtttttttttttctctaatatatagtggatgtgaactttttgtccaagagctgtaaaaatgattcttcttatatgacacaggctagaaaca

SEQ ID NO: 11095 - DNA, 5835 bp, Vitis vinifera
  Intron number 3 from transcript GSVIVT01038041001 (locus G SVIVG01038041001) derived from phytozome v7.0 (chr-ID chr1 9; pos 16677012 to 16682846 reverse strand)
tcaagctcatctggagtctgctctccaaggagtcggtgaccatcaaataagaatgtaatggagtttaactccactgactgtcgaccacagtaagcagacataagccttcgtcccgacgaactcccgtgctactccatccaatagtgaggtcattgcctcagcgtacaaaaatttccttggtcctacctctctatgcccaagcctcccgatcgcgaaggcaaataggtaaggcggcatcgcctgcttcatcacaaactcctccaccaccctccccagggtacggtgactgccattccacatagcgcgctgccaccaccacaaacagatggtacggggcatggatccgcgccgcgtacttgatcctcactacgagtgtatcctggcaggggaagaccgaacgggcattaatagactgacactgggtgtacataaatggatacgtcttattgaaggtctaaggcgacgtcaaccattgtagagcagaagattgaggactggtggagtaggagatgaggatcgaggagtggttagaaagagaagcagtgagatggcatcccttgattggatccgacggggagagagagaaggagaacggagctagggctacggggtcggtgacagatgacttatttatgaagtccatgaaaccagcgtcgaaggatgataccgggttgagcacgaaatatgaatagcgaggagagctgtatattcgatacaaagagagaatatagccatgcatggccaaagtaacatgcgcgtgggtataggagaggaactgtggagtagcttccctaaatatggcaatcacccattctgagcagaacattccaatgattctatgagcaatataacaacatctccccaaattcacaaattgtgtccatacgaaaaccaaaagccgtgctagccaagactcttctccttgggtgtacgagtggccaccgagaatagaaagcaaacaacaatgaagcaaggaccaaaacagagtataaaatgaacccaagaaaacaatgacccaagcctcatcttatattgaagtcataggacttatgtgtgggtgaaaaaaaaaaagatggaaacaagattcaaggatatcactcaaacacatgaaagagagcaaaagaagaattagttcgttctagatcaaatttctcatgaagaacaaagagcagatatattataacataataacctcaacccaaaagatttcaatggcaataaaaaatgtggcttagcagacgtaccttataacgctcctcttctttttttctgtttcccttttcagttgcctttcctctcaagcaaacttctatcctccgagctcctcactcaaagcaacatcctccaaaatatcttctctctaaccctgcctcccctctctctccgtctaaaacgcacctgcaccaaaaagcacccacctcctatttgccagagaacctcctgcaccaatgccctcactaacggcctgctatcctccaaaacaaaatacacgctcctaccgaatattctccgtacgtgtagcattctgatggctacaaccagctctctcccaacggccaaatgcactacctgatggccaatcttcaagctccacgtggctccctgaaatttggacacttggcaaaacaaaaatacataaaatccaccccaacatgggggtctacaataagatataaattaggattgtaatagttgattgaataagaatcttttaccattttttcccacaaaatatgtacatttgatttcaaattaaccacgatctcattcacattaatttgggtataagatttaacttatgtacactacgaaattcattttagagcttcccaaaccttgttcgatatggtagaaccctaaggaaaatctttacaaaaatacatacattcttaacaaatatatatatattattctaaagaaaaatacatacatttttttcaagcaaactattaccctatttggccttatttaggtttaagtattcacttatggaagcctgagaatgaattggaggcctttccctaccttgttaagcatttctaaaccctaagaacatccttaataaaaaatacatatatttttatggagagcatgtacattcttaaaaatacaaaatatgtaaattttttaaagtggattgtgactttatttcaccttatttaggtttgaatattaacttatgaaagctttgcaataattttgagatatgcccattccttgttggtcatttttaaagcctacatacatccttaagaaaactatgtaaattctcaacaaaaaaaaaaaaaaaaacacacacacacacacacacatacttttttttttttttaaggtggacaatgattctattcattcttatttgggtctaaatattaacttatggaaagcctcataatgaatttgaggtcttcttgttcttcataggtcatttctaaatcctacatgcatccttaagaaacatacatatgatttttttaaggcgaaccatgactatatacatccttattaggggtctaaatattaacatatggaagtgttggaatgtttggcgctttccttacccgattgggcatttctaaaacctctgtacaattttatttttttttaacatatggaaatatgataagtacatgactagtgtcttttcataccacatctatagcattcattcttactaacatgtttgctttgtcattatataccctttttacgttgtctctcaaaattattcaacttttgatggtttgaattgttttattttattctaataatgactataaccaccatggtaccaagaattatatttaccatggccatgattgtgtccttggccttgttcatgtccatgtccaagtcaatgtctaggagcttggatggatgtggcatttgcttcaagcaatgacatagacttaatagtatgagattgatgatttttcagtaaaagttcattattttatttaatcataagaagacattaaaataattcaaaatatttagtgaaatgatgttcttaagattgtttctataggagtacattcgagacatgaaaagtggtaaatgtcttttcaagcatatattctttagtgactttttttccatataaatttaattgtgaacaattttttaataaagtcaagttgtggccattgacagactcgaaattttgcaatcttaagtgcgtccaatcatgacgtgcttttggaagaattataatcttgtggtggccatatcattccattagattattccaaaggatgaaagatctttgatcgtaagatattcaccttttaatccttcatcaatatgataatgaatgaatattaaagctttagtgcgatcttgcgatgatgcctcatttccttatttaatagtcttttcaagattcatttcatttaggtgaatttagcatccagaatccaaaataaatagttttgctcaaaatattgaatgtaacaaactcaaacttggtaagatttgacattatctaaaaattatattccaaataatttcattcaaataacatttcaatttattaaaattaattataaataaatgaataaaattatctaacaatattttatcaagttaatatttgttaataaaaatataatgatttaagattttgttatattttatcgctttaggattattataaatttggtaaaaaaagtgtatcaacatcatgtagtattaactaataaaaattacaaaccgatagttttcatagcttttggctatggattatttgcatcataacaaaaatatgtaaatttgataccttcaaactatgaaatattcattatatacataacaaaaatgtgtaagtttgtaactttcggttatacattataattaaaaagaaattagaaattacatttaaagcttttctttatatttttgtaactttataatttctcatataacctctggctatacaattatacatattttacatttttttttttataacttctagttgtaattttttcataatttttgtctataaaaaatattttctattttcttcattaaaaaataaattaaatagaaaataaaataaaagtagaattttatcacatatctttgaggtgagaaagaagatattttttggtaataagtttatccttttaatgttacaatcttatataaaaacttataagagttttcttttacaaagactaactttgaggcatccattttattgacctaagtctcctatttataggagtcgggaaagactaggattaaatataatatttgattttttatggggaaaatgtaaaagtttacacatcattaatttagagtacttgcttaaatacaattttttcacaaaaatttaaactaaattccataaaataaaaaataaaaaaaaagataactcattttaaaaaatagttaaactaggttaattttatataatttgagtgagaaataaatttattataaattaaaattttgtcattcacaaaaaaatcaaatatatatttgttttttaaattttaaattttaatttttttaagaaaaattagattaaaaattttctcataaattgattgctcgaaaatgaaattaataaaaaataaatttacaaaattccaaatccccacatgttgccactatttttgccccataattaatcccattcttaatcaaattcaattccataaattattattaattactcattcaaaaataaaaataagtgacaaaaaaaattaaattagaaaactatttaatataaaatttaaaaattcagccttataaaaaaacaaagctaattatcaattctaataagatttttttaatcaaaattctaaagcataattcacattcatctaaatttctattagaattaataatttaaaaaatataaaattaaaatttgatactccttcaaagttaaaattacaaaaatcaatgaattaatttaacaaaagggaacccacatttcaatcacaagtcttcaaatccaaagatatacaaacttagaaaaattctaatagtttctaacaagtctaattatacttgtcatcagactaccaatttcttatcaattacataattaattattataaaacttttaatatgctaataaattataatataaatatttaaaaatatgttgaattgaaaattaatttgataagaaataaaatattatattttataaatatttttgtaatgtaaaagataagtaatttaatatttaataacatttagtaataattaaaatataaaaaaaattaaaatatttagcaatatttaatttattcaaatttaaaaacaaatttagatctaaataaaagcacaatcatcaccgaaattttaaaaagttacaataaacataaagtttaaaatatttatttaatttcaggaatctaaaaactaggaagggaccaatattgacttgtccatccaaaaagatgcaagctgtattttcttttccctacaatatcattttttttccttgcaatatcatttttgtggtgggaaattatgcagaggaccagtgtacttaattgacaaggctgacgaaagcaatgacatcatcccacaacaaaagtttgcgtaatttgcaaatgctggatagatacgaaacggagataagaatgtaatttagaaaggaaaatgcaagctgaggtaaggaattattgagcatcaccaactcctagaaggctagaagtacccaggggtttaacccactctctgaaatttgctataaatactcaacaatttcccctgtgttgttcatcaatacaaagagtttgaatcttatcaatcacagtagtagcaatgggagacgagattatcctgttggatttctggcctagc

SEQ ID NO: 11096 - DNA, 1715 bp, Vitis vinifera
  Intron number 1 from transcript GSVIVT01012257001 (locus G SVIVG01012257001) derived from phytozome v7.0 (chr-ID chr1 ; pos 48758 to 50472)
ctactgtgagcgaggccaagggtaatttcaatttctttcgctctaaggtttgatctttgtttctgatcatatatgcttcaattccttcattgcacatgttattctgtgcaattaattattttctttttctctttattgtcttttttctcctgggttggttactgtaactagggtttgctcgttctttccaatttacacatctttcttctttgtgtgatgattcggattcaattcttcttcttcttcttcctcttcttcttatttagggtttttgagtcaagaaacatgaattagacttaacaattggctcctttgttattgttgttgatgcctctgcatgggattagaatcctaattggtgtatttttatttttttagttttattgtttcttctatttggaaattattttgcattgccttagggcagacctcatgggccctctgtctggttgcaaagaaactgagggaagtaaaagaaaataaatttgttgcttattttttgtgttttgttttttgaaacataaaatgctttcttcaattcaatggagtagttttattaagctctgtcatatgtaggtttttcttttctgggttcctaaataattaaccatttggccacctagcaatgactgcctcaacagtagtacaaaccgccaagctagaactccacgcctaccacgccatgactttaacactatgtttcaggcttcaactatcacaatctgtgttctaaaaattggtcttttggttatttgtgctttcaaaacttatttggaaaacaaggcaatgcttgtggaagttggaatcaaccaaaaagcagcatgtttgctgtaggaaataagaaataaaaagaattgaatcatccaaaaaaaagtttattgaccaaattagagaacgtgcatgcttgggaatagtttaatagttgcaatcttgattgtttcttatgaggatgaatctctaagttatacattgaacaacagaattactattaatttcaattaaagtgttattagtattacttggaattaaattagaatttgcatttgttggagttaaattaggagtagctaattaggctataggagaattaaaattagagtcatgatggattatgagaatcctagtaaattttggatttcttagaaaatgctataaataaggctaattgatgtaaatcaaagtagttgattaatgattaacgatattatgttatttttcagattttgcaaatttcaatgatgacacttcattgattttcttctaagtgagactttagtgagactctaaggtttccgtgttttcttcttcttatcttctttctctctattttattcagctgtgataaacattctcccttgttatcctagcccacctatttgattgcaggcaaccatcctagggttgtcctacatcagtttcaccttctttttttttaatgtattttattaaaattatggactttttgaatattgtcttcaacttattaaccttagacaaagaagattattaaattcttctcaaaaggagtcctacctaactccaaagtcatttggttaagatttgatgatatgatgtaggactgacattgtggaattcatggtatttctactacaggatttagtagcttggatatcttccatgaatgctttttttttttttttttttctacttttgatttatttttctaaactcatattcttgtaatgcagaattaa

SEQ ID NO: 11097 - DNA, 3636 bp, Vitis vinifera
  Intron number 5 from transcript GSVIVT01014003001 (locus G SVIVG01014003001) derived from phytozome v7.0 (chr-ID chr1 6; pos 8756659 to 8760294)
gggtcatagcagtggtgagtcatgagattctttagcatgctttttgttttcttctcttctttctttccatacttcttagttctataaagcatatgttgctctgttgagatcattgaagcttggtaagcaagtttatgaaaaagcattaagatcctgtgcagcatcagaacttattcacattttaagattgttatttctgactttgtaatttgttgcttaggaatttgaaagaagaattatgctgtctgttcaacttggttacctagttttattcaccaatgatctttgtgtggagtagtcttggtgttctgttgttgtctaatgcttttcactgtctcatttttgggagggaactttcattccatatcactatttttatatctcttttcatttgcagtatattctttgtctgcaatagaaaactgataaaggtactaacttctaaataaaaatactcgctgcttcacatttttaggaagacaccctgttttggtcatttgcactctctttagccaaagaaacaaaaatttcaaggtgatcctatatgtacccacaaagtctctcggtgcacccatttgccttatttatttattttattaaaaaaattgagcagctgaatttatgaaatatcctcttcttcaacctcaaaccctaacctcctttttctcctttctcatccccttctccaccatttttgtcattttcctcgccttctattccttcatatcccccttcaatttaagtcccatccgcaatttaaaaaaacaaaaataaaaaaagaaagaaagaagtgcagtgcagccatagagctgctgcaagatgcccaccatacacacactgctcctatctctgtcttatttttttattttatctatttttttctttttttatcttttaaaattgaagatgaggataaggtttggggttgggtgggaggttgaagatgacgatgttaaaattaagaaaaagaatggggatgtggagaaattttatggatgcatatacaatcacccaacttcaatcacaatacttaattttccaaaaatgacaaaaacatccttaaaggataaaagccattttgtttccctgatagaggggtggttttggtaggtgtggagtgttcaaaaaggctgcacttttaaaaaaatttcagggaaaaaaaggctaatgtttggatgtcaaaaggatgggaaaaaaggaagaactttcattattttcttttccttttcctcattgaaatccaaagaatgccaagatatttttgttatatggtagcagcatggttgtaaacatgaaatctgggtataaaattaagccactcagaagttcttcctttataatgaaaaatttattgatagcatttgaaaattaaatgcaaattctttttaaattgttagaaaagtaaaggaagaccaaactaagtccaaaaactatttattttacaaatataccttttgaaacacttaaagtagaacatactaagaggttttaaactttgaactttgggctaactgttattctgttttttttttttttatgccaaattccttgggattttattgatcatactctcttctttgccttgattatggaagttaattttgttttaaaaacttgttttgcgattaaaaactacagaggtaaaatttttttagataactatctattttgatgaagcaaaatggtaatttgtttttatttatttatttttaccatgagctttctgatatctattaattgcataaagaataccatataacattttgaatcaattcggttagataatatggaaagttcatatatagacatttcataggtttctttggatttgattaattaatacatatttcaaaaaaagattttcaaatttttgcaacaaaattcagttgtttatttatttatttttatcagaaacaaactaattgattaattaaattttcaagtacaaatgaaggatgggaaatctttccaaagtgtataaaatttgatcaaaagaagaatgagagaacttctccgatagaatttagaggatagctttatatcacaggtgcaccacatgaaattgtaaagaaaagcaactcaacactactcacgggtgtaaaaaatcccctataaaaggaacccatgcattgttcctctatttgctaaaagacttaacaacattattagttgaagaaggagacctaggaaaagaacagtccaaggtgcaatcaacattcaaaatttggtggagctatccatcataactccatggctctctctgatttagtcacctaagaaatcaaaatagcagaatccccttccagttgtaggttagaaaggctaagaatcccagcctattgcaatccttctaaaagggccaacatctctaccttggtggttaaaccatctcctgccagttttgaaaaagctttaaccaccataatggtctttgatcaccccttcaatccccaattgacctggattaccaaaagcacaatggtcaaaatttaacttgcatgagcccaataaaggtggaacccaaataaggagcaactccctttttaaccctttcgacctacatgccaagttcaatcaagctgtagaacatttagagggatgccctcaaaagttgtattagaggcctagaaagaggaataaaaatatattaggtcccagattgcgtataaagtctccgctgtctcaataattcttgcatttctttcctaccaaactatctagataaatgtgagacaagttatgtgctaaagtactgtacctctaaaagtactcccaaaacccacaaaagagatggtcactatgtctgttacacttctacaaagaacatagtttagcagtctaattgacctgtgctcaaaagtggtaaatattcttgtatgttgcacagcgtgaattgttattccttataacgaatccagtaattttttgtggataaatttgtaaagcaattggtttccaaaccttactttttgtactcgtcaaaaagtgtaattgaattcaaggcttaaatttttgagggtactagtaaacttttcatttctacaaattcagtttagatttgtaatttagtagtaaagctttctatggttagcttttgttttatcaacgcccttttgtctctgtttgcacaacctgttaggtttgtatccttgtgtacctttaccttttggtaaattgatgtgatcatacacagaatcttgcaagtagagaagctgtcagaaccgccaacttttatatggttgatacattctcaagattgagaagatgcaatatccattacaactattccaagagcattacaaatgtttgatctcaagtaataggttagacaaacaagaaacgactttcctaaattttggaaatacatctattgataattttaagtatgggttttcacatttcacaaactctagtttgtagttcatgtaggtcaagttctttgtaatttgtctttcacattgaccaagaagttggggaactttatttgttcattggtttgatgtctttaaagtgcttggtcatttgatagtttttcgaactctcttctaaatttcagtatgctaatttctaattgatattgtcatatataattcctacactgaagattttgtaaattaatgtggttccagggtggtg

SEQ ID NO: 11098 - DNA, 9364 bp, Vitis vinifera
  Intron number 6 from transcript GSVIVT01027342001 (locus G SVIVG01027342001) derived from phytozome v7.0 (chr-ID chr1 3; pos 16264411 to 16273774)
tttcgggttgtcactgagaacactgtatttatctacccccttcttattattctttaatacctctctaattaataatatcttgtgataaaatgttattttgtgaaatctacttccatgttttacttaactaattcattgttgtaatcctttttcattttttttcttttttgtttccctgaagtaggtgtctatcaattaaattttccttatcaattgattagataaactattcactatcaagtatcttcatatcttaatcactaagtagtttctaaatatggcgattattcttatttgcaattagaatgacttccatgattataataaaacaaaacggtgtaaaccaaaatctacaataggtataggttttccttacaaataaaataaaatagacatttctttactaagtcaagaaaagaattattttttccatattagttgaatttatgtttatattgttgtggaatcttgttcacatatattcaatatcttcaattaaagtgaaaaataataacaaatgtaaaaaattgagaaaaagaaagaaagaaatttaattcgtagaaaaaaaaaagaaagaagttgaaaatacaaataattgaaactcttaccaattacacttcagcaattcaaactatcacgcccaaatccttagaattaaagtatgttcaaaccatcaaatgtacttttttacattgttttgaacaaagatttgaaaaagtcaaataataactcaagtaccaataaagttttagtttgaattatgagtagaattatcaagaaacattgattcataggacttagtagcattatctaagtcaaagattaactacatagagtttttgttcatcgttaggttttttcttaatattatttagcttgaagacttaattttctactaacaagagagtactccaaaattattatgtgaacttcacaaagtactggataacaacaaacccaagaaaagtcttgtgttgaatgaactctcttgtatgagtttctttattatgatatacttgttttacatatttgatacattatcattagtaaatcttttgtagtaggatttgacccttttccactattgctcctacaaagtgatacttagtctttatgttcagtgttcttgagtaaaatattgggctttttgtaaaatatttatataatcacatagattaatcatacatgattaaagaatactaacaataggaaatcactataaagaacatacctgtttgagccatcataaaaaaccatgattgattgttgcaaccaagtcttcctctctatgatcttgataacagctatggtggctctatgggaaaacagaaaaaccctttgtatctagattagagaggggacttagcataactcaaattggattctcattgggccctcccataatgggcttcaatgagacccatagcctacacttgccactcaactgagcttctactcaaaagatgcaaaacccaatccaaaatgtgatcactagttaattgggctcattatataatagactatccgttaacccgtttttgcaaatacaaattattcaattaatgttagcccatataaaaaattttccaacacttttagctagacatatcacattttgactgttgcaatgtatcacaattaccttttatggtacttgaaattactaagcaagtatcacaattactttttatgctacttgaaattactaagcaacccctatagccaaataacttcttcattgcatgcttctatgacttccttatacttctgttataaataatgcaaattttgattgtaacacatgattagtaatagaattttttaatacctttttttatatatgcttttagatttttaaatctcgatatcttgcatagtatcattgacaattccagccaactatagatcttgacaactataaaataataaacactttgaggtacctttcaaacaatgaagagtctattgcatgtcatagaaaacactaagcttcctattgcaaatgaatattatacttcatacaaataatgtatcttctccacgtctatgttcttagagattgttttaaagatgactagcaagtagtagggaacaaagtattgactagttcatcatcttctttattgaagtaaggatagaatatataaatataacatttttgttttatccaaattttcctcttctttttatccttgaatattttcatcctaagaatttgattagaaactcttaaatcctttatttcaaaatttttagtcacaatgaatttcatatttgcatttttattaacaattaacaagtcatctacatataataaaattataaagctaacactatgataactataaaaagcagacacaatggctagaatcacatatttggaatcctaagctcatacaagactgaaatcgcttataaaaacacctcagtgccttctccaattcatatggaatcctaagtttataagactcaaaaccaatagacacaatagccaaatcatatatctaaaatcctaagctcatgaaggattcagatggcttttgaaaataccataatgtcttctttaaaccattttgaatcttaagctcataaaggactcaaatcacaaccaaattcttatttttcttcttctttttcaaactatatggaatcctaaactcataaaggactcaaatcataatcaaattcttccttttttttttttccttatatttaagattaccatggaaaaatacagtttttatatatagttacttgagttccaaatcaagtgcaactacaaaactcaacataatatatacttagtacccaaactacgtaaaaatgcaatttttacatctacttgcttaaaatttaaatcaagtgtagttatcaaacccaacaaaatacatatagtacccaactatggaaaaatacaattttacatctagctacttaaatttcaaatcaaatgcagctactcaacacaaaaaaatacaaatagtatccaaacttattaaaggagaaagtttatctaagtaatgcttgattttttgagaataaatttttactataaagtaagcttcatatattttcatatttccattagtatgcttttcaacttaattttaaacccatttgaacaaatatccctctactctattgataattgaataaagtcatgcatcttgttttgatacaaagccttcattgcctcctccttagacactttccactagttagcatctttaaaatgataagactctttacatgaataaagctcacattttttttcctatgcaaacaaaagatgtcataaattaatttaattaccctttataattttgatgatgcaattatggtattatctcaatcaatggtaattaattaaaatagtttattatatttagtaattattccattatttttaattttttagaaaatatgttattgcttttaatttgttattatgtcaaattaatatataaatttgttattatataaatctcttaagggtatttttgttcaattttcattcctaaagaaagagaatgagattctttaggcaaatctaaggaaatccattctccactttgaagaacaattcctcaaaattagatgggtttcactgttttttttaattccaagttttagtaagtgcaagaatgaaaagaaatgaaacaattccctttgatttgattccttagaaatacagtaaatatgtcatgagagaaactgactttatggtgctttccatagggctagtgttcacaaaattatgaattaataaactttaaatcatgaagtaaatttctatcaagtagtgcctaaatccctacttgctcatgtgatccaaatgcctatgccaaattgactctatcatatcattaacaattataacttgccaaccatggtatttttttttttgtagatacaaatcatgaactaattacatctttgcaatcattgacacccccttggttattttcaattacatcttctcactagaaaattggaaaccatcttcaccaatttttttcaatgataaaaaaaacccttccctagattcattatgtgttttgcctactaaattgaatgcatggaaccatcaacattgtaattgaaacatctctaagtcccactattttgcattacttatcatcaaccatgtaaataatagcaccacataaatggtaagtatgtgactaacctcaacctagtgtcatatggaatgatatagtggaatctgaaactctttaatgttgcatatttcttctaggattacaaataatgcctctatttcttcaaatgaatcttcaactttaacaagctttacccttggatttcatgtttgtatattatttttagaattaccttgattagttttccttaatcttaagtcttttctcatatgctcatgttttgcatgattccattacttccctttactcttgcattttgaattggatccattttgttctttactagcaccatgaccccattctctatatgtttgttttgtgctaccatttgcatcacctaaagaatttattaattttatatgtgactattttgtgagcaacattgatattacaaattcataagagaaatttgtgtctttaatgatgatcatgatcaaaatacctagtgattccaaccttgaccaaagtagaagatcaataactcttacattttttaaatatcaatttttagttcaaacaccatttttattaatcatagttatgttgaactcattcaactgttcttgctcagaggactttccatcctagagatgtagaaattttcatggagaaatcattaatttgatatggattttccatggtataaattgtgaaaatttctcgtctttattcatggtttctttttatatgttgaacaatacaaccttgtctagtggaatctaccatggccaactatcgttctcataaaaatcttcatttgtaatctctactagtttgtcttcttttcctttaggagctattttttgtccttttttttttctaacaagcacttgtatcttcaactcccatgttaggtaattggaatggttgaatttggtatcttagactttatggagcccaatcctttcatcttgacttgttcagtattagaaagcattgatctcatatgttaaaaatttcaatattggttccaaaaccaatagttgaataagtttgattgcacataatgcatatattaatgttagtgaaaataaaatcaaataaaaaaaatagagaaagagagataaaaacactaatttaagggcaaccaacaatatgcctacacatacaaggcacaaagtgatagtcttttgtttactagaaaacaagagaaaaaagaattatagataattgagacatttgctaattgatctttttgctagtatagtgtctttcacgcaaaatcttagaattgaactatatttaaaacccttagtgcaactcttttattgtattttaaacaaggatataatagtcttataataattcaaatactaataaaatttagttttttttgaggagttgagttattaggaaataattattcgtgtaaactctttagaagttagtgtccttgtacttgtgcaacttgaatttttatttattatttttaaataaagatacttgtatatcttctaacatatgttccaaccaaccaaactttatacccaaccacatattccaccttatttggactaaatatcaacttcttagtaactctgtcaagcattgtgtgcataagtaaatcatttttctataaaatatcctattctgatcctctgatcagcgaattataagattttggctccaaattataggaattgaacttattcaataagaaatagatttatttttctagatggtcaccttatattgtttgaataggagatagaaatagattgaagtaatagaaaacataccaatttcattcaatatgatgttttgtatggataactctaacacaagtgttaagatgttgcactcaaactcttaaggtgaaaagtttagaatccatgagtcctttctatgtgtagttggccaacacatgctataagtgttaaaatgcactgaaaactcaacttaaaaagttcaaaatctataaaaggatcattactccatgtcttttctacatgtagtttctaaaaatcagtttttcatatttcatcctatggactcatggtcctatttattcctcatctcctcatactctttcattatttttatgcttggctcctaaatttgtatcacaatcttatttttgttttaaggctaaaaataaacatataacaattacataaagagagacaactaataaaataaaacaattaaaggacataatttattgtgctttcaaccattattatttaactattctagaacccttatttatacatactcatatctaacaaaataaaaactctcagtaacaaaatatataaaaagattttaggacacaattacgttagtatagaaatgtttttctataatctaccacataagttaataaaattttactaaaatttttagctttctaacatctttaaactttagagtatttttaaaaatattaataatttttaaaatttcaattgcactctcgttttcataatttactataataaaatgagatcttgtatcaatatgcttgctttaattatgcaaaattaaactatataacaattcaaccatatatttgttgtccttattattgataccatgttgtttgtagcttttagccaataattgcattataattctaatattcttctttaccattcttttctttttatactcatctcactccaatttccttttttcccatttggaagagattgtagctcctatgtattgttcttctttattgcatgcttatgtttcctcatcattgtatctttgcatcttttatcctgtattacttttttagaaagtattggtttgccattcgcaaaaaggcaaaagtgaattaaattattttattatttattttctcataaactctcgtaggctcttgaaacatagttttatcttcacttgaacttctcaatgaagaagataatgttggaattttatgtattaatggaggtggattagtgatctctttcaagttttcccttattttccttcaccaaagagtggaggaataccatatttgcattattaggcaccctaatcccatgtgtcttcttcattaagcttgacatgtctactaaagttgatacttccattgcttagattatacactttgaaacttgatttataacctatgaaaatatgttttctactctttttatctgattttgattgcttttgatctaaagcataaatgtatatgtaatgcttccaaatattctcaagtgtgaaataatgtctttttttctaatcttattgtggtattttatttcattcactttgattaaggaatgattagataaacaaataaggtaattagttgcttcagcccaaaattctttagacattttcttacttctcaatatacctcaaatcatgctaagaataattttatttatattttagctactccatttgttttggagaatatgaaactattaaaggttcatgaatcccatgattctcatagtattttaaaattctttttatgtaaattaggttcctctatagaatatctttgctcttatattgcaactgcttttttttttcttttcaataagtactttaaatttcttagaagtactaaatacattagttttttttctttgtagtaaagttatgatcaaagagtaagaaatatttattcatatcaaaagagttaggataaattgtgccacataatctaaaccaaggcttcattgatcatttagttgtttccttcaaaaacttttttaattggccatgttttctaagtaaacattcttcacataattgatttaggtgctctatataattctaccactagttttttcttgctcactattttcaatcctaaaaggtaatgtctaaatccaagtgccaaattcaagatggactgatccaagattttacacattttacactagtatatatttttaatattcaacaaaaatattctattttttaaaaatcatgaacatattaacaagtaaattaacattttgatatctcatctagagatttgattagaccataacctttttttctaaaagttgacctaaaattaatatatatatatatatatatatatatatatatatatatatatatatatatatatatatatatttggcatgtagtatttgaaataaattaattgatgttttctggttttttaaataaataaatattttatttttaacctttattagaattttggatgcatgtataaaagtatcatgaccacttgttgacaaacatatttttgaatctacacatatgttgattgctcaaatgtaaaaaataggatgtatttttctcgttattttctcctatacatatcaacaataaagtaggttattcttgatatatatgtatatttaatgatattctttgtcccttccatatatttagttgaacttttacatttataagtagaagagccattattttttttaaaagaaaattatatatttgaatttaatattcattatatttttcccttttattttgacttgagttgcattctcttccacatcctcttgaggaatatgaattacttgttatttttattgaaaataaaaaccacttcaatatctatttccttgggcatgaccatgtccaagactatgtctacaattgttttggcttctttggttctcataaagaacttgttccaattttcttagtctttcatttttatgagtttgtaatgatctcataagtcaataaatggatataattttttttctcttcaacaaccataacaatataattataattaaatataaagatccaaacatatttttgttagatgaaatatttaaggagatacacaaaatcaagcccataaagggcatgaagatactctcatcaatattttcataaatctagagaaatcaaatattaataatatttgatttttacaatatttggaaagtatcctaaaatgaagagaatcaaatatgagaggagttagggatgtaatcctggtctcttcaaattatttgatgctagcaaataataagtaaacttcataccatgtgaattgatctttaagtagcatgcatactttaacttatgatttcttaattaatttgagttacaattacttcttgtttggtttaaaagtagagccggattggaactaatgtcctccgtactatcaaatatatgtgctcttagtcttttgagaatatatcaaaatattggtagcactaattcaatggtttcttgaatttgtgtaggtatttgct

SEQ ID NO: 11099 - DNA, 9123 bp, Vitis vinifera
  Intron number 7 from transcript GSVIVT01012939001 (locus G SVIVG01012939001) derived from phytozome v7.0 (chr-ID chr1 7; pos 13912071 to 13921193 reverse strand)
gttcttccaggtcatttatctttttacttacaaatgaactaaggtttcatttagtatgtcaagtaaaacatataaatatttaccctagaggttccattactactatataaataaaaatttagtggtgttttgttgtcttctctatcttgcaagtgaaaatctttttgcaatcagaagacataagactagctgtgttcctctgagactactctatggattttaagcttgactatgcccatgtattacacttggttgggattttaggggttgttgtaggtgctaaggctatatgacacattaaggtacaaaggtttcctggagactggctgcaaggcacaactgaagatgagagcctgatagaaggaaacagtgatcatatatttaatattttgtgaaattaaataatactactaggcataaccctcgtctaaagggtcaaagaattgaatctttgcagcacccataagggtcaaaacaacgtaaattttttttttttgattggaaacgacacatagatatattgaaagaaaaagaagaagttatccaaagctgactcaaacaccctgtcaaattatattgaaattataattagtctggttcttatataactaacattatgccacattagatgagttacattttttacataatatactatcaaatataaaaaggcgaacctcatgcttaggcaagacagacaacattgtgcaaagtcaatgtagaagaatattgcacacatacacaaaacagttttagtaaaagaatataggaaaagctttgcaaagtgacttcagtaaagacattttgctaaataatttaaaaaaaaaatattttattggaagttgcaaatcaaactgaaagacttcaaaacctaaatttactgttggagaaacacaaagagaggaatgggaggattttttaagaccggtgggggacttttaaggcattgtgggatttagtttatttcctttcatctctttagacatcactttgtgcgacatttgagggtagtctgagtattaaactgctaaattggaatttagtgtatagatctactaggccatttaggggacactacacatttggattcctccttcagtgggtgttgtgaagttgaactttgatggatgttttgtgggtattattccaaggcaactaggaaatagagaaacactcacggatcatcttggaatattggtatgcacatttgcaaaaaatgttgagaggctagtcattgaagcagagacttagctttgcttgaaggtggccaaagctaaaggtctctccaatctcgtagtagagggagattcagccatactcatatcttgggtgaataagaaaaaaagagatccatggaagttagatggatggttccaccaaatctttgatattgcctcagagttggagtgcctttttgttggattctttgtgaagctaatcaagtggcagatttgttatcaaagagaggagtgaaagatttgacatcctttgtgggggattttctgccttcatgaggaattggttttatagttgtaacctctattgctttttgatcaaggtgttgtaatttaattataagggaaggatttctcatctttccttgtatgtaattgtttcttggcaatgaattgttttttttcttatagaaaaaaatagtatttgagaaaagaacctaaacaggagttttgaacaagaagaggagagactaccatgatttggaacaaggaaagagtcagttgggggacctagcatagatagagaattttgtcaaatttgtgtttcaaagatcttcttacaacttccttcacagagagggggagatctttttcaccttcatcttcgttggaaattctatcttttttctttagggagaagggtgggagggtggaggtctagggtgtaattgaacatgacgcacagagaggctaggctttgacaatgttaggtcttttagatgctcactttttttaaaaactattggcgttgaatagttcaattttggttatattacatgggtttcccaggtaaagcgagaacagtgagaactggatatttggcttcatagaatcattgtttatctggtggattagtttgctctcactcttggatttttcattcaaacagacagtggattaatttgcaaaagattgattagaactagaaacctttgtagggtatttcattctttgagttgtttcttttgtaaggattttgatgggccttatgaacattgctgttactattctttttcttctgcagtggtcttataattttggttcaaattcaatgaattgttgttcccattcaaaagcaagagatgaaaatctatttgaggtgcatgtcattccttatcttgttgattaattaatactgaatggtaaaaatacatgattacccttgggaaagcatcaaatcccagattaatttactctcaaactccccctctagctggtacgatttgtattgcattttgatggtgtatctttttttgataggaaacgacaacggaatatattgataaaaagaaggtacaattagaaggatgagaaatcctcccaccaaagaaaaacaagactacaagaatcaaatataagaaatacaacgagagaataagcaaacggactatttacacaccgctaaccaatcaagttgtaacatgttaagaggtatccctttaaaaaccttagaacaaaaagcccatagagaagccaaaaaacgaatagaatcccaaagaaaccctgaattccttgctttatcctaaaaaatccttgcatttctttcccgccacaccacccacattaacgcgatgcacgcgtcttgccataacacaacccctctcttagaagaaccgaaaccattaaattagtaaaaaacatgtcagagatgctccttggggaaacccaatccatctttgctaactgaaataatttgtgccacaaccccttggtcaacgagcaatggaggaaaaggtgatctactgtttctccatgcttcatgcacaacttacatatgttgggactaagtgctttgtggggtcttctcaattgtagcaagtcattagtattaagcttcttgtgcaccaccaaccagacaaaagacttgactttgaaagggacttgagaattccagacaaacttagtagggaacactggaggcgcctcggaatattgggataaggccagaaagaaagatttgactgtgaaaagacctgaaggagatatggaccaggatctcttatctggaaccgaaggagatatgtgtagacgatcaagagaccgcatgaggctttctaaatcttctatctcaaaatcagtaagatttcggcgaaaattgaaattccaagagaaaggacgggaatacccgagaattgaagaaataggagcatttttatccgtgactacgctaagtaatcttggatattgggttcccaaaggttgatccccccaccacaagtcatcccagaaccgaattctatccccgtcccctaccacaaaccgagtaaacttggaaaactcttggaagacaagtgcaatggccttccaaggacaacgatgagaccatctaacattattgttgacatcccagccattggagtgtgatccataaatgcttaagataacctgatgccatagagctgaaccctccctaggatacctccacaaccacttccctaaaagagcgacattcctcatagaaatctttccaaaacccaaaccccctctcgacttcggcttgcacacaacatcccaattaaccaaatggtctctttttccttcccctacgcctgaccataaaaattctctttgcattctctcaatttttgctgccactgaggcgggaatcttaaacagggagagaaagtaacatggcatatgggttagacaagattgaatgagtgttatcctacctccaaaagataaatacgccttctgccacccatctaatctccttgatatcctctcaatcacaggatcccaaaagccacttgccttaggattccctcctagaggaagacctagatatagtataggccacccagaagccttgcagtcaagcatctcggccagtctagaaaggtgattctgttcaagattaatgccatagatgttgcttttgtcaagattaacttttaaatcggaaatatgtccaaacactagcagaacactcttaagcgtcatcatatcctcttctcgagtactggaaaagaaaatggtatcatctgcaaattgtaaatgggatacccttgttctgttcctgcccaccttgaagccctccaagacgtttctctcctcagctttcaataacatcctactcaatacatctgccactatagtgaacaaaaaaggtgataaagggtcgccttgtcttaaacctctagatgccttaacccaccctttcgcattaccgttcactaggactgcataagaaaccgaggacaagcaacctctcatccatttcctccatctaagactaaaccctttcatctccaacacatgatccaaaaaatcccaactcacatgatcataggccttttcaaagtcaattttgaatacaactccttcctcccctgttcttcttttctcatccactatctcgttggctatgagaactgcatccaaaatttgtctcccttgcacgaaggctccttgagtggaatgaatggtctcgtgaagtacccctcttagacgtcctgctaacactttggctattatcttgtaaagactagtgatcaagctaatgggtctaaagtctgagattctccttgacatgctttttttgagtaacaagactataaaggaagcgttggtgctctgattgataattccgctcctatggaattctgcaaacactctcactagatcctcctttatcacatcccaacaatcttgaaacactgcaatggtaaagccatctggcccaggagccttatccctatccatctgaaaaatggccttataaatctcttcttcagtaaagggggattccaacctggacgcactctcaccatcaataggggaccaatctaagccttccactctccacgattctccagaaggactcgcgtaaagcttttcgaaataccttaagatctcctcttttatactctctgtattattcaacattaggccactttcattctccaactccttgataaatttcctatttcgcctgccattggccaccttatgaaaaaattttgagttgcaatccccttcttttacccatttcaccctagctttttgtctccaatgtatttcttctctcaaaatcaactcctctagctcccctttacttaaagctctttggactaaaagttcatgggatagtcccccttcttgctccaaggaatcaaagttagctaaaacagctaatatatcttttttctttttacttagctctccaaaagaagtcttattccacattttcaatttgactttaacgaactgtaatttcctcatgaacttgtgcccttcccacccatttccttgaaactcactccaccatcttccaaaattctccttaaaaactagaatgttgcaaccacatattctcaaacctgaaaggcgttggtccccacttgaatggattagtttccaaaacaatcggccaatgatctgaagtccatcttggtagtactccttgaagactttgaggaaatacttgttcccactcatttgagtacaagaagcgatctaatctcttgcatattggattctcttgcatgtttgaccaagtatatgatgcgctccttaaaggtgaatctatcaattcgcaatctcttatgaattcatcaaaatccttcatgcatggggttaatctagaacctcccaatttttctgaacttctccttataacattaaagtcgccgcccacacaccaacgcggatgagagagcccagcaatgtctgaaagctccacccaaaaatccttcctaagagctgagttgtttgggccataaactgcagatagccacaaagattcgcatccgtccatcgcaaacttgattgagaccgaaaaagagcctaacactacctccttcctacgcaactttttagagtcccaaatgatcaaaatcccacccgaagccccactcgccggaagggctgcccattccttatttctggctgaccaaacactatccacaagccttctgtcacactcctcctttttagtttcttgaatcatcactacatccggcttttctgaactcagaaaattcttgaccacccttctctttttcttagaacccaaacccctggtattccaactaattatcttcatgtgaaatactctgaccctgatcccgaaccaaatcattttgatggtgtatcttaattagttagggatgatatatcttatctggaagcagaaaatcagggttatagaccccacaacaatcaagaagtcttttttgtctagaaaagaagtacggtcttttaggtcctttggatgattacttttgaaacctttatttgtgagagtttggtcattagctattgaggtttatgtcttgagggcggcctacggattagctttgaagctatagcctcaatacaaggcaattgaagattgtagccttggctcaaggtagtggaggctttagcctcttacattctgaaggatttaatggttttgtggccttttgtgggcttttgatatatattttacaagaggcttaagcctcaatattcaatgggttttaatgagttttgtgtttttgttttggtatagattttataagttgtcttgagtccaagacttgggttacatttctataaaataaaagcttagttgacttctaatcaactctttaaatggaggggaaaaaagagattgagaagaagaaatagaggagttgttggttgttatattgttgacatcatatataatcattatcttattattgtccgataaaggaaaggattattgcaattgatggatgaagaaaaagaatgagtgcattaacatagatggagagaataatggtgcaattggatatgattatgatttcttggaggatcctaccggtgattgcttgtaagatagtaatggtggtgctgaaaatgactagccattagtttttttcttatgaattttacaattttctttgattttattaacaaattttgtagatttttcttttctttttttatgcttcatataagtaagcttatgcctctcctcatttgagcaaaatgcctcaagatcacctttaaacttacaaaaaattgattagtacttttgtttttgaagttgaaaaaatgaatcttgttttagccaatacagtaagttgctgtcatggtataactaattaatagtttgcatgggtgtctaggacagagtattcatcaggattttagcctttctagtttgaaaagggttgtaagagtcacttttgagtcaatagtgatcaattctgaatttgaagctttaatccattctttgggggacttctcaaacctccatctcgagactctgtgttgctgttgtccttattttttgctttgattataattgcttctattattgtaattttagcccacagccagctaatgcttctttatcctttcaacctaaaaaggtatattcctgcatcaggtagctcacttacctgacttgacatgaaggttggaggttgaagtcctatttaccagtatctgctggttaatctcctgtcttcacataagatgtatagatcggtcatggattctagctatagtgatcactgtttcgctattataatcaaatttcatggagcctttagagtctgccttgagtaacaatggtagctgtctgcttctacattttagaaggtcacatgttctttgatacatgaaccctttgctcttcctgatttgacatttgccatctacatgtggaagggaggacttatttttctttaaaaggcagaactgtaaggtttatactctctttttggatctaagtgaactatgaagtgagggaagcaattgtcatccatatacttgaaaataaagatggttttcagtgataggttaaattattacttagcaggcaggggggtgagcatgatgtgacaacagtggctgaaaggcttgttaatctgggattcctttggtagtttctttcctaaagccttgtattgcaactatcacctggggcacctctataaagaaattgcgagagaagttataacacagaatctgcctgtcatgcagtttcaactggcatctaaatgcttatgaacaaatccttgttgatgccaaagaattgacctcgaatgagatttccagttacctgccagacattcctcagttcaaaaggctcacccttgagtccttaacctgtgggtattttcatcacactggaaaatctcaatgatcctctagtaggaaacattcagttttgagggaaggatctcccatccttctcttcatcttatattaatataaatacatcttctgtttccgattaaaaaaaaaaaaaaaaaaaaaaactcaactggaaaagatctagaggttgttgagtagatgttagttgagttactactgtttctgccttttcacaaattgcaccagtttcggtgataattgccagcagtttttattctagaaactaatattttctgaatgctctgtttgtcgcagttgaccttgtttccttaatatccaaatgttatctacattggcttcaaagaattgacaattttgcaattaatggcttctcttcattactagataaaagttatgaacacagatctcatctgattcctgcataagactaacttaatcagaacctagcaatatatagggagagatatccattcttactagttttaccttccatcatagaagcttaaagtgaggtggtttaataatttaatggctgaaatatgagttttcttagaggaaataactttgttgaaactaagagagcatggttacaacagaatatcataatgtgatatttttttatacctctgacccagtgtgttgaccatttgaatgaagttcttacataggaaatgctaacaatctttgtttaatatgacccatttataatgttaatttgtttatttattgttcttatatgacatttgtaactgcagagaaaagaagccaaagtcatcaacttgaatttctg

SEQ ID NO: 11100 - DNA, 3726 bp, Vitis vinifera
  Intron number 5 from transcript GSVIVT01010760001 (locus G SVIVG01010760001) derived from phytozome v7.0 (chr-ID chr5 ; pos 22345015 to 22348740 reverse strand)
gcaggaaacatctagcttcaggggctgaagaacgggtatggccttctttactcttcctttccacatgcatggatgaactaataaattctagagaaaggaaagattaagagtctgtttggtaactattttttgaaatagttttctgttctccaaaacaaaaaaataggaaaacacatttgataaccaaaaaactattttttgttcttaagaacataaaatatggtgtttttagagaacatcttttagttgttttcacttgttttttgagtgttgttttaaaaaataattatgcaaacatacaaaatgattaacaataaagcattagatataaaaattatttttaaaacatatttaaaaatattaaaaacatgttaaaaacatttcaggttctcaaacatatttttattctacaaaatattagagaacggttttcaaaaactattcttaaaaattgtttttcaaaattgttttcgaaaacaattaccaaatagggtgtaatattgtattgaataaagtggatgttctagtacagtttgatatgatagcataaagttctattcaacaaatgaaatggttgcactgttattctgtagtgttcctgttgtatttattcctttttcatcagaatgttccatgctaaatagtcttcccatgacagtttgatgtattatttaatcttaagaaagtttagaatacttaaaccctagagatggaaactagaatattattcagattttcaattcaaatagaattaaattctaatgacccccctagctagatgttgatttttcagaatggctcccacatctacattttattggcagttcttgactggatgataagagcaagtagaagcttcttttggacagaaagaagtggttttctctcgagcaggcctctctaagcttagatatgcctaaatgcaccattaagttttggtttcaaatagggattaaaatatcccgaaatttcactgaaatttcgactattggaccgcaactcggtcaatgtgctccaaaactccaaaaatctccaaaaattaagggaagtgatggggagtaaaaccaaggtcttcagcctgtatgaccagcaaccaaaccaagtgggctaacttgtcttgggttatagtgtgtgttttttttctctttttgataggcaaccaagaatacattgaaaaagccaaataaaaaaggggggcacgccccaagcacacggaaggtatacaaaggaagacaacaaagtagaaacactacaaaagagaatagaaaacaccctcctactaacgcacgcacaatcagtcaataaaatctaataaggaaccagggccctcttcaatacgtaggcaagtctagtgaaaaagggtacaaataaaagagtcctttattaataaaatattatattatattatatttttgttttttctaaactttttatacaataaaactttaaccaatagattcatttaaatattttatctttaaatttaatttaactaattgattaaaagataaaactaatgtatcttgataattctttctttatatattttgtacattaattaaatgcacaaaacaataaatatttataaataaaattataaacatttttaaacaatatatatatatagatatcattatttcttttatatgtttaaatacatccaacttaacatttgttttcatgttttgcaataaatataactttaatttgtatattattgcttctattatcattttttggtgttttctctaatatttccacaaattttaattaatttccacccattaatatgttttttatcaaaatttgttgatatttccccatatatctgtaaaaaccaacaatttcatcattggtttcaaagtcctcaagtaattgtttattttcattcttcatcttgtcaaactgagccataagttgtcaacagttttgaaccttagaagtgattgaattcattcacacgcaaagggcagtgatagaagttagtgttgtacggagctttaatagtaactaaaatagtctcatggtctgaaaagggtttagatttgttatgccaatggaaggtaggaataaaaatatggtaaaaggaagaaagggaaaagaacaagacaagaggtcagatgagtggtgaagtgctagagtttatataagaccaattcagaagatgatggtgggatagtctgatgctgatttagtgcatttcactgcaactttacattagtctttatcatattctcccatatgactttagctttgctgttttttggcggggtgcattgttttttctgttattagtgcctcttgtataccccttgcatacataaggtgccaccccattgggttaggtgtcttttagattacatttctttttacctatatttggcagcttctatttgaaagcttgaagcatgattttcttgtcgagatcaggatcctattctggtataatgaatgtagttggaaacaaattttagttctcaatagactcaaatattttagcatataggatggttttacaatctaggaatcctattggaattaaagagaaggggggctaccatctaggaaagaaacataaggccttggccttttgttgattgaactttcaaaatttaccataaaaggctgaaaagataaactattaactgctgttacagcacagtttttgagtttagaaaataaattcgtgtacttaatctttgttcaaaattaaggttttgtttcggaactgttttcgaaaatagttttttgttttccaaaatagaaaaacaagaaaacacatttgacaatcaaaaaacggtaaacagttttttattcttaaaaatagaaaatagagtattttcagataatatctttaagttgttttcacttgttttttgaggattgttttaaaaaataatcatacaaatacgaagaataattaaaattaaagcaccgtgtataaaaattatttttaaaacatatttaaaaatataaaaaataggttaaaaacattttaggttcccaaacaaacttttgttttacaaaactgtttttcagagctatttttgaaaaaagttactaaacatggcctaacttttcctcttaatcaatgagctatacttgctatttaaatttacagaatatttcatgaaatattttaatagcactttgaaattaatgtgtgtttattaactagcgttttgatgtttgggagatgtggaaaagttaacatggtgctggtgtatccactactgtttctttggtaattggtgtagtaattcagaagcttgtttaaaaatttaggtttagtttcagattgaacaatcttagatatgtcatataaggcactaaaagagacatgcacattggaaaagcacctagatgtttggcactttgttttggctgttatatcttatggttattctataggttaaggagttatcatctcttctcttgattctgtctttccactcttttagtaaactttataccattgcccaaaaaaggataaagaaataataatttaataaaaaaaaaaactttggactcaacaatgtctccagagttgtatcaagataattataataatttgaattaatgaagtgttggtttttggtccaaagtttttgttgtcataagtgtgtatatatttgcatttatgtaatgcatgagggcaccacaaacctgtattaaagttcttcctgtgcaggaaggtgggaccaatcttgccaaaggaacaaacag

SEQ ID NO: 11101 - DNA, 2166 bp, Vitis vinifera
  Intron number 1 from transcript GSVIVT01035517001 (locus G SVIVG01035517001) derived from phytozome v7.0 (chr-ID chr4 ; pos 1947090 to 1949255 reverse strand)
tcgttcagctcactcgcaggagacagctcgatcaggttgtttgtttgtctattttattttattttattttaattttttcgcagtttttcagttttgtaatcggattggagttttggagttttgttgtgcttgaggaattttcgttgttttttctggtttgttcgtgagtaactgtaggaatctttgtttttctttttggtttgctttatgagaaataaaaaaattatcattgttgagttggcatcagtgataaaagaaaatatgactcgatttgttgttttgtttcttttttttttgttcgtcaactgaacggagtggaatgcttgtttaggttgtggagaaaatgctcaactatgtttggttccggagaatttgagggaaaatgaggggaaaaaaaaattggagaggaaaaggagaaggaaagaaaaggtaaaaagtaaagaatagatttaaagtgaataaattattcttatacatcacttaaaattcatttgaagtatctcaactcttctatgtgaacactaaataatttgaagatacataagtttataaccaattataattatatgatgtgcattgccgtgtttttttaaccagtaaagactgagtaatttgaaaatacattaatttctagctaattataattgtatttgatttttttcttttttgatattttgcgtggtaaaaacagacatgaaagaataattttcctcagcattttgttttcttttcttagtactttcttggagccaaacatactgaaagagtttgaaggttgagaaaactaatggcttgtttcatctgagaaatttgttggaatcttaaacttttcattgtttactttctgagaaatgaaggtagacttttgtgattttcaagaatcaaaaatgaaaatatgactcaaatttttgttttgtttcgttttcttcccttttgtcgagcatctgaatgcatagtaatgcttggtttgcttgttgagaaaatgctggaaatagaaggaatttgaatctttgaagaacttgaaacacaacacataatttagctgaccttacaccatgtgagagatttttcagaatcttggactttagtttgtttactttttgagtaataaaagtattatagttgctcagttgacctcaacaattttagcaactgaatggagagtaatgcttggtttgattgtttagaaattgctcaaaataggaggaatttgaagttttggaggactggaaaaaactaacaccttatttaattgagcttgattccactatctgagaaattgttggaatctgagacttttgtttcattgtatatagtttctctgaatggagagtaatgcttggtttgattgtttagaaattgctcaaaataggaggaatttgaagtttaaaattaacaccttatttaattaagcttgattccactatctgagaaattgtaggaatctgagacttttttttcactgtatatagtttctctgaatggagagtaatgcttggtttgattgtttagaaatttctcaaaataggaggaatttgaagttttggaggactggaaaaaactaacaccttatttaattaagcttgattccactatctgagaaattgtaggaatctgagacttttttcattgtatatagtttctcttagcaacaaaaatgtggagttgacatttgtagttaataaataaaaatgaaataaaactaaaattaatgtctttttgtttttgttttgttttcacaatttttgttctgcaactgaatggagagtaatgcttggttaggttgttgagaaatgctcaaaatagaaggaattttaagcttgactaacacctggtttaactgagtttaattatactatctggatttcttgagttgatttcctaaatttttataggtaaaacaatataaagcacaagattcatgattttattttcttttgctttctcagaaaccaaacatggtaatcaatttttcaattctttctgttttttattcactcttcttaatctaaattttgtctgacgtgtttcccttcctaatgttctgtttggttactgagaattaggtaagaaaaaaaggaaacatactaaaattcaaggaatgaattgtgtctgacgttttttccttcagatttttgaggaaattgagattgccaagagaaggca

SEQ ID NO: 11102 - DNA, 12087 bp, Vitis vinifera
  Intron number 4 from transcript GSVIVT01019162001 (locus G SVIVG01019162001) derived from phytozome v7.0 (chr-ID chr4 ; pos 15834004 to 15846090)
tacagccatttgttgccattggaaaaggcttacaggtgatacacagttttctttctttttttttttaaatcttttttgcaagcacatccattagaatttacttgattccatatattgacttaaatcaaattgtagtttaaagttcaggatcatatgctatctatatgctatctctatgctaagacccagtctatttggtcttaataacctcttctagagaagttgacatcgccgttgttgctatattaggttccttacattggccctttttctcttttccgtcttttttattttctttatatttctccttgtaaatcctctctctctctttttgtataggcccttttgcttgtaaattgtaccagcagaaagcattctcatccttcatttcaaactctttcatctatttgtaatactacatctgtttcttattaaaaaaagaaaagaaacggttatactattgtgggtataaatggactttatgcttgtttgaaatagggtttaacttttgtctttagtaggagaagaaatagaagcagaaacaattactattgccgtgcaattaaatttatgtttggaaaccatattttaaaatatttttattaaaactaaggacaattttgaaaattttaaaattttaattaaattaaattctcttttctatatttgagagttctatccaaacacccttcaaactttgcatttgactatgaaatatttttatttatttatttttaatttttttagtatttaaaaagctttttcaaatagcacttatctatgtgagcaatggttttttgattgtttggtttctttgttgatttttggtgtgttcatgtttatgaaagaggaaacccaacattttgttctttaacaaaagaaggagagcctaaagggggatttggcttgcttctttttgtagtgcgaaggggtgcaatgggtccttgacttttgaaccttgtgcgttggcgatgtcctagagaatagaggggaaggagtcaatcgttgaataagttgtattggttgaagttgcatgattcaaaggtatcttctagtagtttgtttcctcattgggtgatgagatctctttgtctccttttcctttctctgttaataagcgttcagtctcgagtaggggtaatagcatggtctcttagagggagttgggagggggatgtttgctagtcttgctggtacaataagaggacctttgaggatggtcctctaaggtggcacatcgatggcgattcctaataattttttaagacaattagggggaatcaatgatgtagatagaagaggggaggtgggatcaatgcaggagaacattagcaacttttaggaagcagaagagtaaccctctgagtggcctttcaacaaactgacatcttttgaaaaatttatggggatgctaattgaggtttttatttatttatttttatttttataataagtaagcaatgatagagagaatgctagtcaagggttttgaaatgcaaattatctctttgttaaggaagatggagaccaaaagaggtggtagaggtttgatgttgggggtgaagaggaagctaacctcaacttcttgctttgagagtgagctttggaagttggaatggttgatcaattataaactcttcctattagaggggttaatgagatcatatgtgggaacggtcttgggagctagcacctattggttgatgaagttgaggattcttttttagagtgttagaggggttaatgatgggaagaaacaaaagttaattaagcatatgattaaatctcagaaggcggatttagtcaacttacaagaaactatggtgcaagagtcatcaatgcagatggttaaggatttgggtgtaggaagattcttggaatggggagcagtggaagctgaagattggaagaaggcattctaatgttttgggacaacaaggtgttggaattgattaatatggaagtgggagtgttttctatttcttggcaaaaattgtgaagatgactttgtttggatgttcataggggtgtattggctaattcaaaagggagcaagaggattgcttttttggagctgggtgctatatgatgtctttgggatgattcttagtgcttagtagctgattttaatatggttagattcctttggggaaggagtactaaacaaggttgtctttcatgatgaggcttttttaggaattttttttttgataagtaaacaagatatgtattagaaaaggctaaacgccacaaagcatacagggagtatacaagacggctaaagcctcaaaaaaaaaaagaaaaaggaccagaaagaaactacctccccttaagtggaagctatccactccaaaaaacctatgagggagaaagactcctcacctagatacactttggcccaattccacaagttacagacaaaagaatactttaatttctgaatattcaactcaccccccctaaaagctaacctattcctctccttccaaaccgtccaaaaaatacataacggaatggattttcaaatctttttccttttcttccctacaaatgagcccctccaggagattaaagtctcctttacagtttctgggaggacccacttaacatctatcaacccaaaaataatatcccaaagggctctagtcactatacagtgtaaaagaatatgatttacattctcttcttcacaaccacacagaaagcagcaattcgggagatgcacccctcttaactggagtctatccagagtaagcaccttcccccacgtagcctcccaagcaaaaaaacagactttagttggcaccctatccacccatattctccttgcgggaaatactgtgacattaggcttgtccaacagcctgtaagcttctttgattttgaaaataccatttcttccctgcctccacacaactgaatcatcctccaaggagggcctgtaacccctcaaagtatgaagcagctctccaaccatatccatctcccaatcattgaagtccctcacaaaaacaagcttccaatccccttggcccgaatcctgatcccacatctcctcaatcgtagcatccctatgcacggcaaggacaaagagttgattgaagcattgggacaatggaatgtcagtgcaccatctatctttccaaaatttgattttggaacccttcccatctataaatgccaaattttcccagcaccaatcagattccttcatgatctccttccagacccctactccagccgccccacggaccttctttggcctccagccataatcctcttgcccatattttgtagtgatcacttggttccagaaattattcttttcacaagcgaacctccaaatccactttcccagcaaggctctattcagagtggctattctccttaatcctagccctcccttgtgtttctctgtacagactgcatcctatttaactagatgaacttttccctccaagtttcctcccccccataggaaatctctttgggttttttccactcttttagcaacagacttaggcattcggaaaatagacagtttgtaaattggcaagctagccaaggtgctttttatgagagtgattctcccccctttggatatgtactgtcttttccaaagcgcaagtctcctcctgatcctctcttccaccccatcccacatagaagtagccctattggggacccctaaggggaggcccaaataatgagagggcaaagaccccaccctgccacctaactcagctgccaactcaagaatatcctccacgtctccaattggaatgatctcacttttggctagattaatccgaagacccgaagccgcttcaaaccaaaagagaatccagcttaggtgagaaacttgctctttgctcgcctcacaaaacacaattgtgtcatcagcaaaaaataggtgggaaatattcaaggatgttctactgccaccccgtatattgcaccctgaaagataacccccctccactgctctcctgataaggacgtccagaacctccattcccataacaaagagataaggggaaagggggtccccttgacgaagccctctagtgctagggaagaacccagctggcactccattaacaagaatggaaaatttagcagaggaaacgcaactccacatccatcccatccacttgggcccaaagcccattttttggaggaccttcattaagaatttccaattgatgctatcgtaagctttttctatatccaatttgcaaataagacccttttctttcctcttctgccacgaatctatcacctcattagcaattaaagacgcatccagaatttgtcttcccttttcaaaggcattctgagcaatagacaccaccttaccaatcacttttttgagcctattagctaaaactttagccaacagtttatagagcccccccaccaggctgataggtctaaagtctccaagattctccgccccgcttttcttaggaatcaacaccaaaaaggtgttgttaaggctcttaacaaaggaactatgctcatgaaactctttaaacatctccatgatctcctccttggcaaagtcccatgcatcttgccaaaaggcaacagtaaagccatccgggccaggggctttatccccattcatctccatcaacgccgagtgaatctcattctctgcaaatggggtttccagactctttgcttcttgcaggctaatacaacccaccggaatgctaccaatatccgcctgccaacccatgtcttcagtaagcaactgctgaaacgagttcacaacaccttctctcacctcctgctcctctactagccactccccattaaccttaattctgtccatagcgttgtgtcttcgatgtgcactagccattctatggaaaaaccccgtatttttatccctgtcctttaaccaaatctcccttgagtgctgtctccaatgggcttcctccaacaggacccatttcttaaaggaatctttagcttccttttttaattcagcttcctccatagacaaaactctctcactttccacccgatcccaaaaatctatttgatgtaaggctgaagctttattagtttccagcctcccaaaaacctctttgttccacatattcagcttctttttaatttccttcattttgacggccaatctataactagcgctgcccctgacttcaattccttgccaccaggttctaacaatgtcattaaatccctcaaccttaagccacatattttcgaatctaaacggggttgggcctcttcttatcccacctccctctaacacaattggaaagtgatcagaagttggccgagataacctgccctgcgtgacgccactaaactgatctaaccagctaggagaaactaaaaatctatctagtctcgcccacgcctgattattcagccccccactccatgtgaactctcccccctgaaggggcaggtccaccagctctagatcatccacagactttgcaaatctccgcatggctgagctgattcttctttggctgctcatttcgtgttggaacagagtgatgttaaaatccccaccgagacaccagggatcatcccaaaggcctcttattgccccaagttcttcccacataccctccctttccactttggtgaaagggccatacactcccgtaaaaacccaagtagccccattttctatggtcttgaatctacaggacaaggaaaactgaccctcttcccagtccagaatctccaggacccgcttatcccagcatatcaaaatgccacccgcagccccttccgcatttagggctctccaatctaagaatctccccgatcccagacttctcactataccctccgacatctcctgaatcttggtttcctgaatgcacattaggtccaccctctggttccttatatagttcttaatgattttcctcttagagctgtcattagctcccctcacattccaggtaataatcttcatcttcatcgggcaactatcaactggttccccttgccctgtgaaggagctttctgcttattccccccatcgtaattgacagagcattccagcctcttcagctccctttcaaacttggtcttttccaagagttctttactgtgaatcttttcccgcctctttctgattttaatcaaaaagctcaaaatctccttttccagtccctctgtagagaatcccaagaactggctaaatttagctagactgccttcctcccatagatcctctttctcattttcagtatgttgagaaccaaagccaccattgttcccctccttgcccctagccacgtctctgttcttgttgacctctcccaatttccaggatccatctacattctcaacgttcccctcatatactgttaaccaagtcgacatatccccccttaattcctcctcaataccccctgggcgatcgaaagactccccctccggagcccgatcagaattagaaaatagaagaagaggtgtacccacagcccgtttacctttaggatgggaaagtgaggcttttttaggaaattatggagaacttgaatttaatgaatcttcctcttgttggagggccattcatgtggtgtgaagggtagagtttcttggtctcttcgagattggaccatttcttagtgttggaggagtgggaggataattttttgagtttgactcagagtgtcttatcaaatcaacttccaatcactcattgttgtagacgatggtgagatgaagagggtcaaatcaccttttagatttgaaaatatgtagcttaaaacggaatgattcaaatatcttgtaagaagctagtggttgagttataatgtgagtggtttttatagcatattttggcattaaagttaaaggcccttaaaataggatctaaaattttggaacaaagaagtttttggcaatatcacaaccaaacaattggaggcattgaaccatattggtttttgggactctaaggagcaagaaatagtcctttcagttgaagagacaaaggccaaaagggtggtaatgtaggtgtttaagaagtgggcctcaatggaagaaactatgtggagacaagagaaatttggtcaagagaaggggataaaaacaccaaattctttcataaaatggtcaatgcgtgtagtagaagaaactttttttcaaagtcggagtaaatgaagaatggttatctaaagagattgaggtgaaggaaagggtgtctagggcctttcaaaccctcccttttgaagtgagagaatggagattgagcattagtgaaatgagctttgaagccctagggatcgatgattctaggagcttggaggtgcctatttcaaagaaggttttttttgccctcttcaatttgcttgaggataaagcttctggctagatggtttcactatagtgttttagtagtcctcttggtgaagaacgagatgatagttttttcagggagtttttggattaagccactttttagtgaaatttagggtctgtttggtaactatttttgaaaacagttctgaaaaatagtttttaagaacaatttttgaaaactattgtctgatttttatagaacaaaagtttgtttggaaacctaaaatgtttttaacttgtttttaatatttttaaatatgttttaataataatttttatgcctagtgttttatttttaatcattctacatgtttgtataattattttttaaaattaccctaaaaaaataagtgaaaacaatagaaaataagtaaaagatgtttcttaaaaacaccttgttttctattcttaagaacataaaacataatacaatttttggttgtcaaacgtgttttcctattttcctgttttggagaacaaaaaactgttctcgaaaacagttttcaaatagacccttaatttccactttctataattttgatcttggaaaaaggtggagtagaaaacttgaaagatttaagcccatcaacttagtagggggattgtataagtttctagcaaaagtcttgatcaatagacttaaaaaattgatgagaaaaaaggttttagtctattagtatgcttttttagagggtagataaattttagatacagtcttcattactaatgagattgttgattcaaggttaaagagcaccgataatggagttatttgcaaaatagacatcaagaaggcctacggtcatgtcaattgggacttcttgattgtggatttaacaaaaatgagttttgatcagaagtggaatagagggataaaatggtgtatattcacgataagcttcttagtcctagtcaatgagactccttttgatttcttttagagctctagaggttcaaggtaaggagatccccttttccttatttattcatattggagatgtaggctcttaataagattttaagtaaaactagggaacgaggctttaaggtgggtggaaggggtggggagggggtgaatgccaattggaataattgagttaggtcttcatgtggtttgaggtgatctatggattaaaaataaacttagagaaaagtgacctaatactaattagggttattgctaatgtggaggggcttagctttcatgttggattgtaaggtgggaaaactgctcattgccttattgggcctcctttaggagcttctcacaaatcattgaaggtgtgggatgtagtggaggagaaattttggataaggctctcggtgtggaagaggcaatacctcttaaaaggagggagacttactttgagtaaaaacatgttgtcaagccttccaatttacttcatatctttgttggctattctaagaaaggtaagctttaggctagagtagatccatggaaacttcctatagggcagtagagctcctaagaaaaggccttacttggtaaattgctttattgctacttggacaaaaagcatagtggttggtattagaaatctattttctttaagcctggttttgtttgctaaatggagttagatttgtatttgagagagtccatgtgcaaaaaagtgataataggaaaggttggggaagagaaaggggatcttgtttgaggatgtttgggatggctatgaggtggggttgtgtagtataaattagtaatgggtaggaggcctttcaaacatggttcaaagtctcggtatcggtcattgactcgggaggtcttgaggcgtatcggtctcagtgtctcgaattggtattagacgatacaaaaaaatagtaatttaaaactaaaaaaatttaaaataattattaagattatcagaaaaataaatacaattaaatacactaaaaaaataaaaataaaataataaaataacatttattaatgtaatattattttagtataaaaataggcattcaaattagttaaaataatatttagaattattttttatttaatcactctatactaaatttaattaattataatttttaaagttaattatatcctgtgattttaacattattattaacaaattgttaaattcttatattattctggtatccaattttttaatctatgtctaattttatatatttttttaatatcaatatccatggttgatttatttcataaaaacccaaatattcttgaaaacaaaaatttccacatacacaaatttctatcaaatacccatacccacaaccaatttaaccctaatacccaataacccaaattcccatggttcccacaaactacccattaagcaaccactgctttaaattgcaactagccattacccatgaatacccatttcccaatttgtgagatgccatggatgaagttggagtagcaaagaagatccgacatgctactcctctctctcatttcaatcttctcgattttcataatctttcttctcctttccaatctccatttcttttctttcattcttagcacaaatccccaaaggtaaggagagggtttgcatgcatcactgccatcgccaactttagcattggtctctgcaacatctcggagccatgaatcatctcaaagccatagattcgtttcctagttggttgatctgtttggtgattcaacaaaatactgaactcggttatcgatatcatatcagatatggacgaggcagatatgacttggctgagatgtaccggtcttgactgagattttgaaccttgctttaaaagcatgtctcatttcatagttgggaatgacaaaagggtaaaattttggaaagatcaatggtgtctagacatgtctttgaaagtctttcctaatgctattttgtatggccactgccaaagatgattgggtagcagagggagtggagggaggccaatggagtccttgcttttcaagacaattcaatgcttgagaacttgagggagtggatgtctttttatggaaattgtatatgattttaattagaaccaatgaagacaattaaatgatctcaaaggaaacaagtgtagtaagttctctatcagatctttctgtgctttcttagcgcagagaggaagagagcctttccctacaagcatagtttggaattcttgggtactaatgaaggtaggcttctttgcatggaaagttgtttgggaaaggattctgatgcaagatcaactcaaagggagaggatgaataatgttgaatagatgttacatacataaaggtgaagaagaatcgaccgataagcaagaatttaatggcaattggattctctgtttggcatggtctaggtgacacatctatagttagagcaaatctcttgagttggcatggctcgttcatggggaggaaatgggagaaaaacttggagagctactacattatacttgttttggactttatggaaagaaagaaataggatgtcgttttaagacaccaaatagtcggatcaagcaatcaattatcattttatgtctattgtttcttttttggaataggtcagggtgtacatagatgaccattcaatgtccatgataggctttgtcgattggttgaattccaagttaggagaggaaggcttgcctttagtgttctctttccttggctagcctttaggggcatattgtatacatggtgtgtatcttggtgcgtcctttcttgggcactattaatatattttcttttattgccgataaaaaaaaaagagcttatgacgtgtaagggtcttatcggctattagcatgtctgacaattgtgatatgtctacctatgttgtctttacttttagagttttacaaacaaatccaactttatttttgttaaaagaatattctagaacttatgtgtgagatattcattcgcggggaaattagctgtttgtattatgatggtattgtctgagattactaattgaatatgactctaaatggcccatccagatgaatgtacttatttgaatgtaaggacctccttaagtataatgtgatctatgagatattcattttgttagagagaacttgtaataaaggtggagttggccccaaagaacagtgttttaatttacaactaactttttctagtaagaaacaattttattactaaagaaaggagggaacagagaacaatgagaaatccactgaagtaaaaaccacagtaaatgaagtgatactgataaaaccaaagaatagccaaatgaaattaaacagaagtacaggaaacacaatcaaaggggctgtcatcgacagaaatcttgggtgatctagcaacctccctctttgcaaatctattggccacctgtttgtatggtttacttctccacctaactcccttgccaaggactatatatcatcctcaatcaatgagcaagccccaagggacctcctctttcgaagttttccaagaaataaccattgcagaccttcatatcaatttctatgtatttcctgctaagttatatttctgagtgacattattgtataatgctggatatacagtatgtacttcatctgtttattatttattttttttttctctgctacagttaacataaattccaaggattcttttagaaatgacgcttcgttgagttaacacttttagattaaatattggattgacatgggtttaaaaacacaacctatgggcaacattgatgaagttggaaaattcttccaggc

SEQ ID NO: 11103 - DNA, 6127 bp, Vitis vinifera
  Intron number 2 from transcript GSVIVT01034600001 (locus G SVIVG01034600001) derived from phytozome v7.0 (chr-ID chr1 3; pos 14685456 to 14691582 reverse strand)
ccttgttgtgaataagttttcttggttgactaatggaggagcgagaaagacctagagagagagtgtgtgcgagagatggagaagaaagctgggatcagggtgggagcaggatcgcagcgggtttcctacagtcaggggtgcgtagaaggagctttggggtagaatcgaaaatttttgaggtagagacagagagaaaaaaagggaggacgcaaatcttcatagttgaaaggaagggaggtgtctcctcttgggtataaagttgggaccggcgagtctagggccgctcatggaaggcctgaccttctgcatccaggatacgaggaccggacattgggaaaaactttggcaagagaatgggagaaccttctctttaacgcgcggcgaaaacaaggggggatgcttcctacgcctgggtgtcacggatcgggaaaagaaaagatttaacatctttgtacccaaaggcaaaggatcaaaagggggttgggccctgttggctgaggtgctgcgtgagatggagcctggctcagttggtcagaggagtcagcaagtgaaggagaagtgttggagctccatgttgggaaagtccttcgcggacgtggtgaaacaaaatcgtagttgtgaagaggtggtgcgggtaaagatcgttaataggccatcaggtggaagattggagaaattggctcagtgccttgtcggaagctgggacccgatgctaggaaggggtgacgatctgcgaagctgggggacccaaatgtcaaagttgtggggtttgaagggcaacttaggcttggccaagttggaagacggtaaagccctattggaatttgagttaagagcagaggctgagaaagccctaaaaaatggtgtcatatcgatcagtggctgcgatgtgcgactggagaaatggagccaaaggacgggatgcgtgatggaggaagagaagaagaaagaggcttgggtgagaatacttggcctacctatctccttatgggatcgggacaccctctgtaagataggagagggatgtggggaatttttggacgttgatgccaaaacggagaggatggaggagttgcagtgggctaggattcgggtaaggatcaaagaagatagaatccctaatatggtggatatatgggtggagaatacgtgctatgcggtggccttgtggtgggaaatcaggccgatgctaagaaaattgcaggccgatgacaaaggaagaaccctcgcagcggctggagagggagagggtgagtttcagacacgcgagggcaagcgcgtgatggaggaggaagggggctcaaggctcgagacccagacgcaggtggtggatgggatgtggaggctgacagctggggcggggcaacccatggacagtcatcacgggttgggtgggtcgcacctagggcttcaggatatggagcgaatgcaaggcgggcctttagtgctgggccttttggagagaccatgtgggcctgggggcctttcaattcagtcctctctggtggatcatgtcgggccaaaagagtggggggattttagaaggcccagaatctggaaacccaaggaaggtgttggactggtggccgaaggcccatcggtggagactagtctccattctaatgtggcccagatttgtggcccgagcagctcgaggatcccagcccctgaagatcctttgctcagggagaaggatgacatgcgcaggctaagcggggcagagctcatccaaaatgagagatcgtccactgatctcgccttggctgaggaagcgatgaggtacgataaggtttcggattgcttggtttctgggaccccttctcttctttctccttttttcggtcggactccagtgggggagtattgcgacttttctggggatgacaaaaagcgtgatgagggagaaaatccgatccagatgatcatgggatcgaagtcccctacgggggagaatgtcgactgttgggatttggtggaggtaaacaaaaatacaactgtagatggtggaaaggagatggccttagaccaaatagtaccacatgcatctaaggcagagggggagcttagctgggaaaaaagtgatctggccaagttcagcaatttcttgggattttcgacagagggtctggagaaggacattatggaattcttggtcaaaattcgtaagagaagggaaagagttcatagcaaatccttgttggagaaaacaaaattcgagagagaactgagaagattagagtgctccattaactatgaaggggggaagaaacaaaatggtggtgagcaagcaagggggtgccagattacggaagtctaatgaagctacgaatccttagctggaatgttcgtggagctaatgacagctccaagagaaagattattaaggcagtgatcaggagtcagagggtggatctcttttgtcttcaggagaccaaaattcagtcattatcggagggtctggtgagaagtttgggcgctggcaggtggtctaattgggtggctttggatgcagtgggctctgcaggagggatgttagtgtgttgggataaaaggtcgttggaggtgatggagacggaggtggggaagttttctgcctcgtgtaggtttagaaatgtggaaaatgggctaacctggtcttttactggtgtgtacgggcctttttcgaaaggtgacaaagaatgcctgtgggaagagctaggggcgattagaggcttgtgggaagatccgtggtgtttagggggtgacttcaatgtcattctgtcccagagggaaaggaatagacagggaaggctgactggtgctatgagattttttgcccaaactgttgatgaattagagttgatggatctccctatgcaagggggtgctttcacttggagtggggggaggaataaccaatcttgggctaggctagatagatttttggtaacacaacagtggctggagatgttcagtggggtcgtccaatgtagactgcagagacccacttctgaccattttcctattttgctgatgggtggtgggttgaggagaggtcctactccgttcagatttgagaacatgtggctgaaagtgaacggctttaaaggtcttctacgggagtggtggcaggggattgaggtgagaggaagggccagtttcaggttggcctccaagctgaaattattaaagctaaggattaaaacctggaatagggaggtgtttggaaggctggaagttaacaaaaattctgcccttcagcaagtggaatattgggacggagtggagagtgagaggtgtctatctttagctgaaactgagcagaaaaaggaagccaaggacgcctttcacaaatgggtgttgctggaagaagtccactggaggcagaagtcaagggagctgtggcttaaggaaggggataggaacactggctatttccatcggatggctaatgcccatcggaggaacaattccctggacaggataatgattaatggtgagtggctgactgaggaccaagaggtgagggaggggattgtgacggccttccagaatttattatcagaagaaccggggtggagagcggatattgaggggctgcacctaaatcaaattacttctcgggaagctgaagacttggagaagccttttactgaagaggaagtccacggtgccttgatggagatgaggggagataaagctccaggaccggatggattcacaatggctttttggcaagaatgctggccgtttgtgaaggaggagatgatggatctttttaaggaattctttgagtatgggtcgttctccaaatgtctcaacaattcctttctggtccttatcccaaagaaaggaggtgctgaagacttaggggatttcaggcccattagcttgcttggtgggttgtataaaatcttggccaaagtcctagcgaataggctaaagaaggtgcttgatagggtcgtttcggcagaccagaatgcttttgtgagagggagacagattctagatgcgtctcttgtggcaaatgaggtgattgactactggcacaaaaagaaagagaaagggttgatctgcaagttggacattgaaaaagcctatgatagtttaaactgggagtttttgatgaaggtgcttcggaagatgggatttgggttgcgttggatggattggatgtggtggtgtatctccacagctaaattttccatcttaatcaacggggtgcctgctggtttctttccaaattctaagggattgaggcaaggagatcccctttctccgtatctcttcatcttgggcatggaagttcttagcacactgtttagacgggctggtgaggggggtttcctttctggctgtaggcttcgggggagagggggtgtggagatgaacgtttcgcaccttctctttgctgatgatacaatcattttttgcaaagcggaaagagagcaagtttccaatctaagctggatcttggcgtggtttgaggcggcttcgggtctcagaattaatcttgctaagagtgccctaattccggttgggcaggtggatgagttggaggagatggcggctgagctaggatgcagattgggtgcattacccactgtctatttggggctgcccctaggagcctatcataaaacttcttcttcttgggatggggtggaagagagaatgagaagaagattagcccaatggaaaaggcaatacatctcgaagggggggagaattactcttatcaaaagcactttggccagcatacccacctactttctatcccttatacggatccctaattctgttacaagaaggattgagaaaatccaaagagatttcctttgggggggaggaaggttggagaggaaagctcatttaattaaatggaaggtggtttgtagccctaaggaggagggaggactaggcatccgaaaaatagaagtattgaacaaagccttgctgggtaaatgggtgtggagatacgcctatgagaaggagaatctgtggaaaagggtgataggggtgaaatatggtcaagaggggtgtgggtggaggactaaggacggttgtgggccttatggagtgggattgtggaaggagatcatgaaggaagctgattggtgctgggagagtattgtgtttaaggtaggcaaggggaccagaattttgttttggatggacaagtggtgcggtaatgaggccctttctcaaatgttccctcagctgtttaccttggcaggtaataggaatgccaaagtaagtgaagtgtgggactctagcttgggtcaaggaggatggaatctcagattggctagagatttcaatgattgggagctggaacaaataggaaatatgctgaacctgctgaaggatttcaggacttcgactgaggaggatgctgtgagatggaaaagggaaagcaatggtgttttcggggctaagggtgcttacaaaattctggttgggtcctcagcttgtgtcttcccgaacagacgcatttggatggataaggtgccaacaaaagtatctttttttgcttgggaagcttcctgggggaagatcctcaccttggataagcttcaaagaagggggtggcagctccctaaccggtgttttctgtgtggatgtgaagaggaaagtgcgaatcatattatgttacattgtacagtggttaagattctatgggagatcgctctcgccatttttggagtccaatgggtgttcccagaatcagttatagaagtgttacttagttggaggggatcttttgtggggaaaaaagaaaagacacctggaattccattccgttgtgcattttttggacggtttggaaggaaaggaataggttagcgtttaggggggggtctttagatatacaaaaattcaagaatttttttgtatgtaatttgtggagttgggctagggtgtacattggtgaggatacctattctcttttaggctttttggagtggcttgcggccacttgagggtgggtgaggttctccctctttattgttcagttcccctttttgggcttttgtgtataccccctgtatacatgcggctttttagccttttctaatatattctgatcgtttatctatcaaaaaaaaaagttttcttggttgactatttctgttgcaagatccaa

SEQ ID NO: 11104 - DNA, 2673 bp, Vitis vinifera
  Intron number 7 from transcript GSVIVT01034161001 (locus G SVIVG01034161001) derived from phytozome v7.0 (chr-ID chr8 ; pos 14751362 to 14754034 reverse strand)
aggtaagcctacttttcttagtgaaaagtcttgattttttttgcaaggcattaaaagatggaagttttggttgattacttatcataaaagatattttatacaaaataatctggaagaagttctgatgcttggggtgcccctaccccaacacactgaaaaaggaaaataataatcataagcttcttacttagatttcaacttagtatttttatattgctgtgtgtgttgtatatgtaggcagtgtttgtctttttctttgtggtagaaaatctgaataaagttgaatgtcattaagtgttaggtgagcgtttaggttgtttgttttttattagaatctaaatgctgttaagtgttaaattgtttgtttttaactctttattaacgtctgagtatttttaagtgttaaaatctatttatttttacaaattaaaaacatctataaaattaattgttatttcttattttaacttgaaaacaataatttttaaaaaataataatttaatgtagttctaaatatctcaaaatatataagaatttattaccataataaaaaacttataatgattaattatgtaattagtaggaattgatatttgaataataattaggatttttaattatgcttggttgttaagaaaatgtttgaaattttctaagtaatgcttgtttttatgtgatgttttttcagagttatggatttatgattgaaatatgtgttatattgttgaattaattaatttattttcagatttttattagggaaagagtatcaaattttaactttttattttttaaaattaattaaaattactgattctagtggatgtttagaagagtgtaaattattttttgctaattcaaaaaaattccattggaattgatgactattagtttattttggtttgttgtagggtaagaggttgaattttgaaaactacttgtaaatttatttataatctaagttttatgatttttagtgttgcttattttcagttttaatgaggaatctacaaaaattcatgaaattgaattttgctgagaattagatgaatcatgagataaaaatattggttgcacatggtagaattttggttttgattttggaattttgtggatttattttagattaattttttatccacattaagttatttttatgttgttatttagttttttagtaataattcatgaaaaaattttagacctatattttcttgaagaacaagaggaaaaatggaatatatatatatatatatttcagcatattccctcatagagatatctaaggatgctgatttcaactaggagtctaggacacaggtgatgctggttttttattaggttttggcttccttttttgtttggaaatagttcttcatccagttgattttctattttcactgggatacttctccaatttcctttcagatttttctttctcaaaccaaaagcaagagtctgtataaacatatccacatgcactaaaactcagcttcattttctgattgttttcagtgttcggcatgttagtatcagtagaaatcaaacacgggttcaatggatataattcatgtgggaaatgatctgtttattacagattattgttttaatgtagagggatatgtttgctcacatgacctatgtagggggcttggacttaggatatttgctctccttctagccacgatcccttttcctcctaaagaatggaaatgaaaatttacacacttgatatttgtgataatttttattacttcttttggaactgttattgctatgtgtttattgttattacttgttggggactgatagatatttcaaatggaaatatctattttgttgatttttattcatcttcccgatattttggaattttccctgattttcgattttttggttggtcaatgatgatcgaacttcaaaaatttcccaaaacattgttaggactcgagtgctttacctcaaggctaacaaaaacaacatatatcagatgggctagcttttcatttggtaacatacttgctaacattttatatatactaaagttgtattctctaataaaaaagattctctagaactgaatatactctttaatacattcctacaaaataaaaaatattaaaataaaattttaataataatttaattttaattatcttatattcaaatctctttttcactagttattgaaatataaaaaccaagatcataatttttttaataagtctttttttatttctttcatacattaattaaataaaaaaaatataaatttgaaaataaaattataaatatttttaaaaaatcatacaattataataatttcctttatattttttaatacatccaaattagatagacctcaatagaatatgttttaaagttctatacattatttttgaatatcacaaaaattatacatgtattattttttttccacaaaacaactttcatatgtgtattattgtttcttctatcattttctttgaaattttcccaatattatgagtcttcatcaatttttgtcttatcaatattttttgtcaaaatttctgttgatatatccttataaacctgtgaaatctaattaccgatatatctataaaaactattattttcatccttccttgtatctaggttgacagaaaggatcttactcacttgaaggttta

SEQ ID NO: 11105 - DNA, 2687 bp, Vitis vinifera
  Intron number 2 from transcript GSVIVT01036676001 (locus G SVIVG01036676001) derived from phytozome v7.0 (chr-ID chr1 3; pos 20168467 to 20171153)
ctttgcttcgccggagtacaattactctgtcactggtactagctcctctttttattttttattttttatttctagctttgtgctctgtttggtaactcagaaatggttggaaacggaaagaaaattgttaccgttttttttgtctcaaattgtgaatgaaaccatactaaaattgagaatcaccatatttcacaacataaaacccttcaccttttttcttcttttttttccgtaaaagtaagagaaatcattctctcttttaacattttttttttttttttcattagggtggttttaggatagttttttaccattccaactcttacaaattattccccttgatctcttattacttgaacacccacccaactccaacagttatccaaaattgggttgggcaaaattgggttgggttaaccagacttgtgtgcacccacccaactctaatattaaaacattttatagataattattttaaaaatatttttactaaaaacattttgagaaaaaacaacatactttaaaaatgtgtttacgagttattttaaaaaacgtttttaatatttttaccatttaaacaataaaaaatttcaaatattaaaaatattaaaaatattttataaaatcattgtcaaattgattttaagctctaaatatcgttttataataattttagaaattatttttaatctttttaacaagatattttttttaaatatcataaacatttctcactataaaatgatttgtgagtcagctgatatttttccaagaaaaataagtgatttaatatttgacagaatatgctttccctttataacctacacaaaatttacaagtttttagcaaacaatccttttggaactgccaacagaatctttctttaatcactgcacgtcaagatttgtcggattgggctggcagcaaaaatggtaaatttctatattttcacattttttttaataactcgctggaaaaagattttgtaagaaatttccatagctttcccggtgccatatctccatgatcttagctcaataaatggatagcggaagttttctcaaaatttgttattttttaattatcttctattcttatttcttttttcttttttatatatagccgtataacagtttttctaggatatctatgtttcatgttaaattgaaaataaaattttatttttgaaaataattaaaaatcattttttgaaaataaaattttatttttaaaaacaattataaactgttttaaaaattcatatggtatattttcattgttatttcaacaacataattaaaaaatgaaaaagaaaagaaagttgatgctacgaataccaagaaaatatatgtgggagagcacaaaattatgcactcaggtaaaattgaatattttgaatactcaaaaatctttgcacgcttggtttgcatattaataatgcattcacctttgatggggcagttccatcttcgcatggttgtaaagtcgtcaggagcattggtataaataataggtgtgataaagtttgaatttttatagtaactaaaacatagtgattagcaggtcaaaggcatcaaatggagtgagtatttttctataaattatcttattgaattaatgaagaatcttgtgtcagtgtcttgggatcactagtgcctagctcttctatatatcacactacaatttacatccaagatttaaaatttttgagtattttgatttatttaatgcatgttattaaaattgattgaatatctatcttgtgctttagtgaagctcaaaaaactatagcaatttggttctttctctactttttttttttttttaacttcatcttgaaaactaatttttctcacaagaccatatctatgtctttcattgtttaataagagttcgtttgatagtaattttaagaaacgtttctaacttttattacatttaaaattttttatccaataaagtattaaaagggttagaaacatttcttaaaatcactcccaacttgaatgataaaaaaaaaaaaattgtgttaaaaagattaaaaatgttttctaaaatcactactaaacggataccaaatggtttgagttgtttaagtaccacacgtgagctcaggaaaagcttaagtctgtgataaaaagctcctaagaattttaaagttttaactgcattagttctattgagcttttcaatcaatttcaagtctgatgatacgttcatttctaaataatttgctaatagttttatacaatacatattttataagaattagggatgattaaaaaaaaaaaaccaatgagggcagttctgcagagacccacccttaaatggacaagaaaagagaataataattggtatttgaatcgagagcaggaaaaattttaaaaactctggattgtaaataaggtcattcctctaacagatgttctgtatccctacctaataatataagacctaaaatagggaataaatttacaatcaaggattagaacgaggagcttccctgatgccaacttgtttacattcttaaacagaacttagttcattatgtaacttatatttttcagggtaatgaatgtccccagaattcatgtatgtgctttatcgaaatacaacttttatcttgtgcttataatcacagactaattttcctattctgcattatattatatcagctcctctgaaga

SEQ ID NO: 11106 - DNA, 3526 bp, Vitis vinifera
  Intron number 2 from transcript GSVIVT01030301001 (locus G SVIVG01030301001) derived from phytozome v7.0 (chr-ID chr8 ; pos 9266951 to 9270476)
tgccgatttcggtgaagtgcagagcttggtccaaggttcgttggtccttagtattttcacttttgatctgtttggttgccctgaaaattggaggaaaatttcaatttatgccgaatatttctattaggctccgttgaataatgtaaaatctaggtttaagattcttttgtttttcttgcattttctgaagaaccaagtagagaattacgcatgtttaaatctttgtttaatttgcaatcttgtttggaatttatggctagcttgccaggaaaatgtgtgttttattgactggagcattgtgggtgcatttatggactggagagacgggtgcatatcgaattcaaagtgattgggtttatcaattattttcttgtggagctctattggtttctacatatggaagtaggtgcctaaaagaactgttatttcaagtgtgtaattgaatattggccttgtggacttagctgaacaaacattgtgcttatgttatatgctataagaatttttgcatttgcaagtccattgttgtctgctaagttaaaatcatgacaacccttatacgatgtgattggtctaggcttattgcaattaacttcttatatgcctgacaagtttgtgttatgatagggaaaagtgtgttttcatacaaacattaaataaaatttaaaaaaaaaaaacaaaaacaaaaatgagaaccctctaaaaataatttaaatttcatacattctcaatttaagggtggggggtggttgccaatgtggaaggtgtagctagggttttgggttgtagagtagagactctccccaccaattacctaggcatttcaatagggctccttaagttaacaagatagcttcatgattgagtggtagatgaggtggagactttttttaggtgattgcaatcatggacgatttgtagtgatatagaggataagatggtttggatgaatctgaaatgtggcatattctcagtgcatgaagaaggatattaacattggatcaacttaacaagaggggttggagaatttcgagtagatgctatttgtgcaaaggagaagaagaaatggtcgattacatcctcctctattgctcgaaagcagtcatgccttgatagctgatttatgcactttggaatagagtgggtgatgcacgccacagtgtgaaatgcctttttgagctaacatggatcttttgttacatgcaaaaagcgtggaatagagtgagtgatgcactccacatggaatatgaagaaatcttggaaaactactcctttgtgcttactttagatcatttgaaaggagagaaataagagaacatttgataacactacaaaagtgggtcaaacaattaaacaatcctttctatatacttttttggaatgaatagtgtatatatgagactgcttcttgtccctgatggattttattaattggtagagctctaaggaaggtggaggaagttgtttttttttatgtatatctatgcttttggggccttcatatatacccctgtatgcttttgtgcatgccttgttaatatatatgatctttgtctatcaaaaaaaaaaaaaaaagagttattagactagtagttcatacaagtccccaacctatatgccaaagaaagaaactatcacaatgtacaagtataaatatatatttgtacagaatgttgatatttgtatatgtgcccttttccccattctgatgtcctgtgtactgtagtgtatagcttctctccctattgttaataatattttcttgcttcctagtaaaaaaagtgtatatgtgccctttttaaagttctatatttccaagttcatcatggttcccttccctaagagaaaatcactcaaaaagaaaaaaaaacattttaagcaagtctttactctcatcatcctcaaaatcaacaatggaaatttttaaatgacacatttttcaatattttttgcaatggtagttaattatgtttaagtttcaatgtcccacttgcatctgtaatgaaatgagttgttttccacattggacactctttcacttctttccttcttgtcaatcatttctagccataaaatactcattaaacagttaaatatgatgtatggtaatcctttttaattttttaatttgatttttctctaaaacaattgaaaatagtagtagtagaaagtgctttcactgccacattttgtgttgtatgtaatgcatccattatcagacattgcacttaaaaatgagatgcatgctggagatatataatattcttttttttatgtaaaagagaactgaccatatgtaacattatgtcctgtaagtgttttatagctatgtcccaagagataaaagatttgtgtctgttagactgttacttaaattgactccttcaaactaaacaataagatgtaatggggcaccaacaaaagaacttaactcctttgattgccaattttactgatcaattaaagtatggatatccatgatacatgttagcatcactttgaggaacaactatagagaaaagacaagttcttgcaacttcacaacttttatggccaatgtacggtgaagaaaaagaatgatccactggtttggcatccctctcagttctcacacatattatgccaatttgtgataaccaaattcccactcatcgaattgttctcagccattgttcatgcaacttcagaggtatgaataagcaccacagatcaaaaccagagtttaatttggttcactatgctgaaattttaaaaatgaatttttaaggttattcgttaggatccaatcaaccaggaattgttagcaacaacaagatggcagtgggagaatgagtgtaaaaattttgagttccaatcttagtgctagggctccatcaagactgaactttcatctctcattaactagagaagctaaaaacttcaggactatctgagctttgtacttgttggaggtggtttttcgaatataagcaatgtgatctcaaggggaataaaaacatcttgggtttctttattcattgagacacatttgtaatgatggtatagatcaattatcatctccttttggaattggtttgctatgtttgaaggtttcctgaatgtgccaactctgatgtgaacatccttgtactgtatggagtgttaaaaagatacatctgttccttggcatagctttatgttccttttgttcctttttatccattcttatccttcttgatatttattttttctcatataaaagaaacctctctacaagaattgagtgtgtacaggcaagggaaaatttaacaaatcttaaacccatgcctgaccatggctacattattttatttgttaaacatgattatccataaaatgaatagaaaagaaaacaaaagaaaaatggaccatttggttcagtactaggaattaacatcacagaggttctcaatgctcatatattgttcattgtcatgtaggtcttgttaatactaatattatgcagttgacaaattctcttatggagcagagtatcagaaaaagatag

SEQ ID NO: 11107 - DNA, 1212 bp, Vitis vinifera
  Intron number 6 from transcript GSVIVT01014335001 (locus G SVIVG01014335001) derived from phytozome v7.0 (chr-ID chr1 9; pos 2735962 to 2737173 reverse strand)
caggtaacttgggctgtttctaaatattgggtcatgtatgttcttttacaaggtacaaatgccataatccatccaaattattttcccattaactctcttcccgtgacatcaaacattgcaaaaaacttgggctgcatgtgcatagagaggttttaatttagcattacagtttgtacaaaaattctttcaaaattattttttataatttatttctagctagactgaaacagtggattgtttaaaaaaacttgctaatttcatgaatcgataaaccgagggggtcttctaggttgcgagaggtatcaaggttttttgtagagccatattcatgttgaggatcagtcagtttctgagtagaaattgagttgcaactttttgttggtgccaagtagaaaaattgatcttgtaatctggtgaatatgttcctctgtaagaattagcatgagcaaaagagaaagatggtgatgagaactaccaatttctagttgctatatgaccaatcttaagctagtgctacatgtcaataatcttttgttcttttatgctctatttgaatgcgaagaatatagagggatggaaagaggaaatggatgctgtatctatataggggtttgcacctctgcttttattagatatttatatcgatatatttattctattttttgactgtcaaaaagaaaaaagaaaaaaaaaaggaatgcagtatctgaggttggagtggttgtcagaaaactcccaatgtcttgttttttattatgatttcataatgaccatataaagagcatatgttacaacttttgttagttaaaaaatacagagcattttgttataactggcggggtgatatttcacttagaaatttggtcaaaatatttgtattcttttaattagggagcattcctatttttatggattaggttgttctgtaaagtgaatgaagttctgttttcgtactcaataattttcatgtttggtagatatagctatttagtaaggtgagatcactgccctcatgatattgtagtttccttaacatttacccaagtctttttgagatttcaacataaatcagccactctttcaatctctcattgctttttgttgttaaatctttttttttttttttctttttggtttctttttcacctttatggtggtgaaaatggtcatcttgcagaaaagacaaggtcagtccaattcgaagagccggag

SEQ ID NO: 11108 - DNA, 11175 bp, Vitis vinifera
  Intron number 2 from transcript GSVIVT01001843001 (locus G SVIVG01001843001) derived from phytozome v7.0 (chr-ID chr1 4; pos 26245287 to 26256461 reverse strand)
ctggtataccatttggatcggtggaaggtatgtttctgcaattttagttattactgcactttctgcacaggttcttctagttgagatgacccgtgttaaatctttggcatgtactacaatttcaccaatcagtgtcacacacactggtgtgttttagtcatgaattcaccaatcagtgtcacacacgctggtgtgttttagtcatctaatcttaacaaggctgatatcttatttacagtatcgtttgtggagaagaatgatttttattcatgcatttctgatacagcatttaaaatgtacaatcctacaaaattaggaagttttttaacacgaaatcagaaggttgactaattcctagaaatcctctaccaaaacaaaatgggaaatatacagttcatacaatcttggaaatcagggaattaattccctggtatttttcaattaaatctaaaaaattaggaagttaatcaactggtattttcaattagattcaacaacatcgatatgtttatatgagagtagttaattgatttcatgcatagggtattaagtttttgatgagcattaaactctgatgttatatgcttctttaatatagaataaacagaatgctttggtctagtggcttactacagtagcacactgcctccttttgtttaagtggagtatttcattcactttctcatttttcatttgcgcactgctctctctccactttgacagctaggatgaaattgatctgggaattctttgtgcaacttcctctgctgtatacaaactgtgcaataaggacttttaggcttattgttgttgagactcctaggtgagtctaaactttcagcctggagtttggaccatgccttgcctattagcttggatgagttaacattatgataatgtttcaagtggtggaaggtcaacaactttaattcattcttaactgtgattctgttaaagaaggaaaggaaaaataaataaaaaaatctataccattttttaatccatgcaagttttgtggattgaggatgttttgtgaattttgagggtgtcaaatttcagtggaaactcaaagaaacacacttgtggggatatcaacttctaacacagcctaatggaacaattttggtttttattgacaagatgattaggggataccatgtgtttctaaatgaggtgttttgtgctgtcgtttgatttctatcctatagttgtttctctctctttttcttttggagctttattgcatactttgcgaatgctctgattttgcaacttttgatgcaattctcttataaaagaaagcatcatatatgcaccctaatgcaatttattaaagaaaagtgagcaagtgtgtggaattcatgactatggtatctgaggaaaaggggggatggttgatgtaggacaaccctaggatggttgcccatgctcaagggtaggtgggctagggttttatttttagggtgtaaggagaggaacaaggaataaattttatggtagagaaaaatataatataagaaatagagagagaaaaaaacaacgaagaaaagatcgaaaaccttagagtctcactaaggccttctaggagtctcacttagaagaaaatcaatggagtctcacctataagaaaatcaatggagtctcgccattgaaggttgcaaccttgcaatgaaagaaaatatgatattattaatatcaattcatccctttgatttacattgattagcctatttataggtttctctaagaaatccaaagtctattaagactctaataacctattatgattctaattctaattataacatccaaagtctactaggactctaataacctatcatgattcaaattctaaattataactcaactaggtaatcctaattagactccaacaaatatcaatcttaattcaattctatttaatattaatcctacttaaagtttatttaggtcttccatttcttccttgaataaactttaaaaggctttcccccatcaattccccccaacttgaaagaactcaactctgacgagttagatgattgatacaattcattgagatcggggttaagcttctgaaaatccattgtcataatccatgtgttttcagagtgtggtttgccttgctatttcaccaaaaacttttggtatccaccttgttgagtagacacaagttgatcatcaagaacatactcgatcttaggacgtgggctaagagtaggtggtaattgaagatccaactcttcacttacatcgttgtgatggccatggtagatacacatatcttccacattaaatattggactaatatgcaagtctaaagggagctttaacaaataaacattcttacccaaccgctttagtactcgaaatggacccgttttcttagcttgaagcttttgatatgtgctcggatgaaatctttctggacgtagacaaaccatcactagatcaccttcttgaaattgaatatatcttcgatgtgcacttgctgcctctttatagttctcattgctgagtttgattttttcttgtaccttttcatgtatatctcgtatatgacgtgcaaatgcatcaccatcttggttggtgcggacataggtaggtaatgatataagatcaataggttgcttaggtttcagcccatatgccacttcaaaaggtgagtacctagtagtatgattagtggagctgttgaaagcaaactcggcttgtggtaagacattgtcccaatttctcaattgatctctcacaatgcatctcaaaagattaccaaggttgcgattgacaacttctgtttgtccatcagtttgaggatgaaaagaacttgaaaattttaattgagtacctagcttggcccacaaggttttccaaaaatatctcataaacttgacattgcgatcataaacaatggattgtggtaatccatgcaatcaaactacttctttaaagaacaaggtagcagcaacatgagaagcattcgaagtcttcttacatgggataaaatgtgccattttgggaaatttgtcaaccacaacaaatatagaatcaaagtcccattgtgtccttggtaatccaagtacaaaatccatgctcaagtcttcccaaggtttggatggaattggtaatggtgtatataaccctatattttgctttgaaccttttcctacttgacatgctcgacattgtttgataaccttccaaacatccttctttaaactaggccaaaagaagtgatcttccaccaaataaatggtcttatctcgtccaaaatgttcacccattccacctccatgaaattcccatatgacatgatcacatagggaagtccttggtaaccataaacgatttttataaaacaagtacccttctaaaatctggaaatcaatacatgttgcttttgaaccactcaaaagagaggaataaacatctccaaaatcagcatcattgtcataacaatgctttaattcttcaaatccaattgtagtggctgacatgtttactaagaaaagagccttcctactaagggcatcaattattttattttcaattcctgcacaatgctttaaattgaaggtaaatagctgaagaaaactactccattttgcttgtcgagagttaaacttcttttgagaattaagatattgcaaggcttcatgatccgaatacaaaacaaattccttgtaattgagataatgtttccaatgtctaattgcttgcaccatcgcatagaattcaagatcatatgtgaagtatttttttctttgccccattgagcttctcactaaagaaagccacaagatgtccctcttgtctaagaactgctccaattcccacatgggaagcatcacatgccacctcaaatgctttctcaaagttcggtagagacataggataggagggttcaccatcttggatttgatttctttaaatgtcttgttggccgccttggtccaaataaataaactaggtttcatgcatttagtaatcggggccataatagagctgaaatttcaaataaatcgttgatagaatgtagtcattccatggaagcttcgcacctcatggatatttgttggtactggccaatcaacaatagctttgatcttctttggatctgtttcaatacccttagaagacacaacaaagcctagaaatacaacactagggctcatgaaagtacatttttttaattaatgtaaaatttttcagccctgagagtgcgcattacttgcttcaagttttcctcatgatctttacaagatcgactatagattagaatatcatcaaaataaacaacaacaaaccgtccaataaaaggtttcaatacttgcatcatatcccgtatgaaggtacttggagcattggttggtctaaacaacatgactaaccactcatacaatccctccttagttttgaaagatgtcttccattcatcccctggtctaatacgtatttgatgatatccacttcttagatcaatctttgaaaagattattgatccaaccattatatctagcacgtcatcaagtcttggaattggaaatcgatacttgattgtgattttgttaattgcacgactatccacatacatccgtcatgacccatccttatttggtgttaatagggcaggaactccacaaggacttaggctttcacgaataaaacctttagtaagtaattcatcaacttgccttttcaattcaacatgttctgttggattcgttctgtaggctggtaaatttggtaatgatgcaccgggaatcatatcaatggcatgttgtacgtcacgcataggaggaagttgattaggtaactctgtagaccacaagttagaaaagtcatcaaggattttacgtacgtttattggatattccttatcttgctctttaaattcttccacttcccaagccattaaagcaaaaataactttagtttccttgctctccttttcaaattgacacatagtaaataccttttttggttgtgtctcctctgacttcttaattggagggacttctttcattggacgaaggatcttcttacgttcgttgtgtatgagagcatatgtgttttcatagccgttatgttgaactcttctatcaaaaagccaaggtcttccaagtaaaatacgacttacttttatgggtaagacctcacaccatacagactcttcaaagtccttaccaaaaaggaatgttaccaagtaacgaaaacttaccgagatagaggtgtcattaacccatgctactttgaatggattagatgtctctctgttttaaggtttagcttctcaacaagttcttgcaaagctatgttcaaactgctacctccatcaatgatcatggtatataatctcccttggtaagaaatacgtgtctggaaaatgctagtacatcgctaatcttcttctctttttacctttgggacaactaataaaggtcatactataagactatgtccttccatcataccatcatagtagtcacatttttcactaacttcatctttattgtaggtctattcttcctttgggtaactctccaattcagattctggttcttcaacacaaaagtgtaaacctttggttgggcacacaacaacataatgaccatgcccaccacacttaaagcataaaggagtcacgtttacttttctatctctaatactcatggaagttttacccttattaccattcttgtgagccacattcgaagtccgttgagtgttgcccccaccattcgtgtgattagaagttctaaagcttgatgtgcttaaagttttgcttgctttcctgttggagaaagtgctcccaattcgtgaacttggatgcttggaaacccgaaatttgagggctagttgataaacatcatctacggtataagtgtgtgcaactatcatctcaagttgaatctccattcgaagtccaactttgtagcgtgctgcaagttgagcatcattttcccgtacttgatttcaaatgctcaattcatggaattgttttgtatattcttcaacggacttggtaccttgtttaaggaaaaacaattttgtatacataagttgttcataatcaattgggagaaagtgcactttcatcttcaacttcatctcgtcccaggtgtcaataggtggttggccaattctatgaacttgattttcaatattatgctaccatagacatgctgctccttttaactttgccttcacaaaacaaacttttctattttcgggcattgcataccaatcaaagtaatcttccattgacataatccaatcaagaaaagctgttggatttagttttccataaaattcagcaacttcaagatgtaccttttttgtcacatcatcatttagctcaaaaagtttggcccttctttgattccccatcataaaattgttttgttcttcgcgtgatcgacttggcgattgtataaattgatgacttgcaatctcttcttcaattggtcgtttttcttgacttttttctaataacttcatgatctcgtcaagtttgctatttagttgtattatagcatcttgatgggactgttgtgtggctgaaatttcctccaagcgtattgtagcggcatcttgattgctaaaagtttttttggaactcatgcttgcataagttgctcggctccttaattgcatatgccttcaagccaagaactttgactctgataccaaaattgatgtaggacaaccctaggatggttgcctactctcaagggtaggtggactagggttttatttttagggtgtaaggagaggaacaatgaataaattttatggtagagaaaaatataatataagaaatagagagaaagaaaaaaacaacgaagaaaagatcaaaagccttagagtctcatgaaggccttctaggagtctcacctagaagaaaatcaatggagtctcaccattgagggttgcaaccttgcaatgaaagaaaacataatattattaatatcaatccatccatttgatttacattaattagcctatatataggcttctctaagaaatctaaagtctactaggactctaataacctattataattgtaattctaattataatatccaaagtctactaagactctaataacctatcatgactcaaattctaattatattataactcaactaggtaatcctaattagactccaacaaatactaatcctaattcaattctaattaatattaatcttacttaaagtttacttaggtcttccccttcctccttgaataaactttaaaaggctttcccccatcaatggtgttctagaatttctaagaaaggctatggggtgggtctttggaaggcgatttgatgtggaaggggtttaatgataggattggctttagggtgggagatggcaagagggtgaggttttggaaagataggtggtgtagggaggaacctttagctgtgaattctccagaattgttttcaattgccattgataaagaagcttaggtagatgaaatgtgggagtaggttggggagattggttgttggaatccagtgttcacaagacaaataaatgattgggagttaggtgaggtggaagggttgcttagaagattgtaagagcatgtgatcagtggagtagaggatgttatggtttggcggttgtcaaaggagggcaccttttttgtcaaatctttctattcctcctttgtaggttgttattcaaaaggtttccccacaagcttggtgtggaatccttgggtgtcaatgaaagtcatctcctttgcttggaaagtagtttgggaaaaaattctaactttggattaactaaaaaggaggggttggagtcttccaaatagatgttatttctataagggtgaagaggagtcaacaaaccatattttccttcattgtcctaaggcaagcatgttgtggcaccttattttggctatatttgatgtttagtgggtgatgtcgttctcaatcaaggatgccttcattagttagcggggtgcctttgttgggaagaagaagaagaaggcctgaaaagttgtgcctttgtgcctattttggaccttatggaaggagagaaaccaaagagcctttaaagattctgaactaacagaccatactattttatgctccttcatgtacatgtttttggagtgggttagggtacacatagagtttacttctttattccttttagatttcatagattgattaggctgcaagtgaagcgagggcgttgttttttgtctatccctccttttttggccttgtatacatcgtgtatactttaggtgcttttaatacaattgctttacttatcaaaaaaatgactatggtatttgaaaccatctattaactgatacactggtgcattgcttatggagatttctacatggctgatgcatacataggtacttgatgggtttacggtacattaggtgtatggctaacctattgtgtgctgtgacccgattgtttgatataatgcataactgttagtacacatccccttgtagagcggagggtttcttgggtcttttgatcatgtttgtatttcatggggaggatttctcatccttcttatgttttcttatcattaattaatatatcttttgtttctgatcaatatatatatatatatatatataatgcataactgttaagcctatgccttgttcatgatctaaaaggaaatctagttttgaaaacctgggatactatcagtaccgatatccaatgtgatggttgaattattgaaacaaaactgtattactcttatggctttggtatgaattgtttgcttttattaggtttgttgattattagctgatttcttcctcaaaattatctttcatgtcatgaaccaacttaacctgattaactgccaaattggattggacccagatgcaccattttcaggtcagtagccaggactgtttaaccatctacggtgtaaatagaagctcatcaaatctcttcccttatagaaagaaaaccatccaaacttcacattaattaaattatttttttccttgtaaggagtcatgacattatggcacttaaaagaaaatgatgcaagcaaatgatgcactgctggcttttacttatacccgttacccatgtcttctaccctttctgttgacataaaaacaagaaaaaggaaaaaggctattctacttccggcggtatgccctatgtttagcatcttcttataaaagaatggatctccctgcgagaaaaagattgtgtatttcttcaccagagacgggtactacttgctcagttcaaatcgctttgttgcacagtgatctctgtgcaataccttttatatttgtgatgagtagttcatgtatggtttattgatatagcttcataattattctattgaatctgtgtttttaggatttagttacacctcttactttctaatttgttttgcgctgtgtggtagaatatcgctttggttgtactgctttattaggtttaattgtacctctatttatttatttatccttctttctgaattttctatctcaagggagttcttaaattatatctagtgtttattatgcaaatattgtattcatggaacttatcttggtgatcaaatatttaaatcattccttgttcttgattctgatgagatttttctttgtggctggaggtctgtgcattttcagaagcaaattgtgagaacccagggttcccttttctatagtaaccaaacccatggttcccttttctatggtaaccaaacccgtggttcccttttctatagtagcaaatatatttttcttcctttttttttcctagatgattaaaccaatataacggaatgatcatttttaataattaatggctattgctctatttttcttccgtttatacttgtcttattttattgaagttctatttctttaattcagtcccagtcctacacttcattttattttagaaccttttgacttatcctttgttttaacctggcatttaccctgattttggaccaagcaattaaaactttgctgcaaaaaacaagtgccatggtattcttcctctatggaaccaattagttcatccaaaaataggcaaacagatgtggcctcaatagtgaccactaatttaagtttatgcctcttgcaaaattctgtctctttaccaattgtcttcactctccagttacatcttcagtcattgatgtccttgatcatgatctatcatctacatgatacttatttctttgctaaaacaactgtctcaagtcaaataagaccctgcatgagtcctttctaactcttttcatccagtgcttgaatgaaaatctccccagaaaaacaaagccaaaatgttttccaatttttttggttcatgactctatcttagagtttcattattgactaatttttatgataccatgatatttagtgaaactatgaattcaaggaactcagagaaagaatcagtgaaaaagttccatgcaatagagacacatagatacaatgatggacagacttcttgagccacttttcaacattcaaatttcttctattcctctttctggaaagtaaattaagtacccagaatggcaagtttttcacatggggggcattcctactgcccttagaattagtcttcccattggaaacaaatcctttgatgggggttggcatgatagagcacactcttaaggctttctagatatcgagcccagaaagtccaagttgaatcatacttgcatatgattaacttctttgtcatgacctgtgtcctcccagtcaagtaacactgccacctgtgtattgctctgaaaccggtgtactcctagtcaagtaacattgccacagtttcagagcaagactaaatacctgtgtccttcctagagactgcagtcttatttataaaccattcaagtatatttctgcgactttttgcacatgctttatttttctgttcacttttaaatcgttggatttggattgatattcataaactactaataaatcaggagtaggtgctctcatgtaattgtgcctttttcttttacaagtcgcatatttgccttaacaattcaaaaatcatatatattgttcatgcttttgtataagtgggaatctttgagtttctatgggacatttttcactacttgtgtagctagtggccggtcaacagtcaaccttgaaaggcct

SEQ ID NO: 11109 - DNA, 9111 bp, Vitis vinifera
  Intron number 3 from transcript GSVIVT01036698001 (locus G SVIVG01036698001) derived from phytozome v7.0 (chr-ID chr1 9; pos 23704175 to 23713285)
tgcacgtcttttacaggtcactttaatgctttacttcttgtcacaacttgctgccattgtgtttaaatatctttttgtaacatcttcctgaaagctcttttgcaaaagaatcttatgtgcatctttactaagcagactttttaggtttcaaacctcttttgcttcaacgtatttcagagtgtaatgaaacccaattagatggaggataataataagggaaaagatagaaaaataaatgtgtttgagcattagtacaagttggattgatacatattgtttcttttacctaacaagtaatgattttgggtcaaattagtaatttaaaaacatggtgttagagtctaagctttgggaaggtcatgagttcaaatgtcattacttctctatttctatcctttattgagtccatgtgcaaacctatagaagttttttggtgaggcaaggtgttacgattttagaccaaattgacttgagatgcattgctgacctaatatctaaccaaagttaaaagttttgggaaatatcagcgatatttccccgaaatatcggactttcacaactaccgaaaggatatttcagtggaaatgtcttttgcttgatatttcccgattttttgctgatatttcgggttttttcctgataaatgcctattttctcgattttttgatggtcagcattttggtcaaagctcaaaattttttgcttacaatgctgagactcgaaccctgcacttttgtagggaagaaaggatcttggatcacctggactgatgcactatctattagatgaaatgctaacaataattaagtttctatctcattttaattagaaaaaaagaattttgaagatgaatatatttttaatgcattcttatcaaatacaaaatgttaaaataaaattttaataaataattaaattcaatttaactaagtattgaaaatataaaaccattatcataattttttaacgagtcattgttaacattctagatattaattaaatacattgattataaatttaaaaataaaattataaacatttaaaaaatcttacatatagaattatttcttttgtatcattaatcatctaaattatatatatatatatatgtatattttgtatgaaatgtatttttaagtactatgtattattaatttattatcgaatattacaaattgtattatacatatattatttaagagtaacgacttgaataggtgtattatttcttgttttattattattttttattttttttcaaaatttcttccaccaatattttgtatcaaaatatctattgatatttctcaatatatccgtaaaattgagttattaatatatttgttgaaagtgatatttttgtctttgtacctaacaacttaagcttttggatcaaattggtagcttaacaaaatgaatttacttataacatggaggtggcttcaagcctccaactaaaatcgagatagggaaaagtgtcaaagatgctcaagccatttgtatggtgaatatatgaaggcactagtagggaggggtaaggtgtgaaaatcataggagcaaggtaaaagacctggttagacttccctatgaatgcattattgtggaggttaagcctaaacaacaagaggaagataaaaaatggatgtaagttggatcctcaaaaaaacttatggatgcaccattgcttatatgagaatgttgtcccttgattcaaattaccattctcacccatagttgttacaaactcaattctattacatgcattccttgatcttgtttcttaagtggttagcattctcttcccattttcttatataaataggtttgggtttgggaggaaggaagtggtcaccaaggtctctttataggtcatatcattttcttttgtttaggccactacaatggaatcattccccacaatataattggaaagatcctaagctctggcttgcgataagccctccaaaagtgctaagatctttgcctcaaaagcccaatcctatctactaatttagagcaggttcttagtactataccatctccttaatcacatttccaattcttgattggcttaggttacctagagtatacccatcaaagtcaaacccaaataaggtggagtccatactaagagcatcttacaacctaccctttttaacttgtaaatcatattttgatcaagctatagattgtttaatggaataccttcaaaagctaaagacgaataaacgcggaaggatgagtagaaatgcattagatccccaatagattctaaagtcatccatttatcctaaaaaattcttgcatcctttcccctctaagctgtccatggtaacttaaggcaagcctcatgtcaaagtacccttcctatgggggtatcctcaaaccctctaaaagagagaaacaacatatttatcacattagggagaagtctaatcaaccctagtaatatttttgataggaaacgataaatagatatattgatagaaaaaagaagtataaaagaaggatgaggaatcctcccaccaaagaaaaaactaaacaacaacaataaaagaacaagacgctacaaagtgaaaactatgaacaagctctcttggctagaccatcccgttggagctacatactgctagccaatctagttgtaacacgttaaggggaatgcccttaaaaaccacagaacaaaaagcctaaagagaagcaaggaagtgaatggaatcccatagattctttgaattcttagctttatcctcaaatatcctaacatttatttcccgccacacaacccaaattaaagcaatgcatgcattttgccacaaaactatccctctcttggaaatgccaaaacctttataattgatgaacaacatgtcggaaatacttctcgggggaacccaatccatcttggctagctgaaataatctgtgccacaaccccatcgtcaaagaacaatgtaggaaaagatgatctgctgattttccctgcttcatacacaacttacaaatgtcaggactaagagctttgtagggtcttctcaattttagcaagtcattagtatttaccttcttatgtgccactaactagacaaaggacttgactttaaaagggacttgagaattccatacaaacttagaagggaaaagtggagataaatcgggtagttgggacaaggttataaagaaagacttgactgtaaacaatcctaaagaagataaagaccaggatctcgaatttgaagccgaagaggataaatgcatacaatcaagagaacacatgaggcattctagatcttctatctcggaattggaaagattatgacggaaattaaagtttcaagagaaggggcgagcagaactgagaattgaagatataagaatatttttatctgtgattactctaaatagtcttggatattgtgatctcaaaggctggtccccccaccacaaatcttctcaaaagcgaattctttcccatctcctaccacaattcgagtatacttagaaaaatcctgaaagacttgtgcgatagccttccaaggacatcgatgtgaccattcgactaaagtgttggcatcccaaccattggaatgtgccccataaatgctaaagaatgacttgatgtcatagagctgtgctctccctaggaaaccttcacaaccacttccctaaaagagcgagattccttaaaaaaatctttccaaaacccaatcccccttttaccctcggtttacacactacatcccgactaacaagatgatctcttttaccttccccaacccctgaccaaaggaaatccctttgcaatctctcaatttttgtagccactgaagcgagaatcttaaacagggatagaaagtagctaggaatgtgggaaagacatgaatggataagagttatcctaccattgaaagataagtaagccttttgccaatcgtctaatctccgtgagatactctcaatcactggatcccaaaatccacaagcaattggattccctcccaaaggaagacccaagtagagtatatgccaatcagaagccttgcaatcaagcatcaaggccaacctagagagatgattttgatcaaggttgatgccaaaaaggttactcttgtcaagattgaccttaagcccagaaatttgcccaaacactaacaataagctcttgagagtttgcaattcttccgcacaagagttagaaaagaagatggtatcatctgcgaattgcaaatgggacacccttgttctattcctacctaccctaaaaccctccaacatacttctttcctcagctctcaataacatcctgctcaacacatctgcgacaatagtaaacataaaaggagatagagggtcaccttgccttaatcctctagatgccttgacccaccctttagcatttccattcactagaattgcataagagaccgaagacagacatcctctcatccaggtcctccatctaggcctaaaccccttcatcttcagcacatggtccaaaaaatcccaattcacatggtcataagccttttcaaagtcaattttgaagacaagtccttcctcccttgatcgttttttctcatccactttatctcattggctataagaatcgtgtccaaaatttgtctcccttgaacaaaagcgccttgagtagaatggatagtttcatgtagtacttctcttaatcgccctaatagaactttgactattatcttatagagactagtgatcaagctaataggtttaaaatctgagtttttctttgtctggatcaactctagtaatatgaaatacctattccataggctcaaagttattaggcaatgtaaaaataggtgatcagttgattgcccattctttagagacataaaacaacgattgatctaagatctttgaaggacctcctcacttataacaaatcattgctattaactttcttattgtccatcaaccatgcaaaggccttaactatagatgggcctttagacttccaaatgaagttggtggggaaaggaggactcataatcaagggttcaagaagaattgagaaagaaagacttaacaaaaaataagcctaagaaattcaatgacagaactctctcatctaagaaggaaggcgtaatggccaatgatcaatctattctccacttcccatatacaaagtgcaacaatcgatttgaaaggttttgaaaggtcttttcacctaaagcaagtcattggtgttaaccttcttattgacccctaaccaaataaatacttcgacctttgatggggcttttgttttccatatgaattttattggagagaaaagaactaaaattgattgattgattggataaggctaagaagaacgatttgatggtagataagctagaagataataatgaacaaactctcttatttggggaatatgatgataggttcacatgattaataatggatatgagactcttaagatcctctatattcgagtaagtgggtttttgtcgaaagttaatgttctaagcaaaaagaaagagaagccaatgatagtgaacctttgtgtcatgataacttgactagaaaaatcagagaaaacttgtgaaatggttttccaagggtgatggtgcgaccccttgactacattgttagcatcttgaccattggcgtgtgaccattggatgcttaagataattttatgccataaaagcatgaccttcctttgggaatctccagaaccgctagtgctatatttctcaaagaaatctttcttgaactcatcccctttcctcttttggcttattcacttggtccttagtgatgaagtagtccctcttgccttctttaactcctaaccaaagaaaatccttctataatttctcaattgtgagtactacttttgaagggatcttaaatgttgatagcaaataaatgggtaagagagataagcaagattgtatcagggttattctactacctagggacaaaaaggctttcttccaactatctaatttatgggaaatcctatcgagtactaggttccaaaatgaagagctctaaggtctcctctcaagggtagacctaaatatagaggggccaatttaaggctacacaccctagcaaggtggccaaaatagtaatatgatcttgactcactttgatacttaaaggtgtcttcttctctaggttaatctttcttgaactcatcccctttcctcttttggcttattcacttggtccttagtgatgaagtagtccctcttgccttctttaactcctaaccaaagaaaatccttctataatttctcaattgtgagtactgcttttgaagggatcttaaatgttgatagcaaataaatgggtaagagagataagcaagattgtatcagggttattctactacctagggacaaaaaggctttcttccaacaatctaatttatgggaaatcctatcgagtactaggttccaaaatgaagagctctaaggtctcctctcaagggtagacctaaatatagaggggccaatttaaggctacacaccctagcaaggtggccaaaatagtaatatgatcttgactcactttgatacttaaaggtgtcttcttctctaggttaatcttaaggcttgaaatgtgttcaaaaaccaacaaaatgagcttaaagctttgtagatgttttgttctaagttcttgtaaaaaatagtgtcatccatgaattgcaattgggaaacccgagatttacttctacccaccaaaaacccttccaagatgccttgcttcttagctctcaacaagagattggtcaaaacatcaaccacaatgataaaaaggaagggtgagagcttatctccttgtcttaaccctttagaagccttaacccgctatttggcacaaccattctctcaaagaacaaaatttactgaagaccaacaacccttaatccaatgcctcaatcttgaatttagccttttctttttaaagcatggtatgaaaaaccccgataaacatgatcggaggaagtattttttttttttgaggaagtattcttcaaatcaaccttgaaaaccatgccttcttcacctgagtaccttttctcacccattacttcgtttgccgctaagactgatttgatttccttcagaaaaatctccttgcgaaatatggatagtttcatgtaacaacacccttcaaatgcaacgtgacgaacccttggctattatcttgtagaggtttgccacaaaactaatgcgtctgcaataagatattctaatggtttatgactccttttggggataatggataaaaatggcattgctatatatatatatatatataagtacagcacctgcactaaatgcacatcaattgctactcttattgatgaatgcactattgtagaactctcaaaaaactttcatcaaatcttcctcaaccacatcccaacactcttgatgcacaactatggaaaaaaccattgggtttgggagacttcttcttgtcccattgaaagactgctttgtgaacttcctttttacaggtcataagatattcctcacccccaccccccattttttttgatgaattttatattattcaaactgttcattcttaatacttaccaagctttgtaggatgctgcttttgcagcagttaatgtctgaaactttttgttccaagacacatttttcctttttaagtaagaagacaacatttcagtaaatgaaggacaaaagattcctaggaaggctgaattatctttcaagcaaaccacaggatatgaaaaactaatggcaaacaagtgtgtgcactaagattgcactcccttttgtcttagatgccttgcctatctaaaaaaggagggaagacaaatagaagccccagtgcccaacaaaagaacccataggcgtgaaaaaaatgctgaagcagaaggatatctccaacataaaatttcatagcagcttctagtgtagccaaaagattttgtttcctggttggtcaacctaggcttccaacaaaaggaatacactaaacctatgaaaaatcaacaatatggcaaattcaagcatcaagcttctgaggccaccccttgcatcagtgggacacccttaaaaagttaattggtgaggccctccatcaagaggttcagagactagttctttcttttctattgcttcctgcaatgcaaacagtagtcatggaataggatcagctccccctatttgtcttaataccagattgatggaaaaagacattagttaccattaacatgatttggatatatatgtgtgtgtatgtattatgatttaggttctgtaggctacatagaggatagcatgatggtttctttgtttggagagagactaaatgtgggaagttttcagtgaagtctctttacaaatcattagtatcaggccatccagtctccttcccttcgttggctatttggaaagtctcggtgcagcctagagtgagttttttgggtgggaatcaacttgggggaagacccttaccttggatcagctccaaaagagaggatgggctctagcgaacagatgttacctttgtcaaaggcacgaagaatcaatagatcacattctcctccactgtgaaaaggcaaggactctttgggtgttgcttttctctatgttcggggtgcagtgggtgttgccagccactgttaaggagatgcttttggggtggaatgggacttttgtgggaaagaagaggaagggtgtttggagagcaagtcctttgtgcctcttttggacggtttggaaggcaaggaacaaagttgcttttgaggaagaagagctgtcaattcaaaggcttaagttttcttttgtttattttctttggttggagatgaaattgtctataaaagatggtcatttgaccttagttgcttttgttggttgggtggcaaccggttaagggtgtgggtagggaagctcctctggccttggcgttcagctagggtgtgaggggtgtttttctttcttgtaaatttaagccactgctttggtggttttttaatacaatctctttacttatcaaaaaataaaataaaattatggtttctttgtttaatctgatgaatttgcatgcaatcaggagaaagaacttattgaaaggcata

SEQ ID NO: 11110 - DNA, 9171 bp, Vitis vinifera
  Intron number 4 from transcript GSVIVT01020548001 (locus G SVIVG01020548001) derived from phytozome v7.0 (chr-ID chr1 2; pos 4595017 to 4604187 reverse strand)
tgacagggaaaaaatccaaggtctaaaaatcgaaggtacatcagcatggacttctagaaactactgaaaattttctataatcttttatatagtattttgtgcttgttcataaattcaaccagatgaggtgactagcaagtgctgaaagttgaaactatgtttctgggtcatgctactgacatattgtttactcccattttccttttatgtcaactgtggggaatggagtgatctcaatgatagcatggttgtgacatggagcattttccaaatgagatatgcttatttggaagactttgagttctttttttgtataccggatttttagttcttcagacattcatatgattggatactgtcttagctattgctgtttatttaccatagtttttctaatctcatcttggaatttaagatactataaattagttttttttagtttctcaaatgagttgattcttcagttttttgaacctttagcatcatatttgtataaatgaatcaaagacatcatttctaagctgtattttagtctgtcttactagttttgcttataattattttttaagtggtttagttggttatattgaagttggatatttgaaattcattctagttctgattattaaaaccaagtaagggaaatggaaattaggaacttgccttctgtacatgttcagtgggcttatacttcactgtgtacccattttcaaggtacaaacttttttttattggtaccgttagttcctaatgtttctactttctagggcatcttcttatggtatttctttatttttgttaattacttcctagtagaagaaatgacgagaatttgtaaacaattattaggctttcccttggattgcaataaaagacgagttggcattcgcatttaattgtacccttggtccttgaatataagaattctagctgcatgattgttaagtcatggtgaatagcttctaagagacatctcctctaatttaaaagttcttttgagtataatttaacagttttaccaatagtcttgatgcctaaggtcttccatccattacaaccaattttttagtatccccaagtaatatctcaatgtggtggtgttggcaacggtggtggggctaggggggtgtttgcttgtagtgccatatggtgtggttttgatgatcatgactgtggcatggtggtggtgcagtggtggtggaggtagtagcagtgacgatatatggtggcagtgggtgcatggcagacatagccatgcctcccttgttaaatactcagttgtcagaatttgaaaataactcctctcccatgtaattttgaattcgtcatactcaagtatttcaaactccagtatctcaaaacccttctccaaaatgcctagaactatgtaatctagaaaaagaaattcttaaattgctttttattctaaattcccttctccaaatctgttgtccaaactcacctttggtatccttaaattcttgtgagaccttgaccatggagagttgtatgcatagagatggaattggaggcatgaattccatatttgttgtttggttggttaaatgtcgtcagatgacctatcttttagggcacaagcaatgtctttttcctcatagtccttggtggatcaatggattgctaaggtttgcggccccctaggattattttggaaaattcttcgatttagggtcacaaccaagtgataggtcccccaaagtccactattcttttaaaattcctacaatactttgtaagtgacctcaaaatttccatagaggatgttgaatatttgaccagctcatatatatttttttgataggtaaacgatataaataaattaaaagtgctagcaccaaagtacacaagccatatacaaaacatcttcccagtaaaataaaacaaaaaggtaacaaaaataatcacccttgtagaagatcataaccatcctaaaaatattattttttgatagatataaccattctataaattctaacatggtcagggagttcccatctatatacatcctaacctacaacaaaagtttatatagaaaagataattttagagcatgtttagacatctctttgctttcaaaagatctccggttcctcttctttcataatgcccaaaacacacataaaaggaataaccctctaaacatgcttctgtttttcatccacaaaggaattgtgccaacctaataaagtctctttaaagtttaactaaacaaggcatcacccatgcaacccaaacaagtagaaaatcaaatttcatagttcacttgctcgagtgcaatctagaagaatatggtctagtgacttttcttcttctatacaaagaaagtatccattcactagagcttatcctcttctttgcagctaattcagtgttaaaacctttcccttagaagcttcccatgaaaagaaacctactttggtcataaccattgagctccaaatagcctttatagggaaaacaacctctctttcctacctcaacaaagagtagaagaatttgactagaaatttccccttctttgcatcccatccattgcaacctgttgtcttcattccttctcacttccttaccttgaagccttaagagaaattcctcaatcctttccaactcccaatcatttagatgccttgaaaagaggggttgcaataccctccctctccctacttatctaatacatccatcacctaagcatctttagtcatggaatataagagggaaaagattctcttagagttgatttactatacctgttgaataatgtatttatagtatacaagtttctttcctttcttaatataggtcacatatatggtagttaggtcaacccagccttgtatatatatttccctattgtaaggagttaacaacatgaatgagaattaaggttttctctctctctttcaacaataccaaatatttgtccaaaactttacacatctaccattggccacattaaaagaggttcttctactaattatctccaaacctctcccgatggtcttccacaatccaacatcaaagctattattactctcccaagaacaccaccccctcctttgctccatacttcccaacaacaacctgcttcttaagagactcattttcaaggcaaacttccataaccactttcctagcattgccttttaggagttgaaggcattctaataccaagacctttattgcatttctccttgcaagctatcccccatctcattggatgcagtttttttctccaaggaacccttaacccatagaaaacctctttggatcgtctcaatccttaaactaactctattggccaagggaaaaagagacgtgataaatgggtaaacttgagagagtacttttgacgagagtaagcctcctgctctaagagagataccatcttttccacatagccagcctcttgtagatgaatgcccactagttgttgatttataggagtctcctaaaggaaggcccaaatgcacgattagaagctttcccctcctacatcccaactcagccaccaaatcctccacataaagaacactacccatcagaattttgattcccttttctctaaattaatctttaaccctgatatggctttgaaccacatgaagatccaacaaagatataaaattgatctagattggcttcacaaaagtgttatttgtgaataaaagatgagacctctccttgccttccactaacttgaaaccctgaaatgaaacctccctcctttgccctctttagtaaacaactaagtcccttcatgactaaaatatacagattggggaaagggatatccttacctgaaacctctaaaactttggaagaaacaggtgggagtttcatctatcaatatcgaaaatcttgttgtagagtgtagacatgcactaattgatccaaccaatctaatttttttttgagtcccattttgttaaggatttcttacaagtaagcccaaaatttacatgccttttttcaaaattcagcttgcatattatgccattcaagccattcttagttaagccttgagtcacttgctttattagcaataagcacttgatctaagttttgtcttctttcaacaaaagcattttgagagttagaaacaattgatcccaccactttctttaacctagtttccaaaatattagcattagcaagctacttgtataagccactcactaaacttatatctttgaaatctttcaagtcctctaccctttcctttgtagaaatcaaaataaaaaaggttgcgtttaggcttctttcaaaagacccatgctcatagaactccttgaaaaaacctatcacttaatgtttcaaaaaatcccaatattgttgctaaaatgctataatgaaaccatccaaccttagtgctttatccctactaattgcataaagagcaaccaaaacctcctcctctgaaaatggaacctttgataactcaacactatctctactcaaattttgaatgacattccactgataattggtctctaatcaccagaattagataaaatgttgtgaaaggactaagttatcccttttttttttttatcttctcctccttagaaaagccaacaaccatttaccttaatcataggtaagaaattcttccttctatgagcatttaccatcttatgaaataatttggtgttcccgttcctttccctcaaccaaatttctctggacttttgcctccaggatgcctattttaacaagacccactagtgaaactccttagctacccttctagcttcaacttcttccaaattaagagttgcttccctttcttttgcatcctaaaagcccacttttttcaaagttgcctccctcctaatagtaacatgaccaaacacctcattattccatatctttaaatttgctttcaaagcattcaacttggatgctaggataaaattgaaagacccattgaactatccacttgctaactcctcaacaagtctttaaaaccatccacttttagctacatattctcgaatctaaagaatgatttaaccctcctgatctcacctctatctagcaaagtaggctagtgatctaacattggctttgataaaacactttgcaaaagaccattgatgttactttcccaatcttcagacactaagaagcggtagatgcaaataagattgattgttctcaccttcacaccaagtgaaagagcccctagtcaatggaatatcgtgcatattcaactcgattatatttgaaaaacatctcatggttgttgttaatctattgttatttcttcttttccttggaatctaacaatataaaagccaccaacacagcatggatcattccacaaccatcaaatgttccctaattcaatccaaaagtcctccctctttgtgtactgagtaggattgtcacccccctcttcttgaaaacccgcataaaagcatcctcataacatttgaaactacacaaaattaaaaacacctgcacttctatatccactaactctagaactctgttgtcttaaaaaaaattagatacccctaataaccccgatgagcctccgctatactcaatttgcacatttacctccacccaagttcctcaactccattgacatatcaacttttgtttcctataaacacaccaatttctccttctaaaatctaattgagcacttgataaccatctttgtttgtttgtcattaacacaaccttctaatgccccctagtttagtccaaaagtcctccctctccgtgtactaagaagggctgttactctccctgtgaaaacccgcacaaaagcatcctcataacatttgaaatgacatgaaattgaaaacacccccacttttatatccactaactctagaactctattgtcctaaaaaaaaattaggatacccttaacagccccacaagcctctattgtacccaatctacacatcttcctcaactcaaattcctcactagctccaatgacgtctcatcaacttttgtttcctacaaacactccaattttgctttttgagatctaattgaggacatgataaccatctttgtttacttgtcattgacaccctttacattccaagttaaaattctctctttcattaaactttctttggtcccttgcctaaatcccaactaccccttccattcccaccttcctttttgcttccttaaaatttatgtaattttttaagctccctttctgtttttgagaatttttcctttttctttgcttgtcccttagacttcttaccttttctggcctccatcttccttatgaggtctaagatctccttgttgaacccatcaatgagcatgcctataaatatgctaaagccaacttatttggagagacaccactcataggaataaaccttgcttggacttctcatccatctcctttcttgaactctctccaagactcctaaaattatctaggaattccacaaagctaccatcttgaaaaatcatccttaaaggcccatttatattccttcattgcttggtgtcaaatcgcctaaatgatgccccttgagaaaaggacctcttagtctcaaccacaacaaaatctcacccccatgagaagaaagaagaggaacaaggccataacctttgagatgaattggaaaacaagtgcatttgggctaatgaccctttctggtgcaacttgcattgaggtagttgaaggggatgcctgagtagattgagatatcacaagctcattatgatgattgttgccatctttcttgaatccttgcccttcatcacccttccttgcgaggcaaaaaccatcatccttactttctacgaaagacgcctcaccacaacgtgactaactcatctattctaatgatgtctttttgtctttgtcatattgctatctaacctcatttatttttttgctatctttttgtgttttgccgtttactttgagactatgttatgattaatagtactaaatattagtcttatattaatattgttgtattattattattattgttgttgttgttgttgttgttgttattattattattattattaatactattactaataaaaatgagtttctattaagtaatcttatcattattattattcttattgtaaatgttattactattaattattcataatattactattagtactaatattattagaattgtcatgattactagcattattattcatattagttctaataataaagatcacaaggatacttgactatctaccttccaggtcctttttaggaattacaaaaggggaattctatttgtacccaaggtttttccctttacactaccaatttcttttattattttttatatataaaaaggtgtgatgaaattatccatttaccctaaccttctacctcacctaaaaaccctaaccctaatccctatctctttccccttcctcttattgaccttcattttcttcttaacttccatcttcttcaccttcaattttgttgttgtctatgaaaatgattaaggtgaataacatgaagttggagagaaaatggaggtaagggagaggaaaaggaaggagatagggattagagttagtttttaggtgggtttaggtgaggcaaaagatcagggcaaatgggtgattccataacaccattttagatttaaaaaacaataaaagatatcagtggtctaatttcatagtgcctttttatggctgttggtgttttctttatttgatatccattgggttttttctaccttggtaaggaacaccttactagggtggcaaggttcttttgtgggaagaaagcataggaaggcttggacagtagcccctttatgcatattctgtactatatggaaagaaggaaattgaaaagtgtttgaagataaagagatgtcggatcacaggcttaaaagttctccttaacaaccttgcattgtgggttcgggtgtacattagtgggaactctttgtcattaattgattatatagattggttgggttctagttgagggagggtattgttttttgttttccctcttttttgctgtgcttctttcacccattttatacttccatggtactcttgtgcatattttgcacttttaatacattctcttacttatataaaaaaaaagtggtgtaaagtaataaaccttgggtacaaattgaattccctgaagggtatttcttcagaggaattctcacttggttttgatccagtttttaggaattctcctagattattttatgaggactttacttttttgtgagtttgggacaaaaataaaagccgtttatttagaaataaaatagttccgatctactatgtttgtgacaataggagagagaaggataatgtagtaggtaccatgtcattttccttcctttttttgttggtatttttgctgcacaatcaaacagctaatgagcattagctttttcagttttaatctaactggttagttttttcatattttttttccaaaaaatcctgaacacatgatcttggtaaaacctgaaaaagctgaccaggataatatttttcggtttttgtttcgaaaaggatgagcaagctagttagaataacatttttaaaactatccgcactaaatattttattggatggcaaaagaaaggagagctatatggcaactgccacgctaggctcctgtctcctatcttaaacatggtggactattttgcttcccaaaatctaaaatggccttcagcctaaacaaataatgtttatcccaagaactctttttgcagtcatgtggaacatatgaaataaattcacaaatttagagtagttaagatgcactctcaatcagctatattttgatgttcatgtatagcctctatgcagttttttcccttgaaaagatgagccttcatgctattatatcttcttgggctctgctcccagtaatctggaataacctatatgcttttcatgtgttgtctatgttctttacctattaatctaatccccttcttgtttactagagtcctgcataaatacatgggcattaggagactttattagaagcattagaaatcattttgcagtaaagttctttccagcctttgatcattaaaacttccacaggttactaacaggatggcatcatattttgcaggtttgcagtcggtattgaggcctaggtgactttta

SEQ ID NO: 11111 - DNA, 7890 bp, Vitis vinifera
  Intron number 8 from transcript GSVIVT01011602001 (locus G SVIVG01011602001) derived from phytozome v7.0 (chr-ID chr1 ; pos 6051613 to 6059502 reverse strand)
gcttgttttcagggttatcaaagtaagttttcatttctttctacaatattttgttattacttatatctagaatgtttttgaatctacagtctactaatgatcatgccttcagaattaatcccatggtgggggtggatttccatttctttcaactttttcctttctactaataatcatgcttttagaattaatcccacagtggggttggtttccttttcttttgattttttcctttctactaatgatcatgcttttagaatcaatcccatggtaggggtgggtttccatatctttcgattttttcctttctactaatgattatgctttaagaattaatcccttggtgccatttgtttcgattttttccttaccaaaatagtatacatgagatattttctgaacttggttcctgtgatattttgtttctcttggtgaatgagttgaccttgccatggatgacatgttactccaaatttatgtttcattttttcttttcccatctaataaatagacgaaaccatccaatgtggaaaagatacacctcacatatctttcccatctttgtcccttgtggaacttggaaaatcatgaaacgtttttcatccattgtgtctaaattacctaagccatctgcagctatattgttttctctaagatatgcaaccatgcctcttctggttaatttcagcacacaatttcacattctccatggatgatttgtcttttcttggattggggaagataactgaataaaacttgaaaggagagagggccctaggtctcgctttttacttgggaaaggaagaagggttaaattctagaaaaacttgtggtgtgaggaccaaactttggaaaaagcctttttgaatttattttcctttgcttctaacaaggagggatgggtggcagaggcttgggaggtggttggggaagagagggtcgttggagcccctgtttttcaaggcagtttaacaattgggagttggatgaagtggagagctcattttggaaactacaattagtggtaattaaaagggaagtggaggagacattgaggtggaatgaatccaagtgtgacaagttttcaattaaatctctctattcttccttatctacaggatttagagagtgtttccgaactttgtgtggagatcttgggtaccagtgaaggtcaacttctttgcatggtaagtgtcatggggtagaatccttactctttaccggctcaaaagaaggggttggactctccctaatagttgttacttgtgcaaatatgtggaggagacaacagaccacttgcttttacattgttccaaagcatgaatggtgtggcacttgattcttgccttttgtggagtggagtgggttatgtatcttcactgagagggaacttgttgggttagaatgactcttttgaggggaaaaaacagaaaaaagcatggaaggccgctcccttatgcttgttctggactctttgaaaggagaagaataaaaaggcttttaatgatgttgagtagtcagaccaaacaatcaaatatgttttttgttatacttttgggaattgggttagggtgtatatagaggatcacacaatgtctatgttagatctgtagattggttgaacctaaagtaaaatcaggtgtttttttttttgtttttttcctttatcatcagtgggcgtcttgcatgcttcgtgtgtactttgctacgcatccttttaggcaatactaatacatgtcttcctgtttgcctatcgaacaaacaaacaacaatggccctaggatcctgaaatgatatacatattttcttttttatatacattcccaaataatctctttatgtgtgttgtattttatttaatctttctgatttctcttaaaagtgctcttaaatatttaattttccgcttttcaacctgtgatgataactctccctctgtagaatgctcttaaaatgtttattttttttcttgtgtgcaatctctctctctctctctctctctctctcatatatgtgcatgcacatgattgcacatgtttttattcatccgatgcatatttttcttcattggcaaatcttgcttcacctcatttgtcaagttcaatagtgttaataattatgatcttatgggaatctaatgtagaaattcaatatgattgttaaaaggcaggtatggttttcaattgcatattgatggactaaaattttctttttggctttactcaaaagctaattcatcagaggttctttttttccccctttttttgtttctttcttttttggtggggaatggttttctagaagttttttttccctaatttgcaaataagaatatattaaaagttttcttgttgtatttaggcttcttaaatagtgataaaattctcttgaccagaacagatcataataagcttttccaggttgaatgttgataaaattactaatagacctattaagttttgagattgtccaccctttctaggtcgaacatatgtttcattagtattacttaatctatcaccagttatcaattataagtaattgttttgcatactgaagaaaaatcaacaagagttgtacaaaaaggaagctaatgtggtcaaatgttcttttgaggacaggaaaaataaaattgaataacagtatttgaaaacctaaatgtaagtgatgaagtttagtgagactattagtaagcacaatatatatgtagttgagctcgggaatttgaatgagttttaagcaactacattatacatcttgaaaacagttacaattaataactgaatcatgtcaaaggggaaggttttgatgttttgataccttaacatctatttgatttacttattttcttactctcttttttgtagtaagattatttactttgcttgctctcttcctataacgttaggttcttaataagcatttatgttttgtgttcgagtaattaacacctagaacctatcatgggattttggtgcttgaaagttaggttaggtatactgttagcaatggtctgtggtttatctttgaaagtatctttatgaggcaaaaattttctttatttctgtatattgctttctggacctctatctggtggctgtggataagttagaatgggagtgtgattatcatatttaggagcttgactatggttatgctgatctcaatcttctagattgggaagtaagttagtggaatagtcgcttaatgaagctaggatagcagagtttttccagatagaaggtttggtggtttagcaggatggatgtaattttggtgaagtctttgttttgagctgttacaggaacactatttgagaattttcctgtgcaggtagtttgggtgggagagtcttccttctaaggtggctttttttttgtttttcctttttattgggtcatatcatcagagagttttgatggtgcatctcagttctaaaaaaatggctttgctcaacagttttattacacgtaatgctagctctaaattgtacttttgctgttttttttttaaaagaacttttttgtagttctatttttgtttggggatcttgcttcactctttaaggcattttatggatttgtactgtcatcaaagatttattgaaagtgcacaaacaagttacctctagcacatgatcctcagaacaaatgttggtctatatgatggagtgaaattgagggttttttataacacttgctcattccatactgtggtcatactggttaaaggagttttttgggattttgattaagatattcttctggatgggggaggaatgaggagaggacccacgccttttagatttgagaacatgtggctgaaaagtgagggctttaaagaggtaatgagacagtggtgggaggggattcaagtgaatggatcggctagtttcatattgactgaaaaactgaaggccttaaaaccgctgttaagaagttggaataaagaggtgtttggacagattgatttagagaaacagaaagcatggaacttaatagagtactgggacaaggaagaaatggttcgttctctgtcaatagaagaagaagaagttaggaaggaggcaagggagttatataagaagtgggctctattggaagaagtatcatggaggcaaaagtccagggaaatttggctaaaagagggggacagaaacaccaagttttttcataaaatggcaaatgctcatagaaggaggaagcaactgaatagaataaaggtgaatgagaggtgttttactgaggagagtgaaatcaaagaggaggttggcagaaatttccaagaactgttgacagacccgggtgattggaagcctagtattgaagggctaaactttgagaggctggaagagagggaggtagagaggctggagcaaccattttcagaggaggaggtctttgaagcgctgaaaggctgttgcggtgagaaagcactagggtcagacggcttctcaatggccttttggcagtttgcttgggattttgtgaaggtggaggtcttgaatttgttcagacagtttcatgagacggggagatttgtcagaagcatgaatgcaaccttcttagttttgattcccaagaaagggggggctgaggacttgaaggactttaggccaataagtttggtgggagggctttacaaatggttagctaaggtgttggctaacaggttaaaaggagtgttagctaaagtgatatctttatctcaaaatgcttttgtggaggggcggcagattatggacgcagttctgatcgctaatgaggcaatagattccatcctgaaaaataatagaggggcaataatgtgcaaattagatatagagaaagcttatgaccatgtggattggaaatttttgatagcggtaatggggaaaatgggatttggaggtaggtggtgtaattggataaagtggtgcttatccactgtcagattttcagttctagtgaatggcaatccaacgggttttttccagagctcgaggggcataaggcaaggagaccccctctcgccttatttattcgtaatagtgatggaggctttcagttgtttgatgaaaagagcagttgatggtggttttttgacgccttgtttggttcggggaagaaggggcgaaggggtccagattactcatttgttgtttgctgatgacacgttggtcttttgtgaagctaaagaggatcagttgacacacctatgttggctgctaatgtggtttgaggctttatcagggttaaaagtgaatatggaaaagagtgaattgattccagttggtagagttgaaaatgtgggagagttagctgatgaatttggttataaggtgggaaacttaccatccacctacctaggaatgcctttaggtgctccttttaaatctagtggtgtttgggatggaatagaggaaagattcaaaaggagattggctatgtggaagcgacagtacatttcaaaaggaggaaggattaccttaattcggagtactttgtccaacttgccaatctatttcatgtccatcttccaaattccaagggcggttaggataagactggaaaagatacaaagagattttctgtggggaggaggcgctcttgagcagaaacctcacttagtaaggtggtcgattgtgtgtgatgataaaggtaaaggagggttggggtaaagagtcttggtttgttcaataaggctctcctgggaaagtgggcatggcgttttgctaacgagaaaacggccttatggaatcaggtgattagaaggaagtatggggaggagaaaggaggatggagatcttgtgagattagggaggcttatggggttggtttgtggaaagctataaataaggtgggacaatttgtaacccctttttttggctatgaggtgggggatggtaagaatgtgaggttttggaaagataagtggtgtggtaccagccctttaagcgaggctttcccttctttattttccatagcaacgtcaaaagaggcatgggtaaatgaagtgtggacagccgaggggaataggaggggaagttggactcctactttcaataggccgtttaatgattgggaattggaagaagtgggaaggttacttaggtgtttggaaggaaagatggtgagggtggatgaggaggacagggtgagatgggtggaatcaaaggatggggttttttcggtaaagtccttgtatagggcaatgcagccggtgtcgtcagcttggtttccttcaaagattatttggatgtcttatgctcaacccaagataagcttctttgcgtgggaggcatcgtggggtagagtcctaactttggaccatctgcaaaagaggggttgggctttggcaaataggtgctttctttgccaaaagtgtggggagtcagttgaccacctccttcttcattgtgaaagaacaagggaggtgtggaccttgctcctctctttttttggagtctcttgggtttttccgcgttcggttaaggaaactctaataggttggagaggttccattatgggtaagaagaggaaggtgacgtggcttttgggaccgttatgcttgttttgggtcatttggaagactagaaattcaattgcttttgaggacggggtgctatctatacaaaagctgaaaatttcctttgtgtatttgctatggtcggaaaccaaagtgtggataaaagatggtccttcgaccttattagattttatagattgggtgtgcatgtattaaggaagagggttttttgtgctttcatagaggggtgggttcttttgtaagggggtgagtcgttttttctatactgtaactatttgagtcgcttctttagcgtctctttatcaatacatatattacttactgataaaaaaaaaaaagattaagatattcttgaatattggatctcttttgtttttatgactcgttttgaagaccaatcagaaacagaaaacattgtgaattatagtcaggacataggagggatttgagtcatacaaaagatgatgaaaaggaaaaataatataataacaataggttcaggtatattcttctttgattggtggaatcatgccgtctggcaccaaacgattagaagacctttgtttttatagacaacaagagcatgcattaataagcgccaaaaaagaagggggtgtgcccaacgtatgcaggttgtatacacagaaacaagccaaacacacctcaaccaaagacaattaaaagacttttaatccttattagattaacttgtgtcataaatatgtaaattcaagttttgaaagttacatattttagggtaaatatttatttattattattattattattttataattttcttttcttggttcatggtgtcaatcttggaacatcctcatagaactctaagcccttggcacttggccaagtgtgccacatttgagagatacaaaagaatttcctcaattaattaaaggaagaaaaagctcacatgactgctctttttcaattttggaattttatctgtttttcagattttttttgtgatgaaataattatttggtcatttatacagtttgtcaattcttagaaagttacatgactgtttgatttgatagcctattatcttacaaaacttatatatcgttgtaatgttctaattgagaactatatgaatttttttttaagccataaagatatcttcttgagttaattttgcatggaaaaattggttaaagtcttgctcatgttaatgtaatctgactattatttaagtcaaacatcttatcaattcttaagctttcaatttacataccaatgaaaatttctcatactttttagatcaaaatttttttccatgttttgctgagtgtctacttgtttgcagtcctttcactgctggtagatatcatagtcttgtga

SEQ ID NO: 11112 - DNA, 1908 bp, Vitis vinifera
  Intron number 9 from transcript GSVIVT01018715001 (locus G SVIVG01018715001) derived from phytozome v7.0 (chr-ID chr1 6; pos 10710521 to 10712428 reverse strand)
ctgcaaaggaggtaaactcattttggcaaagcagttatctgtgtagttatttgagcagtatgattctatttgaatgttttgttgatgccatatttcagatacttgtttttctgctccatttctggaaaaattattttcttgaaattgacttcaaagcacaaagtttgacatatttttgctgcattgcaataattctgtaaaaatgaaacaatgaagcacgcaatgatttttccagaaatgcagcagaaaagcagaagtatatttctgctcttttggaatttacttcaaagcacaaagtttcatatatttttgctacatcgccctgaacaattctgtaaaaagtgaaatgatgaaacatgtgttatgtgtgtgtgtgtgttacctattatttgatctactttgaaatattctatccgttgatttttcctattccttgtccatccagtcatttaagtagaatacttagtgtgtgtctgtgttacctattatttgatctactttgagaatattctatcctttgatctttcctattccttgtccatctagtcatttaaatagaatatttaggaaacaaggacaataccatcttaagatttcaagtgcgtgccatcatctgaaaggacaatcttgttaaaaaaatttccttgccttgtaggcaattttttatggaaatatgtttgaggcttcagcacctttgtttttcattttgttttgaggtttctgtgtcagttgcctccaagagattcttctttgtttagtagattttttctattaattctcttttgaggatgattactcctactggtgacatataggttaaatagaattagatagcttgtatcaatcaattagttccatcctctaaatttaaaatggctataaatatagcttcataagcaaatatgggactgccatactgccctgcaccttatgagctattctgaggtttcctcaactgttatactcaaacaatgtcatcagcaataaaaaattgaaatcaccatctaatgagcatgatttagtaccctatgtataagataccttgatttgaacatttcttcccttggattttcattgagttatataaaaaagtttgaacagttggtaaatgtttttttttttttttgataagtaaaacatattgtattaaaacaaaggcgaaagctacaaagcatacaggaggtatacaaagcaactagcacctctcaaaacaaaagagaaaaccaacagagcctcaccaccccttaattggaagctaaccacttcaagaaccttataagggatagacgtgtctctccaatatacaatctagcccagctccataaattacaaacaaaagaattcttaagattttgaatatctaacactccctccctaaaagctaatctattcctctccttccaaaccgttcaaaaaatacacaacggtatggatttccaaatctttttccttttcttccccacaaaagcgcccttccaactagttaagacttcctttacagtttctggaaagacccaccgtacacctgataacccaaggacaatattcgacaagactctgaccactatatagtgtataagaatatgatttacagtttcttcttcacacccacacagaaagcaacaattagggagctgccatcctcttttctgaagcctatcaagagtaagcaccctcccccatgtagcctcccaagcaaagaacgcaaccttggttagaactttatccacccaaatacaacttgacggaaaaacaatgtcattgggattgaccaacaagctgtacgcttctttgaccctaaactatccgcttcttcctcccttccaaaaaactgagtcttcctccaaagagggcctgtaacccctcagaacatagagcaagtcccctatcatatctaaggaaaatagt

SEQ ID NO: 11113 - DNA, 6374 bp, Vitis vinifera
  Intron number 3 from transcript GSVIVT01006267001 (locus G SVIVG01006267001) derived from phytozome v7.0 (chr-ID chrU n; pos 24340727 to 24347100)
ttctgcaaaaatttgcctcaagattattggaaaaggcatgcaagttacttgggcatttgattttactcaatattctatatactctaccaaaatgcttctttttttcctttaattttttaataacatgttgcatttgaagatctattttgacactgtgttacatcaaaccatcagtcgtagttattttgttttacatgctgattaatgaggtatagatatggaagttgaatctggggaaaaaaaaaaagtgaactctttgctgctggaaaaaaggtcttggggccttatgacctttgtttgcatggaagtgcaagggggaacaatattcaacaaaaatagttttttaattttagaatttcataattttagttggaggtattatttatgatttattatttatttatttatttatttttttactataattggttttagtagtttaccttttaatcaagtttctatgtgtttgaatttctaatttgattaggaaaaggagtcatattcctaccaaggaatagccttataaggaaaaggatttccatgagtctacataaacctatgtagtctttcaatttcaatagggtacattcatcaaatcccattatgaatggtttagagtcctgtacattgttggagttcattggtagtccaaactttagatagctagtgcagctctactggtgtttcgggtggcaagtttaatgctcctcttttgtgtgcctcttgtgtaccccttgtgtgcatagagtacaccccatttttgttaggcgcttttctatcatagtttgtgttggccaataaaaatagtttaataaatagaatttattaagaatttagtagcaatgtagtttcttaaaggtgtgattgccaagaatttattttttctttcttttctttcacctaagtgtgattgtgttttcctaggaaccttggtgtgattgccaatgattcatcttttattttctttcctttccttttcttttgccttctttgatctctcatctcattattcaatcaagtgctagtgctggaaatctaaaaatcctccatcaaagtgcatatgatttcgtcctttaagagagttctggctcaggtgagtttgggtctaatacagaaatattatagacattaagagatgtttgagaaatgaaaacaagcatcatgagttttagctaaagtttggaaacagataaagactcttggaaacataaaattctcctatgacatgtcttcagtaaggattagtactttagccatgcatattaatgttaacaatcaagactgtcccaccatttgatatgtccttcttagtacaataagtattcaattgaccatcttactggtttacctaaagattcatttctaatgaaaaagaaaaagagaatgatgtctgataaaaaaaagaaggaatgatggttaaaaacctgagtatttttaggtttttaaccatcatcatcaaaaaaaaaaaaaaacctgagtatgctttgaaaattaattaggcaatgagattgttaacattaagaagcttgagttagtgaggctaggtccttgtttttaatgctatcatgaaagggactagaggcaaagctaactttacacaagatgaggcttaaagcaaaaacattctgtaaggccttgtttattcaatatattaatataaatacaactagttgaccacctatgttgtagaagtttatattcaccattcattcttaatctttttttctccttttttatttgaaacaaattattcatttaaggagggatcaataatcttcaaagacaaattgcaatgaaaacaacctaagaggtaggaacaaaaccaagccacctaccaagggcctttcgaaaatagatattggaaccatccccaactaaatgatgaatatgctatggaagattaaggaagcctaggaagtagctttcctcgagctacagtattgccacttaactacaatgttgctgccccttccttcaaactataagctgtagatacttttaataaccttgtatcataaaaagtcacactctctagaaaactgccataaccactacctaaaaaggttttatttctcggataattttcctaaatgatttccaccctatcatatgatctctcatcccttcaacaaactcatccttaaaaaaaattctcattggatcctaccaatgataaaggtgacttccactagaatgttgaacattgataaatagtttgtagattatgaggcaagcaaaatttaaacaagtgtaattaattcttctcatttttgagatgcaaaatttttcctaaataataactaatacatgagattgggtgtcaaattttatgaatttcaattttggaatctcagtgctaactattgtggttatggtaaatgtaatttgtaatttaggcattgcttataaagtggtcatggaggtttacggttgaatagcataccttgtggaggagggtcattatgagcaagtgtggggaagaaggctaggtcttaagggaggggtgagggattgaactttgggagaccatcaaaagagttgacaagatttccaactagatgctagtatcctagggatggtctctaaataatgttttttggaggtggggctttggagaaaaagatgcatttagtgaaatggttgattgtttgtaggaagagaagaaagggggtttctttgcttaataaggctatctagagaaaatggtgttggtttcctgtatgccttgggttgtcctccgggcttcctttttctaatctatattttctcttctgtgtttacccatcaaaaaaaagaaatggtgttggagcttagggttgggcttacttggcgagaagtcaagttgagttttcaagttgtatttttgtatattctttttattctttttgtgtaaatctgcttgtaaagtagaggtttgcatgggtgttttgatcaggtttgtatttcatggggaggatttcttatccttcttatgttttattatctttaattaatacaaattttgtttccaatcaaaaaaaaaaaaaaaaaaaaaggtgtaggagatatgctttgaaagtaaaagcctgggatgaagggtgttagagttcttgcaaggtaagggaagggtatcagattagagtattacaaaacatcaaaaagggatgggccctagttagcaatggagcatcctttgaggtgggaaatgagaggagggtgaagttttagaagaataggtggtgagaggacataccgttatgtacgtctttccccttcttatacgccttagcatcataaaaaaaggctaggtgctgaatgtttaggatgatttgtgtaaagggggggttggcactggaatctttgtttttataggagctagatgacatagagacatttttctcaaggttggaaggagggtccatgaaaatgggagagaaggatagagtgttatggatggactataagaatgggttcttctctatcaaatctttatattttgttttggagctggggcatgtaattcctttcttggtgacccttatttggaattcacgggtccaatctaaggtgagttcttttgcgtgggaggctagttggattaagatgttgactttggatcagcttcaaaagagaggctggtcgttagccaatagatatcttctttgcaaaagcgaagaggaatctatgtgcaggtaagggcattatggtagcttcatttccctttgttcgtcattgcttaggcccttccttctatggtgaaggagacttttttaagttgacatgactcttttatgaaaacaaagcgcaaaatggtttggagagtcattcctctatgcactttttgaacaatttggaaggaaataaataaataagtggtcgaaagtgaggaatagtcgattacttatcaaaaaaaaaaaaaaaagtaaggaatagtcgattcatcactaaactgctctttccttagaaatctagtgttataggttagcatgtacatagaagaaggcttaatacctctgatcaattttgtagattggatgggatctaacttaggtggtgtttgttttttggctaaatagaaaaaccaacatatttggatttttctattcaactaaaagtaacttgttgatatcaaccaacataattaaagtgaacttgttatcaataggctcagtttagttatgttgattaacatcaacatgttacttgtagttgaatagaaaaatccaaatattttgaccttttctatttagccaaaaaacaaacgccacattactaagggagcaatttttttgtattctctttatttcttgcaaagccatttgggaacgatcatatatgcctcgtgtaccttggtgtatagtttatatatatatatataatgttgtttcttctagacattcttgggtagtcaacttttaattgaaagaaaaaatatgcatgattagaatttgaatttctcaatttgatgtagcttgcctaatgacactatttatatgctctttgcgttccaagcacttttaatatagttgcttatttgactatcaaatttttttttctcaatttgatgtaggcattccttctatatatctaagtggtggtagtaagagaatgtaggctaaagagagggtatccctaacatgttattctagaggctttcctatagttgtagaattttgaatccagttctttagcttgggattgagcttgtgagctccttgcttgtttgttactgaagaggtgtccattagtctctttcaaaggttaggtttttttcacttaggagatagtgtgggagagaatccttatgccatgaaatggtagtggtccttcgcttgttggtgtgcctttgcaaccattgtagtgagatactgaatcacatccttattcattatgagttggtttatagtctgttgtccttgttctcttttttcagtgtctcattggtgcttcattattggtagaggacttgcttttgggttagcatggacactttcttggaaggagccaaaaagagatttggtaggttgttcctttaatctcagagacactggggcaccataggattgagaagtgcagtttgtttgagggtaatgaggacctggataggaagagtggatacaattaaacagaagggatccaacagagggttgttattggtgaaatctttttattggccactgatgaagttcagatgtcggtttgctcccctggaaggagctgtggcacattgtggcccatctaaaggttgggttcttgttgggacagtggttcaggtgagcattcctattattgaccaattagggcaagggggtaacttcattccttatcactgttgtatgtctaaggggctggatgattagttgatcataacctagtatgtcgagtctgatgttgcttgattgttgtagttccccattctaaaccttttcttgtggtgggtgatttcaaggtcattcaaagaattacttgcaggataacactagagggcaaaacaaatttatttttcttattcatttttttcttttgagtaactttttcgcaaggatgggggagtatgacattagtggaccttggacatgatttaagtcatggtagatttcttctcttttgttcttttgctgccattttttgggggggtttcccatatatgctgcatgtactagattgataattcttgtccttgcattatacttttcaatctccttcaatggtttctgacttaaaaatatctttgttttgttgcttctgtttcctcatgtgacttcctgaacgtaaataagtatgctttctttgatcagataaaatgattcaaactctggaattatgtgctttaaaaacagaagttgcaatcacctaatttttactaggaattgggaaaatcatctctcaactcataaagggagatccaatcatatgattggttagaaggccatgtccctacattgaagttctttgccatctccatcatcagtttcattataattgtttttgtcatcattgttatactttctccttattataattaaaaagaaggaaaataaaggggaaaacataattactatgctgtttagtattcagagttacttgccttcagtgggatattctatgaataaagttttggaactctacttgaatctgaattgtgcctttttttaatcctaggtgttattgttcatctattagatccatttgttttagtgtgcaatatcttgcatatttgtctttttttttttcttaatatatttgttagtgattctctttttgtccatctgttttctcaatgataactcattatgttaggataaatttggtaaaaattttctggtcccaattcaatattatttttatcttgtttttatatgttgactataacgtattgtaggtcattggtattt

SEQ ID NO: 11114 - DNA, 2838 bp, Vitis vinifera
  Intron number 3 from transcript GSVIVT01008677001 (locus G SVIVG01008677001) derived from phytozome v7.0 (chr-ID chr1 8; pos 1151836 to 1154673 reverse strand)
gaaagaagtatataatcattttatcatacaatattttgaatgtattgagtattgttgatctgggactgaagcaaattgaaagcaactctctgtaaattaatccttgtgatggagaatggtaccccattagtttaattactcccttgacattattaccacattgatgacaatgtgctttatatttattcagaagttccgcttaaatttatcactaaaaatctccaagaccaaccagtagaatgtttgtggattcacaaagtaaactagtatgcccttttacagaataatcacatagatcaccttggattttcaagctacatgtgtatagagttgtttgagtttctaagagggatttctagttggaaaataagttttttattagttaatattaacattccacttgtttaataaaaaaaatattatttatatcaaaattctggcctatcaaaactaagttaaagtttggaggaaatgagggatttatgggagagaagttccattcttatggatattgggatttttggtccccttgaaagattaggtcctcctctgcatgaagcagagcccctaaagtttccagagaagtggagttacaggaaatacattctgaggtaggaagtttattgtaggcaaaaatcaggagtgaagtgggtgaagggtgggcattgcaactccaagcttttatgttggttgcaaaaggtaggatgaagaaaaagatgaaaaaaattaactcaagaagagatagaacagcatttataaactaggatcgtatttctgaggacattttgacgtcttttagttgcctctgttagctgccattgggaacttcagggtctggactggtctcccatctccaatgttagtgttaggtggttggaacctacatttttggaggaggaaatcaaagaggctaacatttaaatgagaaaaatctgcagacctggatgacttatttttttgcttttaggggccttggtgaattccatcggttgatggtcctctgagtattttgttgaaaaagaatgtcttgattttttacgataagaatctaggacctcacctcttttaggccattagtttctaaagaaaatctagatgctcttgttgatgtgattatgttggattagaataggaggagggatggagttttgcacagaccggaaatgtcttctttttggttgtcttaagtttagttacgatggttctccattgggaaatccaggacagatagggaccagtgttgctttttgttgagatcttaaccatgaaagctggaaggggccaagccattgagatttaagaatttcatgacttgacattattctttcttgggtgtctgaagggagcttcttagaaatgggatagttagttacccaaattgcaagggattgggttgcatttttggttggattcctagatcagccaaccaagtagctgaatagttagggcaagtaaggtgtctcaacaattgtggcatttgctggggatttcatgcctcccagagatgtactacttttagacttagatgttatgttttaatggtctttggttcttgctgttttttctgttatatatgtactcttctagtggctattaacttgaagactagctcaaccttgtatttccaattcacttttaattatttgattgcttccaaaaaaaatattaaccatccatttttcagatttcaactaactaatatatgttcaaacatagagaaagtgtctgaagtcttaacaccttaggaatcctagattctaatatctaccttctaaaatacttatgtgctcaccccctagattcaacatgtataacattaagaaagaggaagtgaaataatagtcaaacttctacaaaattacatccataaaacatacatagttacaaatctacaaaactacatccataaaacatgcatagttacaaatctacaaaactacatccataaaacatacatagttacaaatataaatagcaatcaagttcagggcattctcatatgcattttccttcaacttcaacatattttagtttgacctaaatgccttactatggttctctaaatttttaatgtttcattggataatgcatatcctacataaccttagtttgtttgacagatatgaagctaaagctttgagttatcccaggtcgcaaatcatcgttgttggtcaaccaagcgttatcacaactttggggtaccatagcctctctaatgcatatgttagaaatgtatgaatactgttgctgagggacacttaaaaccttactaacaagaataattagtgtctgctagtaggtactagcatgtttgattgttttagcatttttgaaagaattttgttagactcgcattcttagctcaagaacctatttatttcttcgatatagtagatagtataaatcttcaaaatataacttaaaatttgttgaattatctgtttatagtgatggttccaccagttggttaaaatgtgcccgagtattctagcaggttggacccccatgcatgaatcctcaatactgattatttcattgatcaatgcatgcacttcttagtgtctatttggtatattttgaagcctgggtgcaaaagccaaaagagaagtgtgagggtcaagtttgaaagctaccaagcaatgaaaaaggcaatgcaatcctcactgtttaggatgacatataaatatttctagtaaactgtcatgatattttagcagttctggtacttaaacattgtttttataacccattaagtatcatcccaggtggatgcattaattggatttattgatctcctttacagtggtgggagaaaagtgactggacgggatacaaaga

SEQ ID NO: 11115 - DNA, 8314 bp, Vitis vinifera
  Intron number 4 from transcript GSVIVT01014543001 (locus G SVIVG01014543001) derived from phytozome v7.0 (chr-ID chr1 9; pos 4995567 to 5003880)
gtctgtcaatactattcagtggtcaccgacccgttagtgctcttaatcaagaatttgttgaaatttttgtttgctctttaatttcttatcaattccatttacttctttggttagttgtcttaattccccatacatttgtggtgaaaacctttttattgttgtttttgtggagtcatcaggggaaccaatccgtcatttagcatggttgatttcttctgattttatgatagctcttagattctatggtcctaattaatggttttaagcatttgaaatagaaatcttttcatgcaatccaaggtcggatttagataaccaaagatgagtctttaaaaagggaaaaatgatagagatcacagaatttaggttcattgagcaactcccttcatatgcactggatgctttcttgtatacttttaaaagaactctcctaccagggtttaaaggatctcttctttcggactcttttttagtggactagggattctttgagctggatttcccctctatgttgattttcctagatactcttttttgtggttaactttgctttgttttgtttatgtggtctttctttatttgaggtgtgtttggcttgtttctatgtatacaacctgtatacgtaaggtgcgccccctccttttttggcacttattaatgcatgttcttgttttctatcagaaaaaaaataaataatctcagtcatatgcttgtgaaagcccaatcatagaaatatttgattggagagttatttctcttaatttcagttgagtggtgataatggctgtccgtccttttgtggtttgacttagtcatattaagcatctaatgtgatattcaatacctatattttctttgaagatttgatatggatgcctcatttgctttaataaatgtttggaagtcttgctagctttcctttaatattttaatattacacaactgtggacaggattggagttcatggaatcaaatttctagaactttatcaatgtcactggattttaaattctttttgcaatgatagaccttttgtgacatgaaaagggggaacatttagtatttgtagttgagatcgatggagagcagcaagttgacatgcaaaactggaccatttaggtatgagggcaatttgcacatgatagtagaatttatggctaaaaaagaatggttggagttttcttcacattttaaggacttttcaagggaagaaagtaagagatcttacatcataaaagaaagaggagatgaagatgagaaagaatcaaatagtggggttgcaaactatttggtttaaggagggagacaaaagtaccaagttgttcatcaaatggctgatggaggaggagaataaacttattaagagtcaattggtttgtgtggggaaaatgaagggtgtttgtagagtgattcaggaaaaagggtttttaaaaatgagaaaagagggatgggagtgattgtctgatttccccaccctaggtttcttggtaactttaaatgtggccagattgtaaaaggataccaaaatatgctgccttgcagggaggtaccctgtaactcctgcttacattctcattcaagttggagaataggctaatatggatgatgagcccagaatttcaggataatgatctttgttccctcttttcgtcaaaatatgagtagtccattattctgttttcctacaagtatgaataagctggttgccaacttcttagaagtgctgatctacctcaatttgtttattcctatgacttatggacgtggacacaagatgttcaacaggcaaacccaaaaagttaatatatggagacacataactgtggctacatgcataaatggccacacagacaagtacacataaatgcatgtactggccgaatgcttaatggatgatgatggtttccttgatacctataagtagcccctttgagttgattgttgaacacataagcaatttgcaatatgtaggcatcattgtagcataaccaatgggtgagcaccaccagtaatatacatttaatgtcatctaactaggcaattctccacaagcatgctatttggtgtcttctatcgttgaccatgcttgctatctccatacctcttcttgtgccatagtgttatagtatacatgcaaagatgcgtaccattaggtacatgccttggttctttgaatgtgcatagagtgtgaatgcctacttatagcagatgcccagggggttcccctatttcttctttgggtgaaggtgatgttgtatgcacctaagaggatgattctttagcccttgatgccaagaaaacagttaatatctctccaaaatatctatataattttctgttataccctttcgaagttgtcatctttggcacagtgcctaaatgctgatacatttgccctagttggaagcaaggctctgtgtgggctagggttccaatacgggcattgcacatcttgctaatgagtttgaccctcccattattaagggagtgtttgataactacaataagtactgaaaatctaaaaaattattgggtgtcattaactaattgtatttgataacaaaaattacaaaccatgtaaaattaaaaactatttggaagctacttaatactttagtaagagagacttgactaaccgcttaaaacaaaacatgacaaatgatttctaaaattttacaactttttaattccaactttacctcttgttttaaaacaaaattgtttactgtttaaaaattttactaaaagagatttttttttattaaaatttaattaatttttaattgacatttttaatgttaaatcctttctatgataaaattttactactagagaaattcttttactttatgatttaccataattaatttgtcaataataagagttttgaaaagtttttcttgttcctagagtaaagataaaaaatgctaagtatgattttgaaaatcttaaatacaatttatttgtattttttttatgcatgtgtatgtgtgataatttatttacacaatcccatgtcttatggttcttgaatttagtaggtcaagtaagaattttttttccctctatgtaatatctttctctagaaattattttcattaaattttcttgttaaaaatatttggtttttataacatattctttattatgaaacaagttgcataaatcagggcttattttttataaatattttataagaaagttcaagggtgtaattaaactacgcttaaataatccttgtacccaaaaaaggtgcattttttttaatattttattatctaagtttggtcgttttctataatatagaggaacaaactgttttgttttatagatgcaataaatacagtttgtttaaattttgagaatttgataaaaaagaacaaagaaaaattatgggtcatatattataagatcatgcagtattaacttacgtgattgtttaatatgtaaggatgactaatgtagatgatactaaatctattaggaatgatccatatgtcttgacgcgagtgtgatggtaaatttgtaaaattgattatgttcaaattttaatcattttatttgtcaaaaaaaaaaaatctgcacttaagctttttagttaataccaaacatttttcacttttatggatttagtgcttaattttcaactttatcaaacatcatcttagtacttcaggattttttttgagctctctggggatggattgacatgcatcaaggtcatttcaaccaaaatgaggagaggggactaccaatgtttgtaagacatatatcttcaccagaagctgctgcatcatcatatggtactcaatgagttacctttttagagcaatatgaaactctccatttcctacaagaaaacctattctcctagattcttctatattttcaagattctctccaagcttaagaacaccacttgtcatctggaacttcaccatctctaatgtcctcctccgtttcattctaccatgtattccactcaactttaaacgcctcactgtccaatgtggctaatctttctaacaaagaatcttgcagaaataaacctttttaaccaagttccttttcgatataattttatttactgctacagaagttagaaatggggggtctctagatatgcttcttgattaagatggttcttagcttccaactaatggtttatgagaattttttctgttataaagcgagcccttgttgaatttaatttatgctttgtgccaacttccttagtggttgatgctggatgtttggtgtatccctttgtcaccatctttgcctgtatttttcaaattgaaacgttgaccttgtccttcatttgcacttacaatcatgcttgattatttgcaaccgtttgggaaaatttattaatttatgtcatcttttgaaggtcccattccttttttctttttttcttcctttttggtttgtcatttttagcacttaaaaagaagagcattgtgtgctgcaagacaaaaactcatacacgattcaagttcattggagaattacaaagaacaataaaaagaagtgaaggcataagaaaaaagaaagttatacaacaacctataatctatgtaaacaatttgaactctgtaagtttatcaacattagaatctgacaaagcccttgaccaagagccttaaaaaaaaaatctaataatgatgtcttttaccaatacatcaattttaccaatactggttgacggttaacaaagatgagtgggtgtcaaatgctttggaggggagtggagtgtcgggttgttggaatccacttctcaaggcattttaatgattgggaattggaagaggtggagggcttgttccgaaaatagcatcctttggtagtgagaagagaattggaggatgtattgagttgaaaggaaagtagggatgacattttctctgttagatccctctacccctccttcatgagggcctatagtgacccttttccttggggtcttacttggaggtcttgggctcccatgagggtgagcttttttgcttgggaagcatcttggaacagaatttcaaccattgaccagctcaaaaagaggggatggaatatgccgaataggtgctacttggaatatttccgaccttttaatattgttttgtaaaaaggctgcaatactttggagtttgattttctccctttttggtgtgcagtgggttttgcattcttctattaaaaggaatttgtttggttggcatggtgcctttgtgggtaagaggagggagaaggcttggagggctacccctttatgcttaatgtggaccttatggaaggaaagaaatgaaagagcatacaatgatatcgaacggttgaaccaagctttaaaacactcctttttgtatactcttgttaattgggatagggtgtttatagaggatcatattttgtttatgattgactttatagaatggccatatgtctagttaggggaaaggttttttgtcttctttgcctagttttttttggcattctaattgtatacttcatgtgtaccgttttcgccgcttctaattcaagctcaaattacctataaaaataaaaaataaaaaaataaaataaaataaaataaaaaaatttctattctacttttcccaattggaccaaaaagcggaggggtaagtctccactacctctttcaactcctctcaacaagggttccatgttgacccagcaaaaggtctctaaccaatcaaggagtgatcccaaatagagaaaacaacaatgactacaaattacaggccatcgcatagagagtgataatatgattagcagactcatcttaccactttcaaaggcaagaccaaccaactagagtccacccttgcttcatgagcttgatttaggagtcactagatgacctaaaagctccttagcaaggaaagaagtagacacatttaggctcaaaaagctattgaatgatttggcagtgaaattatcaatccttgctagcctccaactcaacttatcagaataatttgcccttattcaccagtttagtacaatgaagcaaaagcttgcaacatctccaattttccatgaaggaaatatttctaaaaataagggaatcaataccttgtttgcctaattgcttccaaaagatttgccatccaagcatttcttggagaagccaaatgaaacaggacctgaaatttgtctttcaatggacactccccaccatagttttaaaattctcaaggcacaccaaggcgtaaagtactcctagagcctgaggtgcaaggtgcacctaaggcgcgagctttagtgaagtgaggcgcaccctaatttacatatatatttttatataatataatcaaatttaataatgtcctaaacacttaaatcatcaatattatccaaaacttcaatttaatcaacaaaaaacataaaaataatgaactcaaagcataataacaaagcatcatgattgctaatacgtatccaaatccaaaatttccaaaccaaaacatgaaacttgtccacaattcaaaaacatcattaaaaaacacttgaataacaaatgtccacaacaatcaatcatcacttgtcctctaaatcaacaaaatcatcatcatcatttccatcatcacatttgtaacctttcccatcttcctcatctactaaatcaatcatttctccatcttcatcttcattttcatctattagtgaatgagaaggcaaagttctagagcttgaagctatccccctcggtggtggtattatgtttgagcttgctctagttctagtatcaagtctagcctcctcaactccagtagctctagcaacatcaccccatgtcaaattatcatcatcaaatacaaaatcatcttgtgcacctccataagaatccccatcttccattcttcctatcaaccattcattgctatcatctatatctttcaaggaaattgggtcaatggtgtcacattcattgtatcttttcttcaaggctcgattatacttaatgtataccaaatcattcaagcgttgatgatacctatttctcctcttgctatgaatctacaaaaatttataagcttataaatatattttaaagttataacttttaacttttaagttacattcaagactctattaaactattacttgtaattattttggtcacttacattttcaaagatgctccaattctgttcacaacccgatgcattacatgttaggtttactggacataaggtttaaatttcatctttgaaagtttgatgaagtatcatttcaattagatgttagagaccttcattcaaaatgaggtctttagctttgcataataccttaaaaaaggaatttgtggtaataatgaaaaaattaatgaatcaagattggtcttatattgatgataaatatgttttaaccatgttgagttttctaatattgatggtttgtatttatttttcaaataaataatataattgaaacactaaattatatataaaaagctgtgtttttcttaattgcatctattacttgtatagaatatcattaaatttcacaactaaaataacagagttttaaatgacacaacataagatcttgattaataattttatatgttaaaaagtaataccaataaattcaaaatggatcatgtttattatataaaaataattatatttttattacattaatgatattatttatattagtataattgtttaaaatgaccttatctaaagtttatgcataaggctccaaattttgttgagccacccctgcattggatgcacattagtatttcatcataattcaataaggcagcatataatactctttgacatgtcacttcaatttgtcattggtgttttctaacatgggccagaaattgaataatagaatggattagcctgcaattaaaaaaaaaattcaaataacatcctaatgtttgtaatgtaacaatttagttggattagattacaattttaaatgtagatcaattggtcagaacatggacatcaacccaaccacaagaggaactaaactgggtttcataataccgttcactgtctgattctctgggatgcaggtcatcctgccaactgtttaaagttgcatgcatatcccatttcaaatttattagtttgtttgagttgcgggctacccttttgactgtttaaagttgcatgttccatttcaacttcatcagcttgtttaaatttcaggttgtccttttgatcatttttgtttcatcataatgcattatttttatgatgtatattacttatcttgttgagatgttaattaaagttcctcaacagcccatcttcttgcttccgctgga

SEQ ID NO: 11116 - DNA, 651 bp, Vitis vinifera
  Intron number 8 from transcript GSVIVT01006978001 (locus G SVIVG01006978001) derived from phytozome v7.0 (chr-ID chrU n; pos 29549764 to 29550414)
gcagaaactggtaagcgatgcagtcttaaattttgtttgggtagatatgactctaatttgaccggattatttgtatttggttggcactgcataaaaccctaaatcctcaaaagcaaagtatagacatgaagactgagaggacatagcattggtacggaaatagcactagcacttgatacatccaaagtcccaaccatttgagatcagctgtgctgattttgtgtttattgtgagctatgtcttgagctaattaaacataagataacttttcttataacacgttagcatattggtccattggaaacatagaagcatactcagtctaaaagtgactaaaaccactggattatgactattataattgaaactgatctacatggcacttgagcagacatgttgggtgtgtaattgaaaccatactttgagttcaacttttggtttcaaagctagggatgggaattcaattgtcatacagatattaggacttagtggaatgcatgaaaaatctaaatggaagtgttctgtcatgtctataattctgaaatgaacttcctttgtgcagaataatgtcagaccatgcatgaaacttcaagtggaactgttcttgcatatttttaaaatcctgaaatgaacttctttttgtgcagaatc

SEQ ID NO: 11117 - DNA, 1052 bp, Vitis vinifera
  Intron number 10 from transcript GSVIVT01019613001 (locus GSVIVG01019613001) derived from phytozome v7.0 (chr-ID chr 2; pos 1952159 to 1953210)
tgctttgttgctttcaagcgaggacaacgaccacggtaaattccacgttcaaatatgtagattgagttgtttacacaggtttcctcataaacatcaatcatttgaagggtcttgagttttaaaattttatgcaagcctatatttgaagccacccccttgcatgatttctgcatgcataattgaatcaaatttgtttaagcaatgtgctacattgtcctctccaatctccacttctgcagaatgtatatgggattactaagttctgtcattagttgaaccacagtagcatattgggtatattgagccataaggtctaaagtattcattgtgcaaacccctgcatcaagtgaaaagccgcaacctggagtaatgccattccttgtctattgaatggcatctatagattcctcactcgatgtggggaatagtggcctattggttgagatggaaataaaccaaacgtcttattgatattctgcaagtcatatgagttatgcacagacctgcaccttcacgtgatgggaaactcatgcatacagcatgaggatgtggatgatcacatttcaccagtgaaaagtctaaaaatgtatgaaggtggtcagaattaaaaagtccatatgcattatacaaacacgtgcaaaatgaaaatgatttgatgctcacatacgtgaaatgagcaaaatgaccagtagtcaaaagaaacagttctttcttcccccctccccccctccttccctttgagcaggtttagatatatgcatgtaaatagtccctttggtattcagaggatctcatattggaatgagctggatggcatgtctggttctgggtaaatcagtttattgaaataaaatagttaaaacagtcttaatggtagatcatcttcatgagatgatacttcatcaacaagtactttgatgctagtgagaatatttgcccacatttttataaatctgattcttaatatctttctttttctcccattcaattgttaaacatcataggtcatgaatttatctgttttatttggcacagggaaccttggccacttg

SEQ ID NO: 11118 - DNA, 7602 bp, Vitis vinifera
  Intron number 21 from transcript GSVIVT01023507001 (locus GSVIVG01023507001) derived from phytozome v7.0 (chr-ID chr 14; pos 10718536 to 10726137 reverse strand)
tttgtactcaccttgttgcatttgtgagtcacatatccacatctattttcaaaatgcatgaaagatactgcagtttgtatgtatatgttgatactgttgagaccatatttgtgttctttcaacacagctattcgaagttggatatactgttgcttttctttccatatttcttttgtgctacttattgttgaggtataaattgagaaacttttggaagattacttttacactgctggtcccaagcccaaagaaaggaggttgctctaggctgacaactggttacattgttgaatataaattgaacagtattgggttgtgttgcatcatattgattgtataggattcacttttcttccatgtaatggagagccatgtggtgcaatattagatgctccatggacaatgatttggttatgaggcattcgacatagtgaatgttgataggcaaatagtagcatgaggcaaggcattataatatgtgagttaatagtgacagatgacaaggtggagaatcacatttggctcaaaaataagtttgcaaaggaaatttaaaaataataggaattgaggtagaacttacttaacactctgcatggtattttgatctaatgccctgcatatctggaatacttcaagtagaccacacaataaagtacatatgttataggtttttccatatatgttgcctttgatatgcccacatatcaagctcacgtggtgacattagcctaagtatttgtgtactttgttaactagatgccattcataaatatgtttgggagctcaatgaaatgtaaggatgtcaaacatgggtcacctcacccaacagggcaggtttgggatgggacaagttctttgattgtttgtttgaaaagaaaaatgaagataaaatcaagaaaaatatgtaatgaataacttagttatttaaaaaaatttgaaaaggtgaaaatttcacatttaagtgaaaatctaaacctaataatccaaatttttgaacaaatctaatctcaaatacagaaacaacacaaacttctttctacaaacttattctaaaaaaattctgacaaagctaatattagaaataaatttaatacaattaagtaactaaaacagcctcatggagatattggtgaagaacttcaaaaaaatagaaaatatatatatatatatatatatatatatatatatatataaatcatagatggaagatattgaaaacccaaaattatgggaaggaaaatatggttgaaggtggtgaagatgatgacataaacatggaggtggctgggaaaagctataaacttcaccattgttgctttggaaacgagagaaggatgaaatgggttattgaataaatgagggtgaggcttgttggccatatacatacgatggaatttttattgtttttaacagatctaagggcagtatataaaatagcatcatatctacaggtggtggggcaaaacaatcacatgctttaccctgcactgaacctgagctgcattataggaattttccccaaacccaacctgtccccatttgtgtcataccctaatctgcccaaatagcagtagggctgatgcttacccgaaaaacccacctcattgccatccttaaccatatggccatattatctcattactctttgatgctccatgactctgagcatatatattaaccaagattacattgcaaataggaatgtttacctttagttgagtcctttattattgtgagtttattatcatcattggtggtggcagtggtggtgatgagttgtagccatttaagatccatcttcatactatattatgtacatgtactatgtaaacttgatgccacttataaatatattgagacttctacttaatatgtcacaccctgggtttcagacttaacaattgatactcaaatacaacataagtgctttcaaagatttgggaacacaaaaatttaaatgctaagttcctgcttgatgcaaaaagagaatgtggaaacctgttataaagaggtttacatcatgtattaaactttgtaaatattagttaacaaaatataatttgtttaacaaaatgaacttgtactttattactttaaatataccaaaaccccatggttcactacgggtaacccatactacaagtgtacatgacaaatatacattacatcattccttcaaaaagatttagtctttgtatgatacaaaggcaaagcctcaaaacactttcaatgcgagcaaacaacatccaatcaacagaaaagcaatgctcaagcattatttccagcatagtttttctgagttgtatctaaaagtggaagtgatagggtgagttcacaactcagtaggaaagtttataaccatcctaagcatacccttaaaaaccttgaaattaaacgtataatagcatgcatgataaacattttataaccatgaacaaatatgcaataatgtcaaacatgtatgcatgtatttgttggtttcatctctacttttcctcatccatcctttcataattgataaactggtaacccctaccaatgtacacatcagatatcaatgctccacaagatacttggtcaatataataatgactattctaggactatcacccaagggtaagtcataccccgtgtcttctaggactcataccaaaaggcaggaccaaccccgtgtcttgagggactaaaacctaggggcagaaccaaccccatacacccacattgaagtgtcttcctcgagggctttaaggactttcacccaaggacccacggtcccacataaacaatatatcaaaggatagtgcctgtagcttcacacaaacacttcccacatatcaatcaattctctggatatcatctgtcattattccatatccttcttgtaatgcaaccacaccatgaactatttcctcaacattgaaccatgacttctcataccaatatatattccaatatcattgtaacatttcatacaataaatcaagatgcaatgacacattaaaacattttatgaaatcatataaatgacatgaaatttcaataaatgtttcaaggaaagaaaccaagatacaccatggaatggcataaaattcccttacaccgacttcccctttgtgattcttctatgaaggcgatctttacctattacaaggaattgaaataaaacaacataatttaggtttcctaaccatgaaaatttatacaattaaaacttatgacattttcctttctttctaatttttaattctcatattctctaatctacatgcccataggttttcaaatcaaatttgaattgaattaaacaatttttacaatgcatattaatattccctagttaattaccaaacattaattgttttgattttcctaaagcctaacccattaacaagtcccaagtgtccaaataacctaattaatcacatactttactaatctatttttcaatcaaaccaaactaaacaaagatgtatgctgatctttccatcaataaaatacttaagttaatacactttaaaccttaattaattttgatttataattaaaacatgtttataactaattacactcaactttatcattaattgtttcaaaatatcattaggaacccaaatataccaaaattactaaattaatcaacttcctgacctcaaatcttcactttctctctctagattctctctctaacccagacttctgtagagacaagcctccaaaatgaggctgcagacccttataaagggtccccaagcagccaagcaagtggtggcaagccacaaggctgccatcaatctcaactttccaaaattgttgtttagtccttcaagttatccaatattaaacctatagctgcccattagtcctttaggttttcataactctaatcagcccctaagaacctaagcttaagtcattaactaatcccgttttaccttaatcaaggtttaattcataattaaatcagattaacactaaactagttttaacatctaattaaacacatttaaagttaagtactaagataatcattattgcctatttaattcatcagtactaggtattacataatagttatacaatttggtgctctaggactcagcatattttcgtctttattatttattatttatatcatttaaacaaaacaattcaattcattgaatgtataagaatatacaaaggagaatgagttatccttcccaaaaatataaaatctaactaaaaagaagaaagaattattgaaaagaaagcagatatgaagtgctagaagcaaaaattgcaaaagatcttccattataaaaactccaaaaccaaaatgaagaaaaagagctcatggaaggaaaagaatcccatacaaaagactgtaactgagaggcagaggcttcacgctcaattagaaaatatcctatctaatcagctgagtgaagattccaaaaaaaaggacacccaacatttctagaaacattaatgatttgatgcagccaactcatatacatccgaggaccaggattagcattttgatgcccaagatatgaaaaagcagaatgcccctccattgtgagagtggacagtgcaatgatctaaccaaaagcgatccctccaaattggtttgaatctctacctcaatagctaatccaaaaccaacagtcttaggagatggctctcaacattctaccattatgttctctaatcacgcttcctattccaagctgacctagattagccaaagaacaaccatcaaagtttagtttgagagcaactggtgagaaaggtttccattaagcttgcacctcatgcacactcctcctggatgaatatacgagactccaattttgcaatctcaagctcaaagagttcctgtgggtgaagttcaaaagcacgatgaaaaaagcacaccctctccaaaaggcttccacaggcctatctattgaacaaagatggggagcctcccatgtactttttcatgtgcccctccaatactctaagaagaggctctgattttgacatttgtcaatttacatataacttattctgatatgtacaaaaaattagttggtcaattaggaatctctcaacaagctattgttaaaagattggcaagaacactttacaaatggatctgttccataaaagggggggacttttagaagaatcattttgggaatactgttttgagagaagagattatatatcacaaatctgagatcgtttagcactatcctcaagccaaaagaagataaaggctagagataatatagaaatcgccctctgagacttaaatggaaacccaaataattacttgtaacctgatttccattgccctccttcaatgtgttccattcagttttcatgctgtcccctgaagtcaagtatcctcatccatccatcttgccacctcatcattgaagggctgcatcatcacaacatcctagatcaccattttgatagtgcacgttaacattgagagtctcttctgtcccaccaaagtgcagtgaattgaaagactgccaatgcaagtatgacatacatttcgaatgcccatggacatggaatcagtggctggaataatggggccatcttttttttttttttgattggaaacgacacagagatatattgatagataaaaagaagtacaaaaagaaggatgagaaatcctcctgccaaagaaaactaaactacggaaattacactataaaacaagcgaactctctaaaaagaaccattccttatggagtacacaccgctaaccaattaagttgtaacacattaaggggagtccccttaaaaaccttggaacagaaagcccaaagagaagcaaggaaaacaatagagtcccaaagatactctcaattccttgctttgtcctaaaaaatcctcgcgtttctttcccaccacacaactcgaattagagcgatgctcgcaacttgccacaaaactattcccctcttagaagaaccaaaaccattaaatttgatggacatcatgtcatagatgctcctcggggggacctaatccatcttagctaactgaaataacctgtcacaacccaatcgtcaaggaacaatgaagaaaaagatgatctgttgattccctatgcttcatgcacagaatacaaatatcaggactaagggctttgtagggtcttctcacttgtagcatgtcattagtattcaccttcttgtgtgccactaaccagacaaaggacttcactttgaaaggaacttgagtattccaaacgaacttagaagagaaaacctaaggagatccagaacattgagataatggtagaaagaaggatttgactgaaaaaagccttgaagaagataatggccaaaatttggcatctggaaccgaaggagatagatgcaatccatcaagtgaccgcatgaggccttctaagtcctctatctcaaaatctgacaggttacggcggaaattaaaattccaagagaaaggatgagtaggaccgagaactgaagaaataggaatgtttttatccaagactactctaaatagtcttggatattgggttcccaaaggttggtcccgccaccacaaatcttcccagaatcgaattctttccccatttcctaccacaaaccgagtaaacaaggaaaactcctgaaagacttgtgcaatagccttccaaggacagtgatgtgaccatctaaagtgttagcatcccaaccattagagtgtgaaccataaatgcttaatatgacctgatgccatagagttgaaccctctctagggtacctccacagccatttccctaaaagggcgagattcctcagagaaatattcccaaaacccaaaccccctattgccttcggtttacacacaacatcccatctcactaaatgatctcttttgccttccccaatccctgaccataaaaaatctctttgcaacctctcgatttttgcagccactgaagcgggtaacttaaataaggaaaggaagtaacagggcatatgggtaaggcaagattggataagagttatccttcccccgaaggataagtaagtcttttgccacccatctaatcttcttgagattctctcaatcactggatcccaaagccacacgccttgggtttccctcccaaaggaagacccagatagagtataggccaaccagaagctttgcaatcaagcatctcagccaatcttgaaagatgaacctgatcaagattgatgccataaatattactcttgtcaaggttgaccttgagcccagaaatgtgcccaaacactagcaaaagactcttgagagtctgcagatctttagtagtctgttatcagatttggtctcacacttcattttcttatggcactgttgtagtgttgtggcataggtatgcaagatcatttgtttcaagatcgcttcaatggtgtgacaatatcaaatattggaacacttgtttaatatcatgggatgttgtgcattgttcctccttttgtacactgaatgtaaacttggatggttctgagcttgatatgttgctcatcaatcatcacatgctgttaaatttgcttattttagctatagacaagaaatttcatggaaacggttttacctctctgttatgcaggactc

SEQ ID NO: 11119 - DNA, 3796 bp, Vitis vinifera
  Intron number 3 from transcript GSVIVT01025279001 (locus G SVIVG01025279001) derived from phytozome v7.0 (chr-ID chr6 ; pos 2501491 to 2505286 reverse strand)
cagcttacagctttgattactttggatttctgcttgtcctcttgggcttgaagatatattcttaatgaacatagaatttattgcaacaaatcttgcaaactacgtctctctttgtcatgatctcagttcatgcggtaactgatcaggtgaagttgacatggttaggggaagaaaagagaatgggttttggttcttttttttttttgtttatgtgaggaagtttcataaggaggaataccccaattgcaataatacaatgaaatgtacaagttgtaaaattaatagaaagaagtttaatttatgttgtactatgatatcaaccttcacctccaatattgagttatttatgacatccattattcatttggttacttacactttaaattttttaaataattggtcatttaatatatggtattgaagctaattttatggtcttaaaagttttgacttctatttattctattttataactttttaaaaaaaagattagtctaatttaaaggtatactaaagctttataaaataatactcttaacatgaagagaaattattatcttaatgggattattgattcattaataaataaataatttattaatttattgataaattaatatctattaatttataaagaatattatgtttctattgtaatgtaaagtacgtaaaaagttgtaaaccataaaaggatgtagtaaaatgttaatatataaacgtttaataaacaagaaggattataaattgtaaaacataaaaaaaaattggaaaggaagagttgtgatattaaaacttaaatatgtgattttaacaatgttattaatttaatacattaatatgagttgagagcaaaaatttgattatttaaaaaaggtttttaatttatcaaggttttattgtacaacttactaattagtgttaactttcaatgaggataaagaaaaggaaaataatttaaaaaaatgattttctcatattaggtttatggtggaaaatatatataagaaaataaaattgagtaaaattaattataaatttttatataaattaatttcttaggaccactactaaattcataatttcaaattttccttcacattccctttacattgcttggaaaccaatcatactcttaggtggtgtttttttttttttttttttacttaattttaaatagaactttaatatttaatagtgttaagtattaggttgtttatttttatagtattttatttctattaagcattaaaaagtaaagaaaaaccaatatgttactttttctatttataaaaagtcaaaattttggttttttctatttaataaaatgtttataataaatcatgaaaaaaaaatctaaattctaaaaacaaattatttttagtaaaaagacaaaaaaacaaacactctcttaatctttttcaaggaaataatacttttaccaattcttcatagcaatcccaaattcccaatttcaattttcaactaaatgattgaaacctaataaaatgattaatattttaaagtccaatagcataacctataatccaagattaatgtcaattttgactaaccctcttgattccataaaaaatgcttaaattttgggtccaaattcatgacccatgaaccaaacaaaagatagattataaacatttttggaaattataaagtcccctccctttttttttttaaaaaaaaaattagtttgaaataacttaccccatttaataaaagaaaaaaaagaaaaaagaaaaaagaaaacatatttagtaataaaaaaaaatagtaaatagtttttttaaaaaaaaaaaaacataaaatgattttttgttcttaaaaacaaaaaacaattttatgttcttaaaaacagaaaaaaaaaaaaatagtgtttatggataacattctttagttgttttcactttattaaatactatatgtaaaagtaatttttaaaattaaaacatatttaaaaatataaaaatatatgttaaaaatagaaataattggttaaaaggggtgaaattctccacatatttgtaatttgtgaaattatccattcccatgtttttttataaaaaaaaataatcaattttttatataagtgtccttaattatttcaagtatttattatatgtttaaaagaaatagttatttttacaataaaataataagaacatttttgtcaaaatgagatgaaaaaaaaatgaatgattagatttccaagaatcgggtttctaatgatccttttaatcaaataacctataaaagatatttcaattatgaaacaaatatttattctacaaaatattaatcaataaatttcaaaaaaagaaaaaaatggtcttatttttgaaaataattaccatgaactttatttcaaaatatgaaattgttattttaagatgtggttttatttttttatttttaaattaaaatataagttatatgataaaaaaaattattttgaaaatttgttttaagagttatatgaaagttaaaatatcaattcaattataatataaaatgatcattctttctagattttataaatgttcgaggcaaaattaataatatagtttgtttgttcttaattcacatcacaagaagagacttggaagatattttttcatgaaatttttttctcaaatagataaataaattataaagaaaacaaaaaaaggaaataggggaaagagtgttggctaacggctcaatgtttaaaaagcataaaaaatggagggaaacatttcccgccagttttctcactcaacaatccccacgctctctctcctctcttttcccaccacagcaaaccctagattctcctctacaactctcactctacatccatggctgcaaggattgaaatatcggtacttcgattttacggatatatcggaaatatcggtggatattttttcacaaatatcgatgagtgaaaattatttaaaattaataggaatgcttgaaaaaacttcaaaaaatgataaaataagtaaaaatacacatttttaagttatcttgtaaatgtaattgacatatatatataattaagaagaaaaatatcgtaaacaaagatatattggtaaattcgataattgaatttaaaaaataatatatatgaattttgaaagtgtataaagttagaattgagttaaaaaatatttgattttattgaataaaaacaatttatacaaaaatataatacatatgagattgcaatagtccttatattaaggaagagatcgatatggtttcattataatgttagatgaagaggaccaacttgttgaagataatatttatttaaaatttttttaaatacttttattaaaacatgttttattatattttaaatgaaaattaaattaatttatataaaatattttatttgagatttaatttttaaaattttattaaaaatatatagtaacgactttttttttattaatattaatttatttaataatcaaaataaaattcaataacttataattatttatatggatagaggaaaattgttctcatgatttttttttttttttttttttttttttacctctactaaatctaaaaattaaaagggccacccacttctgaagttgccctccagcccaaaaaattacccttttctgaagttgccctccggccgaaagaattcctaaaaaagacctattttcctctgccactctcaatcctcgcaggtactaatctaatcacgttgatattattttttttgcaacccccgtttgattcccaagaaaatccatcccccattcgatttccggggaaattc

SEQ ID NO: 11120 - DNA, 1428 bp, Vitis vinifera
  Intron number 4 from transcript GSVIVT01000762001 (locus G SVIVG01000762001) derived from phytozome v7.0 (chr-ID chr7 ; pos 501057 to 502484 reverse strand)
gggagccagaagttactgaaggtgacactttattatcataaaattcttctaaggtgtgccagaaaccattttgccgatattgtaaaatgttttttatgcatattgatatttgatagtgctacagttagttcctttataactggttgatgttatctggttcaggatatcaatagaattttttattttttatttttatttgcacgctgccatcccttgaaaccataatctggggaaagttgcatatgcaccaaaccactgagcgatgaagaaggctggcatcaattgacatttttttagtttgcatgctgcccttggttgaacctgtgagctggggaaagttgcatatgcaccttacctatcaggctatgaagagggctggcatcaattgaaaagtttttagtctgaaaaaaaaactatggatcaaggaatcatttcctcattttttggataacaatattgcttaaaaaatcacatggaccgcaatccacttacacttggttatctagagctcattgttgggttctaagcatagagagtttacctattgcagacttgaaatggcctacatatattcttacaattatccaagtctctagtccctacaaataacaccttaaatacttaaatctttgaatccataaacctatggagaaatcccctcaattcatcgtcgttcattgcttgggaattatggaaggagcataacaggatgacatttgaaggcattggactaatggaatggaagcttgagaaaagggttttgtgttcttttgtcgtctggaagactgcctactctgactctagaatttccttctgggacattgctatgttgttttttctttatgtatattgttcccttttcctttatgggcactatggtagttccctgttttgtcagtttctgcaaaatcctttttgttcattaaaaaaattgttcaggaaatgatcgttcatccagttagatttttgtcctaatcctgcaataatgatagagcagttcagtagaaaagcatccccttctaggaatttggccagcaatttgatccctttgtgagagttcaaaattgaaaatcttaaatgagattcatgcaattttttatgacctgattccatttaaatatactgctttggtagtgaagttgttgaattacttcctagttttgtgaatttatcccaatattttcaatagacaaacaaaatctaaatttattctccaggtttcaatgtatccatatttctttaagagttttgtatggtgcttgaaccattttcagtaagtagtgaatgacagcacctgtctaattattagattgagtatagctaggcaccttatgcagcctgttattcatagcttggtgagcatacattggaaatatttacttatttattttatccttgcagatcgaaagatagttccatttcaaaatt

SEQ ID NO: 11121 - DNA, 5334 bp, Vitis vinifera
  Intron number 6 from transcript GSVIVT01007980001 (locus G SVIVG01007980001) derived from phytozome v7.0 (chr-ID chr1 7; pos 7000499 to 7005832)
ctgtgttggaaaagactgagccgttgctgattcaggtatgaaaactgaccaaattttgttgacatgtatttgatatcttaacatgaacccatatattctagcatgctgttgcttttttattttatcctctatatggaaacaatatggctgtcaaagaccaattactcatgcagcatgagtagagaactgttgtaaaagcagaagcagcaaagagaaatgataattgaaaaaagtgggatataaatgagagtttaactttttagattttttttggataggcaaataagaatatacatacatgcatatatatatatatataaaattaaaagtgcctatgaaaaaaattaaaagccccaatcaaaaagaggcatacacaatacatgtgaagtacacatgtgagaagacaaaaataaacaaccaacaatcacaaccctaatctaatactttgaacataactacgtaataaaatctatatacatgtgagaacacaaaaataaacaaccaacaaccacaaccctaatctaatactttgaacataactacgtaatgaaatctataaaggatggtggaccagctttgaaccttatcttgaagataccagtgtcatcacatgtatagattagatataaaggagtcctttagagatttgtttatgtattgcactcttaaaggttctttggttgtgttccttccaaattgtctagaaaaggcaaacaagacatgtttttcaagcccttcttctcttttgctcacaaagctcccattctaaccaattaacaagtttttcactgaatgaggaagaagccatgaaatgctaaataaagaaagtaaaaagtgccacaaccctctagttttccccataatagacaaagaaatggtctattgattattttgcatttttacacatacaacttgtggtacatggatgcattaatttcagctaaaatacccatgtcgatatgatatgacacgacggcaagtgtgagatccatattggatatgcttgtattgcattggatatgactacttagcctattactgttttttgtgttttttaattctttcttattttttttaattatatatgataatggtataaaataaatttaaaaaaaaaatgaagaaattttgaattaatttctaactcttgttactgaagaagttctttatctatttctttaattttttttttaaattatagtagataaaatttaaagataaaataataattaatagcataaaaaatctaaagataaatatcaaatttaatatcttaaaaaatgtagagataagttataatagttaatatgaaaagttaaaatttttgcatgagttataatttctcaacatctagtaatttgatgatttttatcacaaaattaagataaattttcaaagttttaaactaatctaggtttactaataatgtggtatcatattttcttaaagatttttctgaacatcctattaaaattaaaaacttatactaaataggttcatgtatgatttgttgtaatatcaaagtaaataatgcttagcatcttattaaaatatcaaagatgtaataaacatattttccaagtttctaaccataattaaaaatatagtattataggtaaattatacttatcttactgtgcttgtagttcgtgttaatttattttcattgatgttgtatctaagtaattgcacctatagttgagatccattttcgtttgaatccccatgtcttaagatttaatgatgcaaggatccaacatctagacacatattcacactcgacacccatactcaaacccatgtagtatagcatacaacaataacctgccaaataccatcctctttttttaagttggtccatggttaggatccctccccaaataccatgccacgtgaaaaaaactactttggtaggagcctaagagccccatactatctttgaggggatagacactttaggcagggtagaaagacttcatcgagaattctctacttttgttagacttccatgctattctatcctcatgcttcttcttaacatgaataacttttgaagaagtttctcaacattatccatctcctaatcttggaaatgtcttatgaagcacgggttccacatgaccagcctgccttctaactcccatgcatcatccacccattcttcttggaagccacaaagaagaataaagatagaaaagaaccctttaaaggaacatcaccaccccacacatcttgccaaaatttgattcttcttttattgcctacctctaatcttgttttggtctaataaacccctatttgtttcttatcaagttccataaaccaacaccattactttcccttcttacctgagggttgggagcaccatccttttggcttttctccaaactttcctactatgacctttctccataacctatccctctccacaatgaatctctaacaccattttccttgtaatgttttattgaggatggacaatgccttgatgcctagaaccccctttctttttatctttgtagattgatgaccatttcactagatggggttttactcaagagcccctcctcctcatcggaaatccctttgaattttctcaagtctcagagtcaccaatttgagaatagcaaaaaatgacatgaaataaatttgtagggtgctaagattacattttaataaggcaagtctccctctgcttgagagatactttcttttccatagggctagtcttttagagaatccctcctctactgtgttccgagcaacttaatccttgaagggacacctaggggtaacttgaagtaagtgacaggtggttttcccactccataaccctacactgacgctagctcatccacattagggaccttccctatcataattagttcacttctgttcaagttaacttttagttttgaagaagccttaaaccatagtaaaatctaagccatatagattaatgaattgaacaaggttcacaaaaaagaagtcaattgtcagctaacagaaggtgaggaatctcaactcgtccagttcctcttcctaccctgaaaccctaaataaagtcaccctcccctgccctagtcaagggaatgctaagagcctttatcacccctaacaaaaagatgaggggataagggttccccttatctcaaagcccttatactttaatagaagcttgtaggaacaccatttaacaaaactgaaaatcttgttgttgaaatgcaaaattgaatccaatcaatctatttctgcctaaagctcatatttcacatcgcttccaagaggaagttccaatttacatggtcataggcttttttagtgtctaacttacatacaagtccccttatgtgactccttaatcttgaattaatcgcttcattagcaattaggaatgggatttgtcttttttccaaaaacacattctaaggctttgatactacttccccaatcactttcttcaatctattaaccaaaactttagttaaaattttgtatagacttaccacaaagctaatgggtctaaacacttttaaatctttagccccacctttttttggaatcaaaaccacaaaaatagtatttagacttttctcaaaggtacatcttgcaaaaaaaatctctgaatacatccaaaatctcctcctatacaaaatccccacaatgttgccaaaatgtcaatgaaaagccatttggtctaagggctttgtccctgttaagatctataagagcatcatgaatctttttctcagtgaacacctcttccaacctacaagagttctcattactcaactttttgaaaggcatgccatatatgttcagtctccacttccccattgaatttgacaattgaaggtgaaattaattcacaaccttttcttgaatctcaacgtcctccatcacccactctccatttacccaaaatctccctgttaaatttcttctatgttgaacattagtcattttgtgaaaaactttgtatttttgtccctttcctttagtcacacctcccttgatttttgcctccaagagttccctctaagatgacctaataattaaactcttctaatagcaaccttctagtttccctatcttccaaggaaagaggtccttccttcgccttgctttcccaaaagttgatctgatccaacgcccaagccttgtggggtgctgtgttccccaagactcctttattccaagctttaaaatcctcctttcatgctttcaactttgaccctaagacgaagccacaagatccactgaactggtcactttcccaccaaggcatcatatctttgaatccctccaccttgagccacaagttttcaaatataccccatctccacccattaaagtagggaaatgatcaaacgctggccttggcaacaggatttgcattgtatttgtaaagtgatcctccaaatcactcttgattaggaaaaaggggattcttttcattgattgcctattcagtcctctatgcaatgtgaaagagcccctctatcaaggggagatcaaccagagaaagctcttctataaacttggagaattttctcatggttggagaaattctgacgtgaattttttttcctccaagaattagaccatattgaaatcccctctattacaccatggatcttcccatagctctctgatggcccccaactcctaaaaagcttcgagttctctccaatccacagagctgtaaatccctgaaaacacccaagtaaagttttccacacaagtcacaagatctgaaatgacaagagactgggtaagaaccaacctccatcccaaaagaccaccacccctccaacaattcttgactaagaccattgacatagcttccacctttgtttcttgcaggcacacccaagtaacatcttagtattttaactaaaagatgtcaaaaatatcctttatactacactaatgagacaatcttaatcttaccaatatatcattataaaccagtttctttttattctgacataacccctatccatatgcagcttaacaaaaccttttgtttatgcaagaaagttgtccaatcatttatctgaatgatgaaaatgtctaatgtcctgtacttgtttcttatccaaataagcatatcatgcaccctcttttctagagctgagatttttgttatttctggtgaacatctaaccattttttgttgttatatttttattgttgtttattattattatcatttcaagtcagtattattgaaaagatttcttttgtttcttttgtatccactattgttttgactgttgctgaaatttcacttcagatatattcattgggaagcaacagctgcagacaatt

SEQ ID NO: 11122 - DNA, 4140 bp, Vitis vinifera
  Intron number 4 from transcript GSVIVT01036486001 (locus G SVIVG01036486001) derived from phytozome v7.0 (chr-ID chr1 4; pos 22605198 to 22609337)
aggtacacctttctcttattttctcatctctaaaagtaatctcagttttttttttcttgattcttttttatctgctatattcattgcttaatttatcgtcattggttacaagtttgaatgcaagttccatgaagaaagatctacttcccctcatagttttaaaacgtgcgcttaaagcgcgccttggcctgacttgcaaccattccctagttataacacattgcttgccaaggcatgtgtcttgttgaagaggcatgcctcatctactttacttttcctttttaaacatttttattcttcaaatttctaattgtaattgaaatttatataatttcattactttttttttttaattgaaatcctcttttaaatatttggaatcttaaattttttattaatggaattagatttcggatcatattttataaaatcaatatgtatcctaggtcaagtttcacttcactcaggcgtgtgccttgtcttgcgcttgagctataggagcctttcaccttaggtgccccttgctccttttaaaactgtgcttcctcccgcctctctctctctctccttccctccctccctccctccctccctctctctctctccacacacacatataggaggagatgtaaactgattatgagtctatgaacatggagtctcatcctcatggtatggagtagtaagcttttgtttcaacttccaacttcaatattggtattgattgatttaatgcatatgaatgctactttgacatgtttttgttttatttttcgttgtacatgcaatagactctacctctttgttattgtgttggaactgctgttgtcactatagattagctccggtattcactcttttttgtgcagcttttaaggcaaagctattgctcttggaagtacctgaagctttaggacatacgttaggatgtaacctatccaagcatttactggtcagctagttggatgtcatgcccaatctaaactgtgcttgagagccaagtggaactcaatcttgctaattcttgttctataatatgatatatttgctgacctcttctcctcagtcatatacaatggcagagaaggggcaaactggatgattagttaggcagtttcattcccattcttctttcttatcataccatggcttacaagtttgatgaagttacctgcattattatatctgacataaggttcacattaatcagtttgaattttttgtttattaatgaatttgatgcgtctggtgattttaatgaaatattttactgcatagctgatgtgagaactaacttgatgcctgaacttgcaacacttccacccgtggtggcggctcaatttagaagagatatgtgggtacttgatgattgacttctaacatgcaagtttcattcttttattaactgatatttgtattggacagtgaaaagaggttaaaggaaccaaataaagtagaggtattgagtctacttttgtgattgttggcttgttatgcaatcaaatgacttaaaggccacctcaagtgcattaaaagttcactagttcagtagtttggttatgtgacaattgacaattgaagttgcaggtcatgtttctcacattgaaagttctagtcttagtgtttgtttgtttgtttattttctttctttggttgaagcccaaaagctcctatgttcttttgattgttgagttggggtagtcaaattggtgcgaggaacccttatgggtgtgtttcccactttgtatgccttacctttggcttaagaggcctaggtagcatatgtatcgaaagcaaggggaagggggacactggaatctgtgttttgctagacacctaaacaagtgagatggaaattgtggaatcttttttcttaaggttgcaaggggaatttatgaaaaagggagagaaggatagggtggtgtagatgggttcaaggaatagttcattttccgtaaatctctttattctatgttggagtcaagggtgctcaatcctttcccacaaggcattatttggaatttataggaaccatctaaagtgagtttttttgcttaggaagcttattgggtaaaggcattggctttagatcaactttagaggagaggatggtctttggcaaatagatgttacctttgtaaaagcaaggtggaatcttgaacacatccttcttcattgcattaaagctagggggttatggcacttgttattttctttatttggagttgtttgggtctttcctttttcaattaaggagaccctcttaagttggcatggctccttcgtgcataagaaggtctaaagagcctccttgttgtgtattttttgaactttaaaaaaggaaagaaaccgaaaaacatctgaaaatgcatagcaaatgacttaatcattgaagagctcttttgttaaaagtttgttggcatgagttaggatgtacactatagaagaatcaatggctttagtcaattttgtagattagatgggatttagatgagggagggagcaaatttttgtattttctcttttcctgcctatgccttttattagccatgatatataatctatgtgccttggtgtatgactcttttttattgatatatatcttttcttttcttacttatcaaaaaaaaaaaaaaatcagttgggtgtagcttgaattgttgatacaggtggactacagtactagttaacttgtatgcttatttgtcattaggtggaaggataactcttatctaatcatgcctatcccatattccaagttatttatctccttattcaagatcccctctttagtggtcggaaaaactgagaaattgcaaaggaattttatttagttaggggctagggagagcaagagagaccatcttattagctgggatttagtgtgtaagtctaaggtggaagggggtctgggatttggtaagatatccttaaggaatctttctctattaggaaaatggttgtggatgtctcctagggaaagttatactctatggcatcaggttattctaagcatttatgatacacatactaatggatgggatgtcaacactatagtcaggtggtcacattgtttcccatggaaagctattgcaaggtctttgaggattttattaggtactctcagtttgtggtaggcgatgaggcgagaatccgttttttgggaagacttgtggtaggggatcagcctttaagttctcaatttctggtttattgagaattgtcacagttaaaaacttcttatctcatcaattcttgggccttcttatcttttttcttagaatttcaactttcgttgtaacctctctaattttaagatagaagatttagaaagattaatgtcctctcttacttgtttgcacttatctccatcaattccagatgtgagagcttggtccttatcttctttgggtttatttatagtaaagtctttctttgtagtcttgtcgaatcattatgacccaattcatttcctccctacttgttttgtttggaaatctcaagtccctcttaaggtcaagtcctttgctcgattaatggcactcaagaaggtaaacaccaatgacatgcatagttgagaaaatcctataaagccctcaattatgatgtttttatgttatgtatggaaagtggagaattggtagatcatctttttttacatttttcattgactttgtggttgtggcacatattattcatattggttaaggtggattggattcctcctaggagtatttgtgacatgatgaccattgcatataagggattgggaaactccagtagaggcgtggtactgtggcaaactgcttgtctggctttgatatgggttgtgtggtaggaaagaaattctaggatctttgaggataaggtgaggattttagaggttctttgggataccattcatttccttgcttccttttgggcctcttgcaccataaattttaagggcatttcccttaatgtggttcaacttgattggttatcggtgtgtacgtccaaaggtttgggatagcaaggagagattgttttgtgtactttccatatggtgtacaggtttacttagttttttgaaggttccttttgttttgttctttgttttttggaggatttctcatccttcttttgtacattttaaatcct

SEQ ID NO: 11123 - DNA, 16286 bp, Vitis vinifera
  Intron number 1 from transcript GSVIVT01036046001 (locus G SVIVG01036046001) derived from phytozome v7.0 (chr-ID chr6 ; pos 21488795 to 21505080 reverse strand)
tcgaccttccagctccccaaggctggaccaagaaggtttttttttcttttccttttccctttctgttctctgctttcgaattctgtgtttcagcttctcatgttgcttatatgccctatttcgctctgtacttttcgtttttggattctttctcggagtttgttccaagtttggaggttcttttttggtggaattttgtgcgagtaagagggtgtggtgttcgtttcctggcctttaattctcaatttcgagttcgaattgtaattttttagtttttgagctttcacttggctgtatttgttgtggtgtggtgtggtttggcttgtgctccccgagttcgtccacaggttgaagatttttccctttttttggtggaattgtgtgtgaacgagataatatccgtttatgttcttgtttttgcttgcccattttgagttggtcttttatttatttttatttttttaatctttttctttctcgaatgtctgtttgctcgttttgttttatgctcgttcttatgtggttagggtttttctccgagttgtttaaaggtttggagttctttttggagaattgtgcagcatatggtgttggttttctggtttttgctctgaaatatcgagttttgtactatttgaattttgtgtttttaagaaaataatttttttgagtttttaaaaatatttttttataacatttctggcgtggttagggtttttttctccaagccaagtgtggaattctacgtgaatgagagtataatttgtttgtgttccggttatacttatcaattttaagtaagaattgcagtttttgaattttggaatacttttttttttttttttttttttttttttttgagttttggttggtggtggttgttctgtgcttggtcctttgaggttagggattttctccaagtactttcacagtttgaagctctttttggggcattgtgcctagtaggagcatatcttatttatttattttttctggttcttcgtttttaattttgggatggaattataccttttgcttttctttaactttttaaaaatttttatggtgtaaattattacttattttgctatttggtgcatgagatgccaatttgcggttataatagttgttcagtctattgattgaaattgctttaggttgtttctttaataataagttgactttttttttttgaaagtttatggaatatggaatgttctagattatttggtttttatttatttaggacatggaatgcgtattttgttctagattatttggtgttcatttatttagggtatgaatcaagctgttatagtttgctggttttcattttcatttaggttccttaaacagataattcaatattgtattttacttcttttgaagtttgcatctctattgatttagtatgttctgcattctatattggcacatgcaagaaccattcccgtgctttcatcttttaaatggttttcaagttcaatgccttatacatactcagtttgaattttatgaggtctgtcattccttataagactagggttagagaagcaactgtttttacaaaagaagatgatcggaacttaattagtatagatttgataaaaaatttaatcatttctaatatcttctatttttggatgaagggtcacaataaagaatggattttatagtgattcatgacctagttcatcaattttaattaatgtaatatcatttatgtggagaatcttaattgttttgctaatagttttaggcagagtgaagtatcttcgttctgtttacagttgcttttgctatgttagcttttaagattatttattgatattacaagaaaattataatcctttataaattggaatctatttggtaacaatttatattcaagtttagacaattgtatcaagtagaggcctgaattaaaatgtggattgtttcattgtagtttcaattggaaattcaagtcttatcttatgatggacattgacaaaacatgagcaaaaattatttacttttgtgcactaacacggatttttaagtgaattgatattgatgaaaacttatgctaatatgaattcacacttcccttggagtttttaaggtttgtagagtgtagtttatccaaatatgatattacaagaaaagtagttaattagaatttttctatggaataaataatatttatatagaagtatagagtaaataatattttatatagaaggttgagaaaatatatagatatgtgtgataaaggccactaccccattacacatgatgaaacacctgacgacactatcttgaccgtatgtgtggtaataggtaagtttgaaggccatttccatcccctattggggcatatgccaaccatctctcctttctatgaagacgcttgatgacattgtcctaagaaaacctctactttgacttccacccaaattatcaatgaaaaaggtgtctttgatgctattttaagatgtatttgacctagtatgtatattggattacataacgttatatgatatttctattgagattggtgggtacctgaaaattgtgagaaggattgttgatcccataagtaatggttcaccattttatttgaaaatttattttgaattcgtatattttttattttaatagtagtttcaattcttagaatataatgaccaaatcaaggcttttgaagccatctattatttaattaaatttttgaaaggacagtgggtgaagagcttacaagtcaagtgatggaagttttacatcaaagcataactttttttgtacattttctttaggttaaatgaatcataattattataaacaagatttccaagcttagtagcaacttgaacctatgtctacatggtaaactaggtgccgctttgacaactaagctaggaggcatcacattcaagtcttttaccaattatagtaaaatccttgataaataagtgttcgttaaattaatatctcacttaaataataaaatcttctagtcctaattcgagcaagtgtcttaagttaataaccttgctaaatgcataagatataaatttttagaaatccttagggattgaaggaaatataaactaataagtgatgaagttcataaaaaaatagcaaacaaaatttcataatatagtattgagtagcttttcacaacttctatttttcgcaattcaactctttttcaaaaccatcacatatttgaaatctttttatcctctagggcattatattttgacaccaaatctcttcattttaagagtctttctatcttccataaataataatcatctcgtcttttttagaatgtcatgcttttatgtattaacttttgattacattcattgtttttgaatttataagatataatattctctctaaattaataaatattcatttatcgatggtttaataaattgttcatttattgataaatcaataacattggtgagataataatttctcgtggtcccaagagtattattttatagaggttttactatatgtattttaagaatatgaaccaatgtgtgcatatatttgataccttgattttctttggtgacaacatggacaaatattttcttctctctctctctctcttccatttgtggttcttttgtacgaccattgctgaattccaaatgtgattgcatatttcctctatggttgcgtaagaatgttgcaagactacagaaagatttttggcctgcatattgctgctgtccccctaccctcacaccctaacccaagaattttatacattttacaatctttgggctgagttttgaacctagttccatgggaaaaaactgtttactgcctttgacaaataagctaggagacattgaattcaaattttgattcaatgtgtacttaagggatggacagggctctcatagggaaccgaatgtttacatatttgatcccctaatttgctttgctgatgatgtgttcaaattcttggtcttgtttttcttctctttccatttctggctcttgaatgtgctcatcactaattttggttgttgatgtctttgcctagatagtatagttggttcaatatgttaccttgaatggcttatgtgatggcatattttctatggtagcatatatgatgtaccatagtcatgtactcttttcagcaattgaatagttttattaatgtttcatttttttctttggttgccacacaaatatgagcattttagttataattccatgtgatatacttttttctcatttatcctttttttttttcttttctcttttaagtcaatgcacttatgaaactgtgattgatgtatgtttgcattcagcaagtgcttggggactcatttattttcatttctttataatttctttgcaaatctgctttttttctaatgacattgagtgattggcaaaccatggaggcaatcctatgtggaatttattatgcattaaacatcaaacttaatattaagtgcaggaataattaattaatgatgaaaagataaatgtattttatggagggcacttccatttggcccccaatcacaccataactaggttcatgattcatgtaaagttttgcagagccccctaaaagctgaatgtcaacttatcatattattgatgatgattggtattatgatttcttacagtatttaatggataaggttttgtagtttatggatttatatgaattgtaattgttttatcatatttaattcctgtgtcttcaaaattcaaatgcctattcagtgtatcaaattggttaatttatggttatcctgaatctctctctctctctctctctctctctctctctctatatatatatatatatatatatatacatacatatatacgtgtatatcttttactcttcttttgacaaacacatgaggcagttggtatctggctttccaatctggccttcatgtctgttgtagtcttaatattttattattaggttttgtttttttgattggctggaaatcttgcatcaaaccacctgggtcaaagctgatctagcttcagttagggttcgaaatatcggtcgagactggtatgactcgattgagccatatttgcctcgtccaagcttgctatgaaaccaatatccgagttagactcggagatggtatggatcgatttggaaggagaagtagcctagaacttgagccttggacaatcaattgcaaatggttttattcccattcacccagttgtagagaaagaaaaaaaaaagggtttgaaagagaagaagaggatggggaggatgaagaaatgggtcttggataatgaggtaatgggtttactaaagaggatgtttgggtattgcaaatggttttattcccattcacccagttgcagagaaagaaaaaaaaagggtttgaaagagaagaagaggatgggaaggatgaagaaatgggacttgggcaatgaggtaatgggtttacccgatggatgtttgggtatttatgaaatgggtaatgaacatagtggtatttatacaatggataatgaatataatgagataaatataaatataaatataatttataagaatttaatgtaattacattttcaataaattactagtgtataaattaaattttattagataacatattactaaaaaaaaattaacaattacttgtatcaatattaaaatgtgatacataatttgaaattttttataattaatcaaatttaacgtgaagatattaaataaaagatctttaatattaaaaattgataaacaaattttatatttatttcaataatattaaatataattaaacttaaaattttataaaaagtatatttaattacatatatttgcgtatcgtccaataccaatctaagataccgagattgatgtgcctcatgactttctgagtcaatgatcgagactgcaactttgagtcatggcttcagtctcttcttttaggcttattaacactctcaatggtgagagtatggttctgcatctatttttgagatgtgactgttaaagctgagatcttccattgactatgacttctcatctgtagaaagtgatctctgtgctgaggtcatctataattgacatgaatgttgtagtagacttgatcttttaaattttatactttatttttatttttttatcttttattatttttgaaattttatagaattatcatatttgaattgttgatttggaatctgtctcttttccttttgcaattaccatcattaacattagttcttatactgggttctgcaatattaaccatggaatttactgaataatatctcttgtttaccttgctgccaaaaataccaacatgttagattacttgcttccatgtattaaattagtatggttatgtcttctggtttgtttgatccatccttgtcgacggaacattttcttatgagtcattctcttcatgtaagaaaaatacctccttcctaaataaattaggggttcaataagaaaaattaaggaaccaaaacaactaagacaaaccggttattagttgtcaaaaatgcattgctactatattctaaggttctgtacttctttgtaatggttgacatgatatagcaatttgtattgttggtccattctctttactttaagctttgctaaggcttcagacaaataaataaataaataaaatcgaactgctgaattttttgtccactcaagatttatttaaaataagataatgcctgaaattggaattcaagtgattggttttgcccttttgccttctccacttctactcccacttccctacatgtctgctgaatgtgttgtggcccttctcctctgatcctcttctttgggaatcatcaggagtgttagggttgtaaagtgcagaataatctttggatgtgctgcccaattctattacttgactttggatttgttgcttggggctctactccaagaaaagtcatttcgagggaggatcagcttttgccttctgagtgaagttcccctcttttgcttctattattatcatttgaagcatcaccacttagaagattaatcggttgtcctccatctggcagggcatctccaaccagttcccaaccttcatctatgagattcattatttcttcgccatcatattaaatgttgtgcctttttaatgttttcaaaggaatcaccacccaacatttgggttatcttcgggtttgcctgacttgattagttgttctctactatcatggagagtacgttttgtggggaaggaaataaatttggagaacagcttctttgtgtattttttggtgtttatggaaggaaaggaatcaaagagtatatgatgggtttgagctctctattttgaagctcaaagatatgtttcttgagttttggttcatgcagtctctggatgcatttcggaaaggatgaatatctttttttggttttgttgattggctggggttggagtggctggtccttgtaattgtttggttgcttgtttttatttttacttttttcacatttttacattctgttctgttcttcatgaccatgctgtcttggtggccctttgtattcttcccatggtgcttgagttacatatcttattatctatttaaaaagggcaatgccttcataagatatttgtctcttgtctactttttatcttgctactaaccaatttctcatcaaagtttcccacaatgtaagatgtttcaaaagccacttccttccctggagtatgctcccccaagtgattttcatctttattgtggtttacttttagaactagacagggatgtaaaaatggcagcctgaagtctcgctgagctgcctcatgtttctgtaattatggggaggtctcctcatccttctcatggaatttttatcaataattaatacatcttttgtttctaataataataataattaaaaaaagaaagaaaggtctgtctgagcctgaccaataagctgcctaaggcttgccctgggtttcaatctccagcatgaagcagccccaaccatccagactcacatgaaaatacccacaaacacattcacaggtcatgatgactattgtaaacatgttcttgcactatgtgtccctcattgcaatagccgtgtctcatgatttcttggtggtatcgaaattggattttttttccttccttttgtgttggattacaaatgaggatgcatcttgatctagtgtaacttgaatcagccaaacctggtaaatgtatgtttgatttccttcacattggggttttatctagtgctcatataataatatgatatatagcatataaaagatgcacttttcttagcaataaattctgctctcagaccctatgatgtagcataatggtccacttttttagcatcaagttgctattggtcaaaatcaattcttcctgaatttattgtataagaatcatacgcatatatgtacaaggttattaccgaattaggctgaaatcaggctgagatttaggttgaaatcaagctgagattctaccactttctaactataatacaactgtcctataaagaataatatttgactaatctaacagctaagtcctaggaatatacatggtaacaaaataacagtcaattatatctttgaaattaagtctgcagatttctaacgctccccctcaagttggttcaaagatgtcttgcatgcccaacttgcttgtcatagaattgaaacttggtgatgcaattcgtttaataaatcgatctaccaatcgaagtttagtatgtatgtaaggagtcagacaatcccaacctcaagagaataattaagtgcctatcaatttcgatgtgctttgttctatcatgtcgaataggtttgtgagcgatgctaatcatacctttgttatcacaaaataacttcatagattcttaaatctctacttgaagctccttttgtagagtattaatccacataagtttacaaattcttaaggccactgcacgaaactcaacctcaatacctccaagttaccaaattacctctaacaaaggtgtagtaaccggtaattgactttcacttagtcaatgacttggctagtccacatctgtatagacttcaacatgcaaatgattattctttgaaaataggagtcctttccctagcgtagcttttagatacctcaggatcctcatcacaacatccatgtgttcttcaaggggagcatgcatgaactggcccacaactccaacaaaatatgcaatgtttgactaagtatgagagataaatcggtcttcccactagcttttgatatctccccttatctacaagaacactaccttctttggttgctaacttttggtttgtatcagttggagcatctatgagttaacccgtttcattaagttgagtatatatttcttttgagagatgtagatccaattcttttaaaagaactgttcttttaaaatgacatggtccaaaacgacgttgttttgggcattgttcttttaaaatgacagggtccaaaacgacgtcgttttggtcattgtttttttaaaataacagggtccaaaacgacatcgttttggtcgctgttcttttaaaataatagggtcaaaacaacattgttttggccctttttaattttaaaaggaacaggctaaaacgtttggagcctgttcctttaaaaaaaaaaaaaatacaggccaaaacgatgccgttttggccctattttcttttccaacccccttttctggtatttttcaacccgacaccactcccaatcgtgccctagccttagtcgtgcagtggagaagtgaagaagaggaaaaatagggggggaaaaatagagaaaaaatagtcatgtacctttcgggacctcggtatttttctcttttcttcacttttctgcatttttttccattcttatctcataactctcattggcaattttttttaaaaaaatatataaatattgtattttgacatgaaaattttactaaataaaataaataaacaaaaaacactcatatgcatatttttcttaatgtgatgtgcattttttttttcaattttttttcttaatttaattataattattttattgtaatatagataatttgtttgcaagatggataatgagagtgaaactcaagtggactctagtgcaagtggaagaagagatcccagatggaaatatgctcgtttgattaatgaaaaagatttgaacaccatcatatgcatttttattgataaagtaaccaaatgaggcatatatagacaaacaacatcttgttggtggatatagtaatgctaaaaagtgtagaaaatgtctggaacatgttagagaagaaatggaagagtatatgagttccaagaaaaatcaaaaagagcaaatgaatatggggagcgacgatgttaatgaagatttgtttggtttggaagatggagattttggtgaggagattaatagtagaatgaatgtcaccaacatttttagtagaggtagtaaccgaggaagtggtagtaggatgttttcttcaaaaaaaccaagacaaaaaggtcctatggatcattttttcacttctaatgcagagatggttgttcaaaatcgaaggaatgggaagatgaatcaaactatcatcaatgatgcctacaaaaaggaagcaagagaaagagcttgtatgcttatcacaaggtggatgtatgaggctgttattccatttaatgcagtcacatatccaagtttccaaccaatgattgaggctattggccaatatggtgtgggtatgaagagaccaaattttcatgaggtaagagttactaaccttaagaaaaaattgactctcacaaaagatttgatgaaagatcatatggtggaatggggaaaaaattgatgttcaattatgttggatggatggactaataggaaagagagaactttggtgaactttttggttaattgttcaaagggaaccatattcatgcaatccattgatgcttcttcaatgattaagacgggagaaaagatgtttgaattacttgacaaatgggtagagcaagttggtgaggagaatgttattcaagttataacagataatcactcaagttatgtgatgacaggtaataaatactatttcttgaatttttatttacttttaaaatttgaattatttatcttgagaacttatgtaaatttgttatctacaatgtcacatagggaggttgttagaattaaagcacccgcatttgtattggacaccatgtgttgcacattgctttgacttgatgttggaagatattggaaaactaccaaacatcaagaggacattggagaaggctatatcactaaatgagtatatttataatcgctcaaagctactcaacatgatgaggcggtttaccggacaaagagaattgcttaggcctgctaagactcggtttgcaactgctttcatcacattatcgcgattgcataaacaaaaaacaacttgagaaagatgtttacaagctcagattggtcagatagtaaatgggcaaaagagtagaaggggaaaactatagccaacatagttctaatgccttcattttggaacaccattgtgttttgcttaaaggtttcgggtcccctagttcgtgtgcttcgtttggttgatggtgaagaaaaaagctcctatgggatacatctatgaggccatgaatagagctaaggatacagttgtgagaagttttaatggaaatgaagaaaagtacaaagaaatcttcaacatcattgataagaggtgggagattcagcttcatcggcctttgcatgcagcatggtactttttgaacccggaattcttctatgataaaccagaaatagagcatgatgcagagattatgagtgatttgtataaatgcattttaaggctaacaagagaccctgctaagcaagaaaaagttgtggccgaagtgagtttgtatacaaatgcccaaggactattcgagaatgagttagctgttaggacaaggaagattagagcaccaggttagttatttagttttgtttatttaaatgattagattgtatttttactaaaataggtgaattgtttcactaaattgttaatatctatactacagttgaatggtgggctgcatatggagcttcagctccaaatttacaaaggtttgcaatgaaagtcctcaacttaacatgcagtgcatcaggttgtgaacggaattgaagcatctttgaaaatgtaagtgatcaaaataattacaagtaatagtttaatagagttttgaatgtaacttaaaagttaaaactttaaaatatatttatgaacttatgaatttttgctgattcatagcaagaggagaaataggttagaccatcaacgcttgaatgatttggtatacattaagtataatcgagccttgaagagaagatacaatgaacgtaacaccattgacccaatttctttgaaagatatagatgatagcaatgcatagttgataggaagaatgaaaaatgaggattctcatggaggtgcacaagaagattttgtatttcatgatgataatttgacatagggtgatgttgctaaagctactggagctgaggaggccaggtttgatactagagctagagctagagctagagctagagcaagctcaagcataataccaccaacgaggggaatagcttcaggttctagaactttgccttctcattcactaatagatgaagatggagacatggttgattcagccgatgaagaagatggggaaggctacgaatgtggtgatggaaatgatgatgattttgttgatttagaggaggagtgatgattgcttgttgtggacaaatttgttatttaagtgttttttaatgatgtttttgaattgtggacaaatttcatgttttagaccttttggtttggaaactttggattttgatatgtattaggctattagcaatatggatttggatttgtttttatacttggagttctttatttttatgttttttgttgattaaattgaagttttggatgatatttgataatttatgtgtttaggacaaataaatgattgttaagtttgattatattatataaaaatatatatgtaaattagggtgcgcctcacttcactaaagcccgcatcttaggtgcgccttgcaccttaggcttcaggactactttgcgccttgagccttttataactatgatggggagagactccccaaaaagcccaatcgggccttattaaaagtaggcccaaaaggccccatagaactgacgcccatgtctgcctccattgggttggctggaattgggcctttggcccattcctctccaccacttatatccaaaacaccactatctttgtgagcctcccgacttgctgtcctaggcccaggcccactcacggaagagtctagaacacctgcactagccagtctaccccctgcccctgctgcaaccctatgccttctgccacactcaacctgcgcatctgccccccgatattgatttccaatttgaacatcccccacgctactgccagcgcatgcctcaccccaccttcatccctgacctcccatccctcaaatttatgccaaacagaccttggcactacctaagaaacccaagggggggtttcccaccacagactaaccgcctagtagaaattcccggctactacctgcaacgaaccaggcataatcttcccagaggctttcaccaaaatacgagcccactacaactgttaaaagaaaattgtttcctcatcaacaactatgaaacccccacaactctctccaatactcttgaacacctctctactccaaaggtgaagaggaagccctacaacctccacccaaacttccttggcttgtctcccattccacaagcaccccacttcaggtccccatttctacagtagaaactccctatccttaatacgtctgctgccctttaaaagcaccgaatcagcttcacatttattttcaaattcaaacagcacaagggccacacctaacttggaaatatttaaatctcccttgagagaccatgtttcaaacgcccactccttcatggcaaccaaaggaggaacggactcaaaactttccccaaagcagccaaccaggcaacgacttaactgctcttccctacgagacaagtcacggtcccctacatgcacccataaagaatcctttgtttcctctgtcttcactctcgcaacttctacatgcactcctttccctttctctttctctttgaaactatagccatccttttcagatatggaagtacccaaatcacctttgctcaaagttggagtggcaactccaagggccctcaacttctaagccaatagaaaccatccccttactaagccttttccttccggaaaaacaatgcaaaaccttttagcttccaaatctctcattgaacaaagtaaaaacctcccaactacatttgaacgacactcaagcctaaactttcttcctccttcccaaacttttagacacctcgagcttgactctcctctacaccaagcttccacaacttccaacagcaagcttaagctcttttctccaaatcttatccaagaggagaagcctttactcctttccaaaataatccctttctttttacctcagacctcttcaatggagatttcgaacgtcttggattcaacagcaaaccaacacttaccacctttcgagactcctctcccctccgagagagcagccatctcctctttgccacaatatactttatcaaataaccaaacaagaatcaccctacgtaatacaggagaaactgggaaccttcagccatagttattaatgtttggagatatataattagtttgaaaattctcattcctacaatagtaaacgtcatttctgtaatgtaccctaggctctctgattcctttaaaatgcatgttagcgcattatcttgcacccaccaatctcaagtttcacttgaaagcttgaggccagattttatgacaaagagcatttgtcataagttgatttatgtgtaatcttctctaagatgcaatgaaacctaagcctgtcctggtgcagttaaaaaaaattgtttctatttcatgggtttgggtgtgggtgtcagatatagatgtgtctaggtgtctaatcttttttacctacaaagtttaggatatagagatttggctaaaaaggatctcaataacggatatggacagtttaatatgacataataaaaagaaaaacaaaagtagaaattgattaaaaaacaatgatgcctttgtaagaattctttcttattttatctctattttttttattattcctaaatatttttgtgaaagttcacttctaacaaactgtttttcttcaatgtgattatctgctgaggaagttgaaaaaaaaaaaaaaaaaaacaatgacaatcaaatagctagatccaagcaaagtgagaatctggaaagaatcctatacccactctcctgtcttatcatgtcgatatgggtacgctgggtaaagtttgaggattcgggtaaacatagaagagtgtgaacagagtgatttgaagctgctagtttcctttctcatgtaaaaattttcgtttgtatttggatccattatctctcctggtagaatacagcaaataaacttttatttatttaagtacttgtgataactacttggtatggtttggatcattcacctgaatatggtgatattatccatttttttcctctctctctctctccccctaatatttgttgtttcgcctttttctttttcatgaaaatcaatttggttgttggttgtcttgcctgctttgttacctgataacttttgctcaggtttgtacttggtaaaaatttattatagtttggatcagtcacctgaatatggtgatattatccatgacacttagtttgcctttctctctctctctccccctattattttttgtttcaccttcttctttttcatgaaaatcaacttggttgttggctgtcttgtctgctttgttacctgataacttatgttcaggtttctacttggtaaaaaattatttacaagtggtctagaggactcctattattctcatggtttttgttcctattcctagaaagataatgcaacagagaaaaaaaagagtgaaaaatgacgaatctgagcattgaggcagcccatttctctaaagaaaaaaaatgtctagggttgcttttcttcattatggctttattggtttcctttttgaattgaagttttctttatctgcatttacagttcactccaaagaaaggtgggacccctaggaggaa

SEQ ID NO: 11124 - DNA, 3517 bp, Vitis vinifera
  Intron number 1 from transcript GSVIVT01025730001 (locus G SVIVG01025730001) derived from phytozome v7.0 (chr-ID chr8 ; pos 12529388 to 12532904 reverse strand)
tggcagctctccaatcaattcaagtactctctcaatttctgtgtggttgctgagaaaataagggaactgataaatgagttttgaaaaatctattgaatctttgtttctcagaccatggaaaattctgtctcaagtatgcattgttcggccgagtggaatattttgttttcttggatgtggattatggattgcctattttctagggttccaagtggagccttagggtttttgtttctgcacgtgctattctttttgaattatcataggttaaaatattatttgtttgctgataatatcgaataggtggttttagtctcgtgtatgagtggttgtgtatgatgcaggtcctattgtagggttgaaaagtaaagagtgtggaaattggattgcccatcgcctcattggtgttttagggtttgttttatggggctcatattaattaggcacgggtgaatgatgataggtgatgtatttaacaagaagtcaataacctgttgctttacataacattcccatccattctgtttttcctgtcacttaatgtgattgaatacagcctattttttcatgtgatgatatcgttttcggttctgttggattaaattacttgtgccttttgataatttggtgcgatgttccattttctcggagccatttcttattacttgttatatggtgtttcagttgtgttatcagcctggttgtttatttatttatttttatattagggttgaagccttcaaggtctaccttttctttttctttgatttcagggtactctttgtattgggtccttttttggtcttctattctttgtccctctttcaataaaatctcttattgatcattaattggattcttggaaattaacacattcatcttgtgaagtaagcatgggaaataaaagaatgaggagcattgccataactgatatcataggatctgtttaggatttcatgaaatgccaccatttcaaattttttattgtcatctgtcacaatggccatgatcttgtgatagtcctacttaagtgacatggaaaactgattggcattaattttgtgtaaatgtatttacattctccattcttttttttttggggggtggggggtgggggagagattttctattttggtttggacaattttttgataggctttggaaaaagaaaaggaatgaggagcattgctataactcatgtcataggatttgtttaggatttcatgaaatgctaccatttcaatttttttattgtcatttgtcacgatgtccatggttttatgtaatagtcctatttaagtgacatgaaaaacttattagcactaatttttgtgtaaatgtattttgcattctccatttttttttttttggattttatttactttttacttcggatttgtcattttttatgggcaagcaaaaaatactattaactgcatctagcaaaaaagttgcccaaagtatacagtgtacacataaggtgccaaacgacattgaactagaagagagagacaaaaagactaccctctccctttacttggtacctaaccaagcaaccaaatttacaatagacattcatgtctcatctatgaacttactagcataaaccaaaagagtacacaaaaagaaggtgtgagcacttgatttgtttgttccattttttcaagtgacctttgatttatctctttccaaatggtaaaaaatcagtataaaaaaacagccttacacacattcttatcctaataaatggcagtgagctcccctcctctatatcctaactcctccacattggctaataccccaattggattgactctcatcttccaatcaattttcagcgtgagaaaatacattaaaccacatgagagtttaacttagatacaacacttgatctctaaaagtaccaggaagactaggaaatcacctacaaacaaaagttaggacacctctgccccttcatcgcctcttctaaatgaggagaagagtccctgccttaaacactttaaactctggaaagaactagtggaagttctattaactaacttaggagcaggaatttccagttgacatggtcatgactcttctcaatgtcaaagcttacactgttagtagaactcttcaaccgtgaatccatgacctcatttacaataagcactggatccaaaatttgtttattctcaacaaaggtctaatatgaattgaagaccactctctccactactttcttaagcctattagccaaaacctttgcttgtagtttatatatataagcctctaatcatgctaattggtgtaaggtctttcaagtcttccctctcctttctaagggactaagatcaagaacatgacatttgtggtggaggctggtggtagctgtatactttttgtataccttgggctgcttttttggcagcactttctaatatatcttccttttttatctatcaggaaaaaaaaacaaacaaacaaacaaacaaaaagatcatgaacatgcatttaaacttttaaaagggccttactcataaagctccctgaagaagcccaagagtacattcttcacgaagtcccaacaatgctgccaaagtgcaataggattcaaatgtggcctgaatcatggggattgagaagccatagtatatattagttttgaaaatcaaatccccatatacaagtatgaaactgtagttatgaatatacacagaggttttcactcgaagtttttccactgatgtataaaatactgaaacaattcaacattggatgttaaaatgtggcctaatacatggttgattggtgaaatttcccttatgtatgccctaaaggaagtgaagccatatgccatctaagtttcattaaccagtcaccaaagtagtgctacttgacacatcatggtgtaatggcactacaaatagaatttgctagcttatctttagaaaaatgcccataatgtttactaggaacaatatttttattgcatgagattctattatgtaatttcccattttttcatcaggctctttttgtttaacatgagggcgttggaaggtgaatagaagtggcaacttttttgcattaaaatagtgtgcaacattgtttttgttaaataatgtttctaattagcaaagaatacaacggaattttcctgaggtgtacctgtatttaaaaatttatctgcaaatgttagaaacttgtgcttaacaaaacacagacatttatagaaaaaaggggaaaaaaagaaggtagaaagcccatcttatgagatcataatttttcacatgtagggttgagttgctattgcctgcctgttcaattacttccctgatcaatttttagcttacctatctatttgcttgggttctttgtgagcatcctgttcaattacttccctataaagttgggctatgtaaacaattttgccttctttcaatcaataaatttgactctgtacttcatcctgaaatattaaataaaaaccattcagccttaaatcttggactacttctaatgtgcagttggc

SEQ ID NO: 11125 - DNA, 4809 bp, Vitis vinifera
  Intron number 1 from transcript GSVIVT01012866001 (locus G SVIVG01012866001) derived from phytozome v7.0 (chr-ID chr1 1; pos 6357832 to 6362640)
cttctgtatttgtttccacatactgtctacttccaggaaaggaaattataaaacaaaaaagcattttgaaatgactcgattatttgaaaattaaaaaaaaaaaaaaaaaaaaaaaaaaaaccttttgctatgctatcaaacaaaaaatcaaaatccactttaaattaaaataacaattttacactttatttaaacagatcacatattcaacacatgaatagttcattactattaataccatcgcataattaaattttttttatattaaaaataattatataaatacgaaaaataattaaaaataaaatattaagtataaaattatttttaaaaatattaaaaataagttaaaagcatttaaaaattttaaagttatatgaaagaaacttagaaaacagtttttcaaaaaactgttttttaaaaatgttttcaattacttacaagactctttttctcgatctttacggttttttgcatctccaattccaaatatgttaggtagtgattgtgagatcatttccctttggtcggccaaaataataatggcacaagcagcatgtcccttcaagccaaacatgccactaaaaagcctacagttcactccataaagcctaagcattgttggaagttagcccacccatttccactctccaaattaccaccatctttattcttttcttcaaccacacttcctcctcatatcgccattctttaaattggagacaaccctttattttctagtttgagaagaattagttagaacttagaagttgattcaacttctcaactcccaaaaagcactaagacaaagtggttacatttcagttatcagacaccaaggaaaaaaagacgtgagatcatgctttggtggtgtgtaatttgaagtatttcttaattacgagccacacatgtgttgcacacttttttccattcagtggttgagcagcaggttgaagagcagcccaaattgaaatgatcgggaaatttcatgaatattttatctttcacatgggctgattctagtaatccacaaatgaatatcatgtttcaaagactaatgtctttttagattgatgtcatttccacaatactttcttgattgccaaacaaatttttctgtatcttatgtaacctcatacagataaaaactttagtcaacgccgtgccatgcacttaccttaaactctttgaataatcacaaccccatctgtgcgatggcgggttcactagaaggccagaaatgagacactagcggctacccaatttgtcgatgaagcagaaaaagagaatctactcatgtaatcaccggggggatagcgttggctataagttaattaatacttaggttaatataaatatttttcccctacacccatttgtcattgtcgactttgcttacaacgtaatacaagacttttatatatgtctatatcagaggttcaggcgatattatcctttctgcagaactgttggaggcgaacatgtggatagatacaaatgaaatccccattaccgattggtcatccttttagataaagtaatgatgatggctaatgataatatatacaaatattcttccatggtgtgatggtgggctctagttatccaacttgcgcctaaagatctatcaatgggataatatatagtgcaagtctgaggtcgatctccaagtgtaagcctcaagcttcggtaagggggcaacgaggttccatcattgttgtgggatctacctccaagatctttttagctagatatttatatacatatatcagaaccagttggtcgccattgtcggatttgttacattaaatggctcacggtggccaaatttgatgcatatcttttactgtactgcctaagccaaagaaaacaaaaggaaaagattccaagcaaagacaacacatagttggagattgcgagactgttaagaatgggatgatttgattcacatgaagttaatgtctaagttatctagcacagtaacgcatatatactaggaattttattttcttgtcttggatgatgagcccattgaaaactatacctaataatggagcggaagaatagggtggacattgattttattcaaacagttctgcatttaatgacatgaaaacatatatagtgaagaagataaaattcttggagaaaaatattgaagattttaccccatcattttttggggtagagagatgtattttttgtagaggtcaagagagtcttctctttatagccgtcactcttcctatgaagggtcatgaaggaatgtcttttgtagaaggtcaacaaactctgtaatgagtaggcgttttgtcgtaggacaacagattttgttgacttttggacacatgaagagaaggataattggactcgtctttttaagcactggttaatcaatcaagtgactcaggttatcatgtaagtttggaggtcttctctttttgtgatccttattttagagtaagatgaatttatgcacttttaggttttgagattgactattctcttggtggttcaatttttggtacctccatatagtaattggccaccccagttggaccttctctttcaacccaattgagtccaaatgttaattgatgcatttcgctttaaaaaaatgtctatttgaatgcgtgtttatatcgttcaacctttgtttatagaagtttcttttaaaatacttagaatgggtccaagtttgaaagttgtatatatagagagggagagagagaaagaggattccttggaagggtgtatttaatttatgatcatattatattttgtggtagtgattttaataaagtttcccttctttgaccaccactgtagatgagttatggtaacaaaatgatgaccattcatatcttatgattcactatcaattgcctcatatgattgttatttatcttttacttttatttcccaattttttatgaactgtcttttctgaaaccctctaccatgactattctgataattcttctatatgtggaaggaatctacagaatttgaagaccattgaattttctttttatttttaacagtaattcctaaatgattccccactgaacaatacaaccgagtaggaggtttggagagggacggcaacaacaatttctgcaaaaaaacaacatatgcccatcactccaagctaacctaaactcatattttcaaactgcaatttttctccatccttttgttttcagttgaaggattgattgaggcttgaggcaaatggggtatgcccacttgcattgtggtcctataatgccttggaaaagtatgcgcacaatgtttgaaaattgtgtccaagaagaaggctgcttattgggaagttttggacccccattttgttgggaagtacaatggatgcttcttccaaaatcaaaggtcaagctgatcttttcgaacccaaccactggtcatcaatccccattcattagtttgagacagctccaatgtaagagatttcttgggtgagaagaccagttggtgccccttaaatatgtggggtatctatctgttagctgcagtgtttgtgtttttggggttgggattcttctatgctacacaagatcttttttaaaagaagtaaataaaaatcaaagcattgtggattccgaaaaagattatcatttacatgccgtcttaaactctacctcctgaaataaactattcaaattgctcatctgattgatggcaatatgttatgccattttatgtatttgagtatttccaaaatccatcccaagaggatagggactagataaagaaatcttagtcaatcctactttggaaaagctggctgataatcataattttgacatcattggttttagaaaaagggcttaggtgaagtgaggttgggttaaaagatacaattaataatgggaaaagaaaaaaagaaaaaatgaaaatcttcattaggcatctaatgtgggctctgtttggtgggtggggttctatgcataaaaagaagaaagagtgaaaggttgtaagaagatgaggttactttaaatttatgtccaacaatgtagagtgaagtctcttaagcttgagcggttgtgattttcattttccttaagatatggttgggcttccgagaaaaaatgaaacagagagaatagagttgattagggttgttgatgcccagaatgggatggttgatcagaagaacactttcagtctcattcaatcataaggtatttttattaaaaaaaaaaaaacagcccaaaggtacaactaagaagaaggaaagaaagaagaatcacacaacttgtatgcgtagtgccaaggcactttgtgggttgcaatcatacaatttccatagtgcaaaacgtctcaatttgttaccatttgggcagccacaactcacaaaggaggtacccaaatggccctattactcactcaaatcaactccttcagcatagctctcatgtacagttttccctaaacatatctaccacagcatacgtcaaaagctctatttttctagcactcttttgcaccacctccatattctagtgcacaagcaaaggatcccacaaggagaatgacatgaaaaaggaacaaagaccctaccataggatcaagaaacagccaccccatctctgttgccattcatcaaacaaaatcttgtaggctttggcttgaaattcctcctcctttgaagatcatggcttgatggcttaatgatttggaggagaaaggcctttactgaattagccttggccatcacctccaactgccactgtctggatgaaggacgaactagtgctccactcgggaccctgtcgaagttcctgtgca

SEQ ID NO: 11126 - DNA, 21393 bp, Vitis vinifera
  Intron number 4 from transcript GSVIVT01020995001 (locus G SVIVG01020995001) derived from phytozome v7.0 (chr-ID chr5 ; pos 15725555 to 15746947)
caccattcaaggtatgatgtgcctatgagcatttatcttccttattccataatatttctagaacaagtttgaacttgatcttcttgtttatttatcaaattgctcacttccatttaaaagtttggaaggaagatcaacctgaatatatatttgggctaatccaatcggactaacactctaaatgacatcaaattatatggcatttataattttgtgttgcagttttgacgtgattctggaaatacctttcgttttttctcctttctttccttttcagccatcttctgcttctttatttcaaatttccattgaaagtgttgacagtgatgttgttcaatttcttctgcaaaactagataatgtaactcaaatccctagttaagcaacccccaccttcaattttgtttttccatactggtatgatctgcctggaatgtctttgaatgtgcaatataacatcataaaatttgtgaacgcatggaaatctttgacgtataaatttaaaacctatttggatgctaagataagcctgaaaaacgagattacatcacaggcttatacaccacactgatgaggttatgtctaaactgaagtttctactgtgtaatttgattccaaaaaattggaggacataatttatgttataactttaaatacattgatttcataatttttaaacatttctaatatttttttaatgaaaaagtgacttcaggaaaacatagattgaagtgatgttgctttaattgaattggtatatgggcgtctatgtgttgaagcaattcaattaaagcacgcctttgcaacaattcccccagttcaatcctttttgcacctcttaatgttgcatgagactatccattggtctcaaggtgcttttgtggaaggtaggcaaatcctagaagttgtcctagtcggaagtgaagtggtagacgaaaaatgctttggaaaatcaggagttccctttatgatagattttgaaaatgcttatgatcgtgtgaattgaaacgttttggctcatgctttagagaagaaaggatttagtccaaagtggaggttgtggatttgaggatgcttatcttttgtaagttttgccattctagtgaactggtgtaccaaaggttgagcttcaatgtctaaaggcctaaggcaagatgactctttcccccattttcttttaattattgctgcagatgttttgagtaagatggttgtaagagctgaagataaagggtttttacaaggttttttggtaggtaagtacaaggcaatggtgtcattgctttagtttgcagatggtacaatttttttctcagaagctaaccaagaggagttgcaaaaccttgaatacatcttaatgctttttggacacacatcaggcttaaagagcaatctagaaaaaaactccttggctggtattaatgtgtgtgaggactctattcaacacttagccttgttgttggattgtgcaatctctatctagccccttacctatttaggtctccctttagaaggaaatcctagagcccttcttttggggtcttatgttagataggatctcttgttgtttggatggtttaaaaaaagccttcttgcctatggatggtagaataacccttatgcagtcttgtttatcacttatcctcacttatttccttttaatgtttaaggtcctagctaaagtggtttataggattgagaaattacaaataaacttcttttggttagggtttggggaaaggaaaaagagaccggctaattgggttggattggttggtcccccctagtaggttcagtaaagttaagctttgatggatgttccttaggtaaccctaattggatgggcattggaggtgggattaaagatcattttgatacagtgttgagagctttctctaagcaggtgagtgtgaggtttgatattgaggttgagattttggcattattggagggtttgctgtaggtgaaagctttaggcctctccatcttaactatagagtgagattttgctaccgttatatcttggttcattaataaggaaagaggttcattgaagtttgataattcatgtgcaagatcttagatgttcttagtaaggatgaaaatattggtttcaagagacatattggtaactcagttttatggatatatgaggatacggtgaatattttaacacaagatattagtggggccaaaaattgatcaaaattcatggaaaactcttagaaatgaaattagacgtataatagacattttaaagttgttttgttgaagaaattgacatatgtatgatataatttatgatattaaatttaattatatcatgtcggttaataagaaatatgaattttgtaagtgtacattcattattaagccacatgaaagatttgattttattaaatatcaataatttgtacatattacattataatgaccctttaataccaaaatgatgactggtgtggttcaatgcaattggtagatgaaggaatcccatcttgttgttggagacaatattggtaccaacttattgagtcttgatagtaatgattaaaaatttgaacatgtcatgcatagatctcttgagtcttgcccattgcctttacatggataagagactcgaggttcacccacgtgcttggttcaaatcctccttgcatttgatatggaacatggtatgatatttgtgtagaaagagaataactagacataccatagttttcattggctgaacttgagcccattgcataattttgaggaggttgatcataacgtatcatataagcatgataaacattagcctcatttgatgagtcactaaatcgagtccccatactcatagactcaaaattggttgaaaatgagtcctcattaaatggtgccatcctccattctcttcctttgtacaacttcccaacagctcttacatttggactagctcatctagagccatggtctttatcttgtgtgcatggcgttaaatcgtcttcacaagtgaatagcctcattagatatcaactttgttgttgttgcctaacatccctattggatttggaagagaaattgaataatactttattaattaaattaggtttacatctagaacttaagtagacgaaacaatccctaaatttagcaactaaccaacctattgaatatcatccgatattctctctaattcaaacaaaaaaaattcgaatttaaacacaccagaactaatccaaactgaacaacctaaaataataggacttagtcaagccttatcttctgtttttattttagattcaaatttgtaaaaatgctatggcttcaacacaccccctcaaactgaggaagggatattgatcattcctagtttgcttataagagaatgaaaatgctgtcttggtagagcttttgtaagaatgtttgcagtttgaagcttagtaggtgggtactgcagtaaaaactccccattctcaactttctccattatgaaatgttagtttgtttccacatgcttggttttgtcattatgaaccgaattacaggagatgttgatgactgcttgattgtcacaaaacattttcattggaaacttggttgaaatcttcaacttctgtatcacacgttttagccatagtccttcacattcaccaagtgcaatagcctggaacttagcatccgcactacttcaagccactacggactgcttcttgcttctctaggtaaccaaatgatcccatatgtatgtagaatagcctgaggtggacctgctatcattcacggaacttgcctaatttgcgttagaacatactttgattcgtcatctggtattccaagtgtcattttcagtgggagcgtgcatgaattgactaactacactaacaagaaaggctatgtttgacctagtatgggataaatagattaacttcgcaactagcctctggtgttgaccattgtcaactggagggatttcttcttcatcactaagcttgctattctgctccataggtgtgtctgttggtctacatttgagcataccggtttcctccagaagaaaaaacacatattttcgttgagagactgatatttcacttgaagtttgagccacctccatgccaaggaagtacctaagagctcctaagtgtttgatttcaaattctcgagagagggtgtttttcagatttatcatttttgcttcatcatcacctgtaagaattatgttgtccacataaacgataagaatgactatcttcatatctgatgaatgtttgaataacattgtatgatcagattgtccttgattgtacccaggtttcataacagatgaagtaaaacgatcaaaccagaccctaggaaattgctttaggccatacaatttttttttttaacttgcacactcaattattttttttatcatctttgaatcctggtggaatatccatacagacttctttattgagatcaccatccaggaatgcattttttacgtctaactgatgaagaggccaatcattgttgactgtaatggaaagtagaactcgaatagtgttgagttttgtaattaaagcaaatgtttcctgatgatctactccatatgtttgcgtaaatcctttaactatcgatcttgccttgtatctgtcaatgttctcgtcaattttatgtttcacattgaaaatctacttgcatccgatagtagattttcccataggcaattttgttaaattccgaggttccatttttctcgagagctctaatctcctcgtgcatggctgccttccagtttggatgttgtaattcctcatgaatgtccctggatatatcaacattagaaagattagtagtaaatgctcaaaattgtggagataatttttcataggaaacaaaatcagcaatgggaggtgtagtacatgatctaacccctttccaaaacgcaattgtaacatccaaatcatctaatacaatcggattagtatctgttattgtgttacctaaattctggtcatgaggatccagatttggttcagttaactggttgtgagctgagggcatgggagtttgtatatccctggcaacttttcttctggaatagacctaaagctctagggttgaagctgctggaagattgggtgcagaatctgattcaaagggaacaacagtggttctagggctggaattacctgatgttacaggggctgttgaggtggtagattcgaaaactggtgctggaagagcaatattggttgctggatgagcaatatgggctggaagagcaatatcccaaaattgatcttggttggaatttcctgaaatctccccttgaagctgagtttgggaaaataatcttgatgttcagagaatgttacatccatggaaacaaaaaaacctttttatgattggtgagtaacatttataacctttttgggttgaagagtatcccaggaaacgacatttgagggctcttggatctagtttcattctgttttaagcatgagtgttgacaaaaatgctgcaaccaaaaatttttggtggaagggatgacactagccgaatgttagggtagcaattttttaggacttcaatgggagtttggtattgtaatactctagtgggctttttgtttatcaagtatgatgcagtgagaacgacttccccttaaaaatatttaggaacgtttgtcatgaacataaaggatttagcaacttctaacagataatgatcttttctttttgaaattccattttgttgtggtgtagcaatgcatgagctttgatgaatgatgccatgttcattaaaatagggtctaaggattgagttaaagtattcagtaccattgtcagtgcgaaaaatttggattttggtttgaaattgagtgttaatcatgacattaaaatttttgaaaatctcttttgctttagatttttcttttaacaaatacacccaacatattcatgtatgattataaataaatgaaataaaacacttagagcttgttatgttgctaatcttagatggtccccataaccatgtatgagcgaaaaaggatgatatttttgataaggttgtgaaacataagaattttgacaattgacagaatttacaatgaaatgactaagtttttatttctgaataatgatggaaacgactttttcaaatatggaaagcttgggtggcctaacctaaagtgccaagctattatttcatgataattggaatttgtaaaaaaggaaagaacattgcaacttgcattctgagcgtctccttctgaaattcacaataattaggaactaatttagtaacacagtttagatctttggtgactttgcttatagagagcacgttatacataagcttgggaacatgaagaatagagagcaatctaaagttatttggaggaatgacagtccctttacgggccactagtgagaaacaactatcaattgtgttaattttataactctcagaacaaggctgataatagtcaaagagagttatttcattgatcatgtgatcggctgcatcggagtaaaaaatccaagggtttgactttgaaaaaacattcaaagctttggaacatacacctttttggggaatggaacttgatcctacagtggaggtacttgaaggatcacatgtgaggagtttctgaagtagctccatttgttcttggttgaaaggtgttttgtctgttaagttattggattgtggtagttcatcattggtggcatgataatctcaaggtttgttttcctgtgttctgttacttttccaattgtgtggattcccatgaattttccaacaggtttctcaagtgtgagcaacttgattacaatgatcacaccacaacttgttggatctcctttgtgaatcaaagtgttgagaattctgttccccggtggctaaggctgatatgtcattgcttggaaaggattatgacgaggtgtggtccttcatcatgaccttcttttgactctcttctcgtcagactttagaacatgcctcttgaagtgatgggagtggcttggtgctaagaacctttcctcaaacttcatcgagattcttattgagtccgaccaagaatgtgaagatcctttctttttccacaatttttttatatttgatgttgtttccaacgcaatcccattccagttcttgaacacatccagttgttgccaatatcgagagagaatgttgaagtattgggtcactctaaggtccctttgttgtaattctagaagttggcttttgattttggataactccgccgtatttttactgtttgaaaacgtctccttggctacatcctagatttcttttgccgtcttgtagaataggaatgtctggcctacgtttgtccccatggaattagtaagccaagacaatcatattgttgtcgaaaaaccaggttttgtgagatgcatcgtttttcgttaggattgtcttcatgcttgtgatgtaatcgtctttgcctatgacacatcactactaattaaaaccattggagataattcttgccatttaatttgtggataataatgtagtgaacgaaattctcagaatcgccattatctttagaattgacaagagaataatcggaggtcacctccgaagagctaggtggatgttcgccaatcattgcggttttcaccatgtttaacttttccggtttagatcgtgggctttgataccatattggatttggaagagaaattggataatactttattaattaaattaggtttacatccaaaacttaaatattcaaaacaatccctgaatttagcaaccaaccaacctactgaatatcattcgatattctctctaattcaaacaaaaaaaattcaaatttaaacacaccaggactaatccaaactaaacaacctagaatagttggactaagtcaaaccttgtcttttgtttttattttaaattcaaaactcctaaaaatcctatggctttaatagtccccttcatcatttctcatattatcatcaccttcatcattagtttcacttcttgaagcatcataaccagaagtaaaagtactaacaacactaggtctgttactttgtccaacacttttggaggcaactgaatattgtgaatttaatgttgccttaaatgaatcctcagtgtctttgctaaaactctcattatgaacttcttcagataacacttgttcaacatcaacaccaaattctcgatcatgagcgacaattcgaggatcgggatttataacgtcatcatctgagtatagaggcttgatccattgaaacaattgattatcctcttcttcacccatctccgctaaaatgtcaaagagagtaaggtaatctttttcaacaactttattattttctaccttcatatcacttagctttagtttcatgttataataaaaaaaaactaattgttgtagttaggggtaagccagatgatttcgttgcttatgtggatgagagcgaatgtgctctagtttctcttataggtagaaaatgatgcagtttgtgatagaactttgatgaccaactttctcaatgtaggcgtatgatttccatccatgaaccatcattcagttgcgaccaaatttataatttttttttttgatagataaagagaataatattaaacagaaagaggaaacaccaaactagtgccctcaaggtatacagggagtatacaaaagtagcccacaaactcgaaaccaagggaagaggaaataaacaacaacccctacccttacttggagcctagagaagaagggctcaaaactataaacaccctaaccaaagcccaaagattacatacaaaataatattttagcctttggagtgaaaacacctcattcccaaaagccaacaaatttctttccttctagactaaccaaaaaatacataaggggaccatttgccatgcctttttacgggttttccccacaaatgctctatgccacataaggagagtttccttaactgaaccagagagaacccaagccacaccaaaaagggagaaaaaaagattccatagattccataatgctcgcatcttaacacaatgaagtaaaaggtgatccaccgtttctacttcagaaaggcaaagaaaacacctatttgccaaagagtaccccctcctctgtagttgctccaaagttaagattttgccccaggaggcctcccaagcgaagaaagctaccttagggggtacatttgccctccaaatactaccataagggaacaaagaagaacctctgggctccagaatagaataaagcgacttgaccgagaaagctccacttcttgatgctgtccacaccactttatcctcgtcctccctttgcactctaaaggcttggatttttagcataaaacactccaccatgtcaatctcctaatcattaaacgcccttgagaaaagaggggtccaaccaccctctacaccatctgggttccacacatccgatactcaggcgtctttagccagggagatggcgaataaagaagggaaagactcgcaaagatgctcatccccacaccacttgtcttgccagaatctcactctcctaccactacccatgcggtaggctaaattgctatacatacccaactactcctttctaatagctttcttgagccctacaccatgcctcccacttacggcccgagtacaccatccctcctcctttacaccatatttgtgactgatcacttgcttccacaaagcctcactttgaatggcaaaacgccaattccacttactcaagagagctttattcatcaaagctaaatttctcacacccaacccacctttctttctttccaaacaaaccaagttccatctaacaaaatgtggcctctgctctagagctcctccaccccacagaaaatccctctgaatcttctccaacctcagccttacttttctgggcaaataaaagagcaacatgaagtaaacaggcatgctagaaagaatgctccagataagggtgagtcttcctccttttgatatatattgtctcttccacatagcaagcctttttcgaaacctctcttcaactccatcccataccacctctaatttaaagggtgcccccaaaggcagatctagataacaggaaggcagaccacccactttacagcccaattccgatgccaaatcctctatatcatgcaccctccccatcgggatattctcactcttctccaagttaactctcaaccctgagcaagcctcaaaccacatgagaagccagcttagatgcgtcaaatgatcctaagactcctcacaaaacaccaagatgtcatccgcaaatagcaagtgagatattagaatcccctcacctccccgacctcttaccctccaccctgatagaaagcccccactaatagcccttctcaataagcaactaaatacctccatagttatcacaaacagataaggggagatggggtctccttgtcttaaaccccttgaactttggaaaaaaccggagggagagccatttataagaacagaaaatctcacagtagagatacaccactctatccacttaatccatctctccccaaagcccatttttttaagcactgccaacaacttccagctgacatgatcataggccttctctatatccaacttgtacaacacacccccttgattgcttttcaacctagaatccacagcctcatttgcaatcaaaactgcatctaggatttgtctacccttcacaaaggcattttgtggttccgaaatcactttttccataaccttcttgattctatttaccaacaccttggttaacaacttgtaaaggcttcccacaaggctaatcggcctgaaatctttcaaatcttgtgcacctcccttctttgggactaaaaccaagaaggtgacatttagagattttacaaatctgtccctttcacgaaattctctaaaaaggcccataatctcaaccttcaccacattccaacaaaaaagccaaaaagccatggtaaatccatccggctcgggggctttgtctttgcctagatctgaaagagttgtaaacacctcttcttccgaaaaaggaatctccaacccctcagcctcactgctagctaaccccataaaggacagcccgtcaatactaggactcgacctctcttcttttgaatacagcttttgaaacgcccccaccacactagtttttaaattattctcctctgagtaccaacaaccatttactttcaacttggataacttgtttcttctactatgagcattcgctatcctatgaaaaaatctggtattattgtccccctttttcgccatccatgagatctcttcccttaacacccaagacttataagactcccttgcctcttttcttgcttcacactcttccagatttaaggctgcacatttctccttttcatcccaatactcaacctgcctgagagcttcaccctttttagtctcaatgagaccaaactcttctttattccaattcttcaaaatatttttaagagccctcaattttgcatctaagataaaactgaatgtccctgtaaattttaaactcccccaccacatcttcatcttctctttgaaaccctccttcttcaaccacatattctcaaatctgaaaggggaaggtcccctcttcaaacctcctccttctaggaggaccgggaagtgatctgagattggtttggggagaattccctacacaacctcattgaaaaggctatcctagttgtttgtcactaagaaccggtcaagcctagactaggtctggttattcaagcctcctctccacgtaaacgggccccccgtcaaaggaaaatccctcaactctaaatcctctatcacttctgagaatctcctcattgaagcaataagcccacctcccctactgcgctcctctggaaaccttgccaaattgaaatcccctcccacacaccatgggtcactccgtaaaccttttactgatccaagttcctcctagaaatcttctctatcactactgcagaccggctcatacactccagtgaacacccacactataccatccacacaatttttgaacttgcacgaaattgagaaaaccccttcttccaagccaaccaactccaccagtctgttatcctagaacaccagaataccaccagttccacccctagaattgactgctctccagtctagatgtcttcccacccctagactatgaacaagtcccgtagtcatttctttaattttagtttcctgtaaacaaaccatgtccactctttgggatttgatgactgacttgataatcttccttttatccctatcattagcccctctaacattccatgataaaattcttatcttcatttgcaccctgatccagaagcccttccaaaaatacccacgctaaaacccatttttgctttcttatagcttatagtccactccagcttcttgagttccctattggattttgaagattttaaactcgtcttcctagacaccccttccttaccatttttctcaattctccccttcattctccttaagaggtacaaaatttcgtattcgaaaccttccgtcggcatacccaagcagcgaataaacatcgcgagacagcttgaactccacccttcatcttgcctcccttcttctaggtgatagtcactccatttctcaaagggactcgcaagctccgacccaaccgtgacaagtgctaaaccattccctctctcagggtcaaccgaaccccaagaaggctcactccagccaccgagagccgatacaactccattccgcactacacacagcggaatccgacagaactccccttccgcaccactagaattcccctccgacacccctatagctttgacgtggccctagagaggagaagaagaagaggatctccgaagccccaaagacaaagaagatttatgatcaacggaatacttggatgcctcctccatcaaagcctcgtcggtggccatcaaacgacgcgacaacaactccccgacgactgttacttcaacagccaagagctccaaatccattcccccatcaccccctacgggaacaaacggagccctagccgagaacaagcacgtgacaaccttattaaaagtgggcctaggaggcccacccaggcccgcctcttctatgctaatggacgatgggcctttggcccaaaccacttcaccacttaagcccaaaacgtctttatctttaaaagccttcccaacatttttttctaggcctagacccacagtcagatgagtccaacttagctgcactaggcagcttaccctctgcaaccactgcatacctatgccttttgccacagacaacttgctcatctgtccctcgagactgcatatcaatttgaaaattttgaacatcttgcacgctaacactggcacgtgtatcacccccaccctcatccctgacctcccgcctctcatctttataccaggcggaccttgtcactacctgggagaaccatgggggagtttcccaccatagactagccatccaacaaaaattcccggttgccacctacaaagtacctggtctattcttcccagaggctctcaccaagatacgagcccactacaactgtgagaaaaaagttgtttcctcatcaacagctaagaaacccctacatctctctccaatactcttgaacacctctctactccaaaggtgaagtggaagtccgacgactttcacccaaacttccttggcatgactcccattcctaaaacaccccacttcaggtccccatttatgcaggggaaactctctctccttaaaacatctgctaccccttaagagcaccaaagccgcttcaactttattttcaaattcgaacaacacaagggcacccaacctggaattttttaaacctcccttgagagaccaccttttatacgcccactccttcaagaaggttaaaggaggaactaactcaaaactgtctccaaagcattctaccaggcaacgactaagctgttgttccctactgagtaggtcacggtccccaacatgcacccacaaagaatcccctaattcccctgtcttggctctcacgacttctacatatactcctttccctttttcttttcccttgacactataactatgcttttcagagttggaagtaccaaactcacctttgctcaaagctggagtgctaactctaagggcccttaacttctgagccagcagaagccaccttcctactaagccttttccttatggaaacatgagagaaaacctcttagcttccaaatccctcaccgagcaaagcaaaaacctaccagcttcatttgaatgacactccagcctatgctttcttcctcattcttcccaaactttaagacactttgagcttgactctcctctgcaccagtcttctacaccttccaacagataacttaagctcttttctccaaattttatccaagaggaaaagcctttgctcatttccaaaataatccctctttgtttgcctcgaaccccttcaatggagatttcgaacgtcttagattccactgcagaccaactcttaccacccttcgacactcctctccccttcgagaaagcaaccattttttatgtcatttgcacaattaaccaactagaaagaggtgcgaccaaattcataattgtcctacgttgtaaatctctacataatgataatgaatttagttttctattaacaaatggtactcattggggaccatttgtaaccttgctatgatcgccatgcaattaccgaatcctctcgtcgtatcttgaaagagtgcaagctattcattcaatgttcaatattcaatatattaatatcatattgttactaaatgttgagataaaatgttgaataaaattattgtttaattggatcggataatataacattttttagtttacctcatttccaaattgaccaaatgttttggccatcagatctaatctagcaaaaatctcatggatagcttgaagtagctcaagatcgctaccaactctaggcttgtactaaaacctgggatttaaaaagtatgctacaacaactaatagaattagtattttgtaagagaaaatcatataattcaaaaataacaacttatgaagatagatagtactaaattacctgttgcattaaggggatgtttgaatgttttctccccacgatcttttattgtttggaacatccattctctagcatgtagatgaatgaagttctttttcatcacttgcattatacatatagggtattataggaacaacttttgaatccacaagtcgaagcaccacatatagtggctcatatagtgaaactacttttgccattttgtcccaataaggatgctcgaccattaatttctccatttcttgtttgatttttgtctgacttagcttaagttgtgcccattcatcactcataaacaatttcttcaaattgcccctcttagagcaatgtaattggttgcaaatctagtagtttcatacagggttttgaaaggcattttcttgacaaatgttaaggctcgctttaaggcaaggcgttggaaaaaaaacgcaaaacacaaaacataaaaggagcatgcttttttcccttaagcgcttttgaggcgcactgtcacaggatgcttcaaatgaccctccccatgggcttatataggaggagggaagcttctggagactcctggagccatctacactaagccattggtgggaagagtgtggaaggttctagaaatgcctagagatgtccacacatctctacactatggtggaaggcatgagaggagtccaaggctttctagaagattctaaagatctcttgcatattcttgtacatagggttgtacatagattagtgtagggggttctagaatattcttgatttgtaaggaaccctctaaggttctagagagttccattggtgcctataaataggtgagggcctcatttggccaaggcaccacccaaatcacttcctaatcaagcaagtgagcttccaagcacttgtaaaggctttcttgagttaatagaacttccattcttcaaggagttgcctaccaagcttcttaagcttttgagtcgtgagtgtcttagcctagcaagttaagcattgggggagcaaggctgacttagcaagatcaagcgtcttgacttgtctaagtgccgcacgggcttagtgaacgactaagtccgtgacagcacgcctttgatgcctccctcagtgaagcgggaactttttcgtttgttgagatggccaataaaaacaaaaaaatattgaaggaaaaacccctattaaaccccaaaaacccactagagagcaaataaaaaatgattttgaaggagaaacctaaccttagttctctctatcttcgatgagccgaatatcgaagaaaagacgacgaaattgcaactcctttctcactttgagtctttttcgacatcttcttgttgccctatacattcggcaacgatgctgtgtgaagacaactgttgctttctcttcagattctccacaggttggtgtgagactgatcctcatatccctttctttattttctcttagttttgatttcatgaccagtttttgatttttttttatgctcttctctcttttctctcactttcattctcacttgcaaagctaaaagttttcactttgatttcattgcacatccactattctgacaactccattcccgatttttactttattttaattttcaaacaactccattcccaatttctacaacattgctcactattcactagtctgactccacttaatttttttacttcattttatttttactccacgcaaaatttctaccttgttcactaatccgatttctcttaaaattctaccacattcattgttctatttttttacaaaaaaaaaaaaataacacccaatagtgaacaatgaccgtgaacagtgaacaatgatttttggaaaaaaatattttcttcaattttgaaaaaattttatttatgttatttacttttgaaattttaaatcaaaaattttaaaattaaatttcaagtcaattatatcttgctacttttgctcaatcaattatattattatatataaaaatttgattattattattattattattattattatttttagaatgagttcctccaattcaagaacttcatgaaaagattttgtgtggaagtatgctattgaagtttctgacgagaaatatataagatgtaaattttgtaatcaaagatgcacaagaggagtaaatagacttaaacataacttagtcggaaatcattatggtatgaaccatgcaacaaagttagtgaagatgctagattagaatgtaagaaggcattggccaattataaggataaaaaaaaaaaaaatgaattgctccaagaaattggtatgggtctaacttcaacgcatgagagtgccttttctaaaacaatggggacattagggagtgggagtggggaacctttacctaggagacccatggataaattcaccactttataacctagacaaaatgctttgaattccaaatggaagcaagaagaaaggaaggaagtgtgtagaaaaattggtcgatttatgtactaaaaaggctcccattcaatatggtgaatgatccttattgggttcctatgattgatgctattgcaaattttaagcctgggtttaagcatccatttatgcatgaattgaggacatggatttttaaagaagaggtgaatgacataaatatcatgatgggagaacgcaaaaaagcttggaagcaatatggaggttcaattatgttagatagttggatagatggaaagagtaggtgtcttataaattttttgtgaatagtcttgttggcacatggtttatgaaatcaattgatgtatctgatacaataaaaaatgaagaattgatgttcaaatatcttgatgaggtggttgaagaaattggagaggagaatgttgtgcaagatatcactgataatgcctctaattatgtgaatgctggaacaaggcttatggaaaagaggagaagattgtggtggactctttatgctgctcattgaattgatttgatcttggaggatgttcgaaagctaaatgttcatgctaatacacttttacaagctaggcaaatagtgaagttcatatattgacatactagggttcttaacttgatgagaacatttacaaaaaaccatgaacttattcgtccaacaattacactatttgctactgcatttcttactctccaaagtctttataagcaaaagcaaactcttatagcaatgttctcctttgaaaaatggtgttcaagtacataggccaaaaaggtagaaggtgtaaaagccttaagtacaatggtgtttgatccaaatttttggcctcatgttgctttttgtataaagactactattccattagttagtgtcttgagagaggttgattcaggggaaaggccaaccatgggttatatttatgagttgatggatttagcaaagaagaagattgcaattaattgtggaggcatggagagaaaatatagcccaatttggagaaaaatagatgcaagatggacttcgcaacttcatcgacatttacatgcagcaggttattatcttaatcctcaattgcgatatgaagataagttctctaatgtagatgaggtgaggaagggattatttgaatgcctggataagatgttggattattaagaacgttttaaagctgacatttagttggactcatataaccaagcaataggcgaatttggcagttgtgttgcaattgattctcgaatattaagaagtcttacatgttggtggatgtgttttggagggttcaacatcgtagttgcaaaagtttgctattcgagtccttagccttacttatagtgctttgggatgtgagagaaattggagcacttttgaattggtaatacttctatttttaaaaattttatacatatgtttctattctaatgttagagaactttaatttaatcttaacacataaatttgtttcttttattatttgtgcaatgcttccaaacaggatcttgtcccgctacgccactcccacctagggacgaaaatttcactatatatcactaaaatattggcgatgtattagcatatcggccgggcctaacacaaatatgggatggatatatcgaccatacgatttttcagtttttttctccatttattgttgatatttcgacgatattttttcaattactgatattttgacgatattgcagataaatcggtgccacgccaattgccacatcaatgtttccctttcatttaaaattttgaaattgaaacaagccttaaacgcatccgacccaacttattgtagcccaatccgtgcctcaatagtgcacaaaatgggagcatcccttcttaaatatatcttcattttgcttcccatttccaatgtgggattcacttacatgaagattagaaaaattataaacccaaagtacgccactaggacttgaaccctggtattttgtatggaacttaagtcacttgcgagttaagctatgttggtcttggtttcatatgatgcatcatatatattagtttataaaattattaaaaaaaattaataatttcaatcatttaaattattaattttctactaattacatactttaaattgaattaagaacatacccgatactttaatgtaattgatcaaccttgatttggagttaatgcaccacttgaacaccaaattgccaaatttataaaatattgagaataatcacaaataaaatttgagtaatatgaaaccaaaatactttcaattgaattatggatgaaatcgattgagaatgaagtatttatagaaaaatttgggtcaaaataactattggatgatcattttaacgttagaattcatttgtggctgttgggtcaaaatttggatgaaatttgaccattgaatcttcaaataactgttggaatcacatcccaactgttgggtcaaggccagatttaatcttggcccttgaattaggtatttgactgttgggatcaactttaaaaaacataggcgtgattctgatcgttagattaaggccggatttaatcttgccccgtttgatcatgctttttgatcgttggagcacctttaaaatacacgggcatgattttggctgttggatgaggccagattcaatccttggcacaaaataaagtgcactttaagccactgaaataatcggcaaaattgccgatttttccttgataaatagccaattttttatgccgagggatggaaactttgctgctttgctgattttttgatttgcactgatatattagtgatttattgctgattttttgttgattttcttgaaacgtcggtcagtcgagattttggtgctgtgtttcgttttggccatggccaatacctgatatttcgctgaaatttctttgaaatatcgcaaaatttttgtccttggttgtcagtgagttgggttgctccctgtcttcggtttcttgttcatctaaccaagttgtagactagttagccaaaaaaggagctaggtatttggcctcctttgtcggagactctcttcccccttgagtgtgctttatttctcctttgtatttctttcccctagtggggcttgacagtttgttattttttaacattttctgtacattcttgaaggattgcttgtccttcttctacttatctttttatgataaattaaggtggttgtttctattcaaaaaaaaatatatttctttaattgaaaggcctcacccaatgaaaattgtggaattttgaatatttacctcgttagttttgttttgtttttgctaagaaatgcaaatcttttgatgtagtgcttggagatgtaaggccatagttctagggctttcagaaggactgtccctccataggttctgtaaagttctctccctgtatgcactagataaatcattgtgaactgtgtaggatgagcgactagctagctgaatgctctgagaattgagttcattgttttttactgttcatgggcagatcttacccttagaagtttccaacccaatctttaagtttttatcttctttttttcatttctttttacattccaccttacttctcttctattttcttctgaaaaaacatctcttcttcagtcttctttcacatacatactttttttttgattggattctttcacatacatacttataacttgggaaatctttaaatatatttgaaagtgaagtagggagtctatagactgtagtttacttgtattattaagtgaacttctcagaattgagttaatggtgtctggatgtttgaaaatttatattaatattggtggttaccatcaaaagtttgataatggcttacattttgcagg

SEQ ID NO: 11127 - DNA, 7455 bp, Vitis vinifera
  Intron number 8 from transcript GSVIVT01026351001 (locus G SVIVG01026351001) derived from phytozome v7.0 (chr-ID chr4 ; pos 14669392 to 14676846)
agattgattacatagcaaggtgtgtacatttgcttactattaatgatcagcatgttacagtttcattcatttatttacttactggaaaatacctgtctcattcttagacatgaactgtggctattaaaatatatgttcttacatttttctttgaacttatttcaatcctctcctcgtttttctatgacatcttttactttttgggcttcttcaaaaatgctgaagactaggttcattaccaatctaccacttccagtaccttggagagcatgcctctgtagttaccttcaaactatgaaattaaagaaggaaaaactacaaataaagaggagctatctttgaggatctagtaggaaccccatcatgtagtgtagagacggcctaggttccgcacaaagtaaagaaatttgcttgtttgttggcacacgggaaagtgaatacaaagagaaccttcaaatggaaaggactaaaaaaagctatctcaccaattggtacacaatgtggaagaggtacaactagagtataggtcatctactaattcattgtcacgtcaaattatttatttattcattttttataggcaataaaaaaaattactgatagtacctaaggagggatggaccaaggtacgcaatgtataaaatatgtgcctaaaggttagccaaaaaaaaaaaatctgtctttccttacttagagctcaatcaatccataaagcctatcatatagcctctaacccattccaaagaaatagacataaaatgagatttgattacttcatcttgttgtttagcattgttaaatgacctcctattcttttcctttcataaagtctaaagcaagcacaaaggagcagcccttcaagctttcttccacttcttcccctggaatgagctgtgccaactaaagagattccctctaactacagaatgtgtcacccaaataaagaataaaccagctgccacaaaattcttgctctggaacaatgaagaagtaaatgatcagccaattctccatcacctttatatcgtgacctctattcggtataatccaacctctcattttgtgctaatctagcattagagctcatccctagacgactcattcaaagaagcctacctttgttggtatccatggattccaaaccatgtttgcgaagacaggctcactacctctctcggataaggaagcatggagagatttaatagagagtttgccacatttggtttccttatagattgtcctatcctcgttgcttctaactggaattttatgcaatttctatgaaaggacctctactccctcaagttcccaattattgaaccatcttgcaaagtgtactagaattgggtaaatcaagtacatgagaaggatgaggaatcctcccaaaatttaccaaaaaaaaaaaaaaaactaaaaagacctatacatcatatagaactaaccatatgagaatatacaacataaaactctcatccctccaagagtattaacacagctccttcgaatagaaatcataacaaatctcctctcctctctataccctcatggtttgcacattgaatatcagtcaagttgaataacattgagagaaatgcccttaacattgtggaacaagaggcctaaaaggatgaataggaatgaattagatttcatagtctctaaagtcctccacttatccttgaaaattttagcatttctttccctccacacaatcgatatcaacgtgaaacaagaaaatttccatagtactttgcctctaatggaactccccaaatccattaacaaactgcatatgatgggtataagtaaaaagcttaacacattgaggtttatctccaagtcatccatcacactacatatgatgggtgtaaatcaataacttcacaaattgaggtttatatccatgtcatccatcacaccttggatatttgcacacattagctaaaaatccccccctctaagagtaatatcattatattggcaaaattggaatgtgaaggaaaaaaaaaatattttatgctatattgaataatcctttacaaaggaaaaatatatatacagattacctatagcctatttaaggagagtttgtcatcctatcacaatcctatcaatctgcaaaaatcaggggacaaccttactaattacatgaaaattaggaaagtgtttcaattaggaaactactctattttaccaaaatccctacagttgtatattgatatttgtaagtcagagaatcacatagattctccaacactccccgtcaagcttgtgaatagatattatccattcctagcttgcttgtaaccttttggaatgaagagctagtcaatcccttggttaaaatatctaccaattgcccatgtgttgggacatatggtgtacatattgatccactctcaagcttctctttgatgaagtgtctattgacttcaacatgtttggttcgatcatgttgaaccggattatgagcaatgttgatggtcgacttattgtcacagtacaacttcattggtccttgccacttaattttgagatcatcaagaatgattttcaacctcaaaagttcacaaataccatgagctatggctctaagctctgcctcggcactaaaccttgccaccacaatctacttcttacttctccaagttactaaatttcctccaagtaatgtgcaataccctgaagttgacctatccacaactgacccaacccaatcagcatccgtgtatgctttaaacaaaatttctttccttggggtactcttgagatgtcggagaacactataggcagcttgaaaatgaacatcctttgggttatgcatgaattgacttatcacactcacggcatatgctatatttggttgtgtgtgcaaaaggtaaattaacttgccaaccaacctttcatatcttcctcaatccactggtgtatcatcactagtctcacctagcttgtgatttaattcaatctatgtgtcaatagacttgcatcctaacattccagattccttgaggagatcaagtacgtacttttgttgtgatacaaatattccttcttttgatcgagctacttcaattcctaggaaatacttgagctttccaagttattatatttcaaataccttggccaactggtctttaagtaattgcatttccattagatcattacctgtcacaattatatcatcaacatacacaatcaatgttgtaactctccttgaagtcgagtgttatatgtacaatatgtgatctccttgactttgtttgtacttcatctttaacattactttagtaaatcttccaaactatgctcttggaaactgtttcaacccattcaaagctttcttctaccttcaaactttattcatgtcaaatcattggtcaaaacttgatggtgcctccatatacacttctttttccaaatcaccatgcaaaaatgcatttttcacatcaaattgttgtaaacaccagtcaaagttagctgccaatgataagagcacatgcagggtattatttttgccataggtgcaaaagtttcttgataatcaactccataagtttgagtgtagcccttggttactaatcttgtcttatatctttctaaagaccccgtcaactttatattttactgtaaacactcatttacaccccacaatcttttttccttttggaaggtccactatttcccaagtttgatttttatttaatgccttcatttcctcattcgtggcatttttccaattcttatccataagtgcctcatggtgagtttgaggaatttgaataggatccacttgggtgaaaaagctcttgtattgaggagatagtttgtctaaagaaacaaaatgagatagtggatgttgagtgcaatttctaattcccttcttaagtgctatgggaacatctagatcatttataggaggaggtgtttctatacctgattgcaaattggactcttgaacttgcataagtgaaggaatggacacccgtctcctagagtacacttggagtggctgagcattagcaagaaccgagcctagaatttctattttaggctgattgttgcttcttttttattttattagaaacgaacaattgtattaaattagaaaaacaagagaaagatgagaagtcctccccaagatgtgcaaacctaataaaaaaactaagaaaaactctgctaaagaagaagggctatacaaaaagacaaaaggcctatacacgtataatgaacccagaccttgtagacccaaccctaaagtgtgcaaatcgataaccagttaagctaaattacactcaaaggataaggtttaaaaatgtctatacagtaagcttaaaaagaaacataaaactgaagagaatcctacatcaactccggcgtactccaagtatcctcgaaaatcctagcatttctctctctccacacaatccacaacaaagagaggcacactatcctctagagagttttgcctctgttagaattctcaaaacacttgaaggagatcaccattgtatcgcgaatgctacctggctgaacccaatccatcccctcctaagaaaagatcgtatgccacaaacctaaagtgattggacagtgcaagaagagatgatcaatcgtctcactactccccctacaaagaatgcacaaatcagggctaagggctttgaaagacctctttaattgtagcatgtcattagtatttaacttcttatgtgtcactaaccaatcaaaggtcctgactttagaagggacttttgtcttccacaaaaaattagcacaatagaaaggaatagaaattggataaggctggaaagaacaagtttactgagaaagctcttgaagaggacgaaacccaagcttttgcatctggaacagaaggagataaatgaacactggaaattagagacaatagtttttcaagatccccaaactccgcactagatagattgcgacgaaaagtgaaatcccaagacaaagaagtgttattacccaggatatctgaaataggaaggtttttgttgtggtgactctgaacaatcttggaaattgtaagcaaaaaggttgatcccccactacagatcttcccaaaaacgaattctggtcccatcacccaccacaaagcgagtgtgtgtggaaaaaacgtggagcatatgtgcaatggtcttccaaaggcaaagatgtgaccatctgactatattgtatgcatcccatccattcggatgtgtcccatagatgctcaagataacctggtgccaaaggataaaactttccttagggtacctccaaagccatttccttaataaagtttggttcctcagagaaattttccgaaaccctaaaccaccaaactccttaggcctacaaactaaatcccacttgaccaaatgatcccttttaccctcccccaaacccgaccaaggaaaatctctttgtattttttcaatccttaaagcaactaaggctggaatcttaaaaagagaaagaaagtagttcgggatgtgtgacaaacatgactgaattagggtgattctaccacctaaggacaagaaggctcttttccatccgtccaacctcctagagactctatccatcatagggtcccaaaaagaaatcgaatttgggttcccccctaaaggaagacccaaatacattaaaggtcaatcaaagattgcacaatcaaacaaagaagccaacctagctgtttaactttggctaatgttgattccagagaaagtgctcttatttagattaatccttaaccctgacaaacgcctaaactgttggacaaccttgttgactcattcttaacggttttgattgtgcttccttgtctttcagcatccctcttgattccttcttcacttgtttttgtggaacccatggtagacccttctaagagttgtgattcaagcatgacatcttttcggctttcttcggcttggatcattgagaacaccctgtaatgagggtagagtttctttccctaaaacttgcactcgaacttggtcaaacttaacattaagtcctgcaagaaactcaaaaatcctttccctttctacaaacttttataacatagcaacatcttcactacatttgaaaattttgataataatccaattcaagccaaattcctttcatgacattatagtattcagtgattgaaagagtaccttatttggtggttgttatttttgtcttgatttcataaatcaaggttgtatcttgcatcttggaataggtttggtgaactgtttcccatatctcccttgctgctgttagaaacatacaagtcccacttacttcaggcagcatcaaattccataaccaagacatgatcattgaatcttccccgtcccttttaacaaatgtaggatcattctgagcaggtttgattcccatcaaatggcttaatttcctttttccttttagaaaagtcttctccacttgtgaccattgtaaatagtttctaccattcaatcgatacgacaatcgaatattctgcaactcctcttttggagagtttggttgcacctctgtagattggttttcagtaatcacaacaatagggtaaatttcaaatgtttcagacatggctgaataatgggtaggactgaataatggacagctagaagggatttctcagagaatcaaatttatcagaaaatttttcaacaaaaaaagttgtaggattttgcagaattttttttcccaaaaagtgagagctttgataccatgaagaaaaaaaaatttattttctgctatattgaataatcttttacaaaggaaaaatatatatacagattacctacaacctatttaaggagagtttgacatcctatcacaatcctatcaatccgcaaaaatcaggggacaaccttactaattacatgaaaattaggaaagtgttacaattgggaaactactctattttaccaaaatccttacagttgtatattgatttctgcaagtcagagaatcacatagattctccaacagaatgcatatatttagttcttctcatgcatcttgttcaatgcttctgctcataattctaacataggattatcccttttgtaaattcatcaaggtaacaatattgtgtagaaattatgtatcttgttgggcctttttcttttttcttttttccttttctttttttatttttatttatttatttattggtagtcttccaaaacttccaggacaaatattgtcttctccacttctatccctaataatttataaataatctttatttctgaaaattgttgtagtaaaaattttgagaaattaaatcaaaaaaaaatattttgagcattagtgcagtgatttttgggaactcatgcttgaaatgatctactgaatggaattgatgttaatttttctgttggaataactactaactttgcacattaaccaggtacattgcagagggagggcttacaggtgatcgca

SEQ ID NO: 11128 - DNA, 4939 bp, Vitis vinifera
  Intron number 5 from transcript GSVIVT01030701001 (locus G SVIVG01030701001) derived from phytozome v7.0 (chr-ID chr1 4; pos 13898964 to 13903902)
gaatccaattgtatgttaagttagatgctagttcttctctaaaaatatttcttcttagaagttttgataccaaattttttgaacatggattcttgatgcacaagtgctactatggattcttgataaaaataaataaataaataaaatgttgaaactggaagtgctacatatcctaattttttttttttgataggaaacgacaaagagatatattgatagaaacaagaagtacaagagaaggatgaggaatcctcccaccaaagaaaaactaaactacaagaatacaaaaacaagaaaaaaaaaacaatgtaaaaacaaacaaactctctaaattagaccacctcattggaattacactgctagccaatcaagtcgtaacacattaagggggatccccttaaaaaccttggaacaaaaagcccaaagagaagcaaggaaatgaatagaatcctaaagattctttgaattccttgctttatcctcaaatatcctcgcatttttttcttgccacacaacccaaattaaagcaatgcacgcagcttgccacaaaactatccctctcttagataaaccaaaacccttataattgatgaacatgtcagaaatgctcatcgaggaaacctaatccatcttgcctaactgaaataatttgtgcctcaactccatagtcaaagagcaatgtaggaaaagatgatctgctgattctccatgcttcatgcacaacttacaaatgtcaggactaagagctttgtaggctcttctcgattgtagcaagtcattagtatttaccttcttgtgtgccactaaccagacaaaagacttgactttgaaagggacttgagaatcccaaatgaacttagtagggaaaactggagaagcactagaaaattgggataaggcaagaaagaaagatttgactgtaaaaagccctgaagaaaataaagactaggatctcacatttgaaaccgatggtgataaatgcagacaatcaagtgactgcatgaggccttctaaatcttctatctcataatcggaaaggttacgacggaaattaaagttccaagagaagggacgagtagtactgagaattgaggatataggaatacttttatccatgactactctaaatagtcttgaatattgggatcccaaaggttggtttgtccccccaccaaaagtcttcccagaaccgaattctttccccatctcctaccacaaaccgagtatacttagaaaattcctgaaagatttgtgcaatagccttccaaggacaacgatgtgaccatctgactatagtgttggcatcccaaccattggaatgtgacccataaatgcttaaaataacctaatgccatagagctgaactctccctagggtacctccacaaccatttccctaagaaagcgagattccttagagaaatcttcccaaatcccaatcccccttttgccttcgaattacacattacatcccaactaacaagatgatctcttttaccttccccaactcctgaccataaaaaatccctttgcaatctctcaatttttgcagacactgaagcgggtatcttaaacaaggagagaaagtagctaggcatgtggataaggcaagattggataagagttatcctacctccaaaaaataaataagccttttgccactcatctaatctcctcgagattctctcaatcactggatcccaaaaaccacaagccttagggttccctcccaaaggaagacccaggtagagtacaggccaatcagaagccttgcaatcaagcaactcgaccaacctagaaagatgattctgatcaagattgatgccaaaaagattcctcttgtcgaggttaaccttaagcccaaaaatatgcctaaacactagcaataaactcttgagagtctgcagttcttcctcacaagtgttagaaaagaaaatggtattatctgcaaattgcaaatgggacacccttgttctgttcctacccaccctgaaaccctctaacgaatttctttcctttgctctcaataacatcctgctcagtatatctgcgactgaagtaaacaaaaaaggggataaagggtcgccttgtcttaaacctctagctgccttgacccactctttagtgtttccattcactaagactacaaaagaaactgtggacaaacaacctctcacccatttcctccatctaggactaaaccccttcttctccaacacatgatccaaaaaatcccaactcacgtggttgtaggctttttcaaagtcaattttgaagacaactccttccttccttgatcgtcttttctcatccactatcttattggctataagaactacatccaatatttgtcttccttgaacaaaagcaccttgagtagaatggatagtttcgtgtagtacccctcttagacgccctgatagcactttggctattatcttgtagagaccagtgatcaagctaataggtctaaagtctgagattttctttgtcatgctttttttgggcaacataactatgaaggaggcattagtactttgattgatgatcccgtttttgtgaaactctgcaaacaccctcactaaatcctccttgatcacattccaacaatattgaaatactataatggtaaagccatcaggacccggtgccttatccctatccagttgaaaaatggccttagaaatctcttcttcaataaaaggggagtcttaacctagacgcactctccttagataaaggggaccaatctaagccttcaactctctaagactctccaggaggactcgagtagagcttttcaaaggaaagtaaaatctcctctgtaatgctctcggaattattcaacactaagcctctttcattctccaacaccttgataaatttcctattctgcctaccattagccattttatgaaaaaactttgaattacaatccccttctttaacccatttcaccctagttttttgtctccaatgaatttcttccgtcaattaattcttctagctccccttttcttaaagctctttgaactaaaagttctgaagtgagaaccccttcttgctcaatggcatcaaagttagctatttcatttaggattcttttttccctttcatttagctctccaaaagaaaccttattccactctttcaatttggccttaaacaaattgtaatttcctcatgaacttgtgaccttcccacccatttccttgaaaacctctccaccaacttctaaagcactccttgaaactaggatgttgcaaccacatattctcaaacctaaaaggtgttgggcctcacttgaaagggttggtatccaaaactatcgaccaatgatccgatgtccatctaggaagaacttcttgaaggctttgaggaaagaaaggctcccactcatttgagtaaagaaactgatctaatctcttacatacgggagactcttgcatgtttgacctagtgaatggtgtgttccgtaaaggtagatcaaacaattcacattctcttataaaaccatcaaagtccttcttgcttgaagttaatctagaacctcccaatttttctgaacttctccttatgacattaaaatcaccacccacacaccataaaggataagagaggccaaaaatgtctaaaatctccgcccaaaaatccttcctaagtaaggaactgtttgggccataaaccacggacagccacagaggtccgcatccatccaacgcaaacttgactaagatagaaaaggagcctattaccacctcctcgctgcacagttttttagagtcccaaataatcaaattcccacctgaagccccgcacgccggaaaagccgcccattccttatttctgatcgtccaaacactaccaacaaaccttctgtcacacaccacctattttgtttcctgaatcatcacaacatctgaattctctaacctcagaaaatctttaaccacccttcgctttttccttgatcccaaacccttggtattccaactaattattttcatggtaaaacctcacaaaccctaaacctccaaaccctaaacctccaaaccaattccaacatgtctcaaatacttgtggagcatctgctcttcctcctagaatacactttaatatccagagagattaagacctcacgcactttagccattttcctgggggacaggccttctaattagcactacatatcctaaattgaaagttcatttttgaaaaatcagacattatatgcctgttctagggctgcatgatatgtttctgattatctcagttcatatcagtgtattgtttcttattttaataggtctcttacgatataatatgtttggtttctgtatattaatactttatggtgccatgtccatatagagtgtatttgtgtgtttttcctataatacttcacagtgctttttccatatcctagatcttttggtattgtcatatcagtgtctttgcattatgttgtgttggatcttatgctgcatgcttgcctcaaataacttatgactggctgatggtcagttagccattatgaaaactgcttctttagttttgatttctactgttaattattaagtctcttcttgttttatatcttaatatttgtagtaaattgatggaatgcactcaggataattgcttagcattgagtgttcattatgtcgtgatagtatgtaggatggttccttggggaataattaaggtgaatcagttggaattatttttgcatattgatcattgaagaaatataatggcaagtgtcggtcagcatttatgactatctgttttatggataaagcctggtgctcattcaaaaatttcagtggggttaatttcttggtaataccacatgattgccattggtgagtttaggaggcctagggcttgtgtttcatattctttttaacatcagtttccatttgcagggatctggtatc

SEQ ID NO: 11129 - DNA, 1113 bp, Vitis vinifera
  Intron number 2 from transcript GSVIVT01010209001 (locus G SVIVG01010209001) derived from phytozome v7.0 (chr-ID chr1 ; pos 17503881 to 17504993)
gtttccctggtagccagccgttccaatctagcacagtaagggttatattcttgagaaatgagactatatcaggttaatcatggtcactgcctaaaaaaaacatgtctagtgttttgggcactttgagaaaggtgaataccatttggtgctattcttcccagatctctgaagttatatgttcacctgggagactattatggccatctaacatattacaatattttgtatgatttagaagtgctggaagccttaaaagatgaaaatttttatgaacctgttgttcacagttgatttgtatttagctttctaggtggaacctacaaatgttggttatatttttcatgtgcacgacacaaactagttttttgctgattttttactctcacaggttacgctgatgaactggggaattgtaattagttatgggcttatgttaagcttaggtccagtaggaccttcctaatggtgggttatacccaatcatatgctcaatatgcactaatgtttcaatggttcatcatcaaacttacttaataaactatctttcttttactcctgttggcttccatgtttctgatctgttgcttagtcacttcgattagaaatgtttttcattcagagattctgatatgtgccaatgtctcatcacgaccaacaagagattgagatgtactgaaataggcttgttcccttattaataacttttggactgtcactccatgggagatttgaacatgctaaatgaactgatttacatgcctaacaactggtttccattctctttttggcttggcacctgatgccaagatttaactaaagaatttttggtgcattccttttcgatgactagggatttttttttttttttttagtttcttgtattttatttttaactcacctgtcttctggttctcgggcatcagtaattgtctcctgaggatggcaggtctgaatccctgaatttgatggcattatgaagtgagagcaatttgattgaactgattgtttctttaatttctatggttacatgctagctggattacttacttttttgagatcttttctttgtcaattccagtctattgcttctggtccaagaggacccacaccaaa

SEQ ID NO: 11130 - DNA, 3790 bp, Vitis vinifera
  Intron number 4 from transcript GSVIVT01026955001 (locus G SVIVG01026955001) derived from phytozome v7.0 (chr-ID chr1 5; pos 19052431 to 19056220 reverse strand)
gaaagatagtgactctcaatctgattgggactcaggtatggcttaagtttctcaacttctgttctaatttagatataagtgctgatattttgacatatgaatcatttttctcttcatgggtgctacaagtgttgttgattatatatactatttttttatcctgaaaataacttatcacccacttacttgaagatgtaatgtcatcaaactgattgactaatccaatgcacagaatggatacttacacactatgaaatttggtttgctttaatggtatctggtcaccctggtgaaaatggactcaattagagctagacacctggacatgcaacatctttcaacaaatctctttgcccccatacttatacaaaaatcacttctggccacattgctgtacctcataataaggtgaaaatgagaataaaaactgtctgaacttgggagttggagcaatgacctcggtgatgataccacatcaccagacaaatttgacatggattagggaaaaaagtaaaggacaagggcccttgctagcaacaaactagaaaatgaagggaggagttacaatatctaaggtttttgatagcaaagtcagaacaattaaggaagaaaaagctgtttgaatcggaaatttgaataaaggagagaaggtggcttcctaacaaagagagggagaattgggcttgttggagaaatttttttttaaaaattaagggaatgaggtttctttgataagatatatgcatgtatatatataagttacacataaaaacaaacttgaacactttctctgaatttttctatgttttctaatgccctccaatctctcccagcaaattgttctaaacaaatgagcagccaacctggctatcttacacataaacaaactagaacacttgctcctaatttttctatgttttctaatgccctctaatctctcccagcaaatttttcaaaacaaacgagcagccaacttggctatcttttttcctcttctcatcgtagaacccattccaacttaacaacatcagtcttgttgcagagtggatcacccattctatcccaaacatggaagactaactaccacaatattcttgttgagatgcaatctaaggaatgtcacccattgattcttctcttttacacatgtaatatctattccccaagacacctctcattttctgccgatccaaggtcaatattcttccctatgttgcttcctgtgcaaataaaccccctctctcctcagcgctctttagattctctctacttgcttttgaagtttttgtagaaaggcctctaccatctctaactaccaactatggaattgttttgaaaagcaagggttttggtgttctctctccccaacctgctcccatgcttcgtctactcacaaatcttttgaactagctatgacaaataggcaaagagcttctcaagtgtgagtcactgcaccatctattcatccaaaactttactcttctctcatcccttacaataaagtaaactctattaaaaacctaccatttgcattttgctcctaattatcttcctcaatcctactttgagaccttccttttcttctccccctagaacaccaactttcccattcttcccaaaacttcccaataataacccacttttatctagactctttttctgaggcatatctctaaatccacttgcttaaaagagtagtataagaggttccgtgtatcaacccctcttttttcttcctagaaagattttgtattatgactacgttcccttttgttaggcatttttacctgcatatacctacatacaaatgtatattacaattcgcctagaaagcagtattttagaattttaatgatttgattgtcagattgatgaataaagtatagatgtttttccgtcatatatagtcttttttttttcttttcatttttttatatggagggggatgatagggaaattgggaagttaaaattttaatcatgttacagaaacatgcacgcacacattattatatacttgtggggatgacaggaaacttgggaagttagaattttaaacatggcagataaacatacccatattagtatatataagatatgtattttagtatacttgtaccatggttttgagcgcttggcacacctaaggcacaaaagtctcataagacttagcaaagtgagatgtaacttagggtgtatgtcaatttaataaaatatgatccaaaattcaatccaaacaacaaaaaataaaaaataaaaaagatttcaagtatttaagagaagcatccagcaaaaaaatcgcttaagaagttgttaaaggtttgctgaaagtggaacaagcctacaaacagttctggatggttacacacattggatctactcttcccaaaaaaagtggcagaggtttctggaatttgcatataggtccttaatcttctgaaatttaaacatcaattatttaccatattgtctagaaccttttgttagtgttatttctaatcaaactcaatctggataaatgttttacaaattgatctttacttgggggaaataaatatctttacttgtttttttaacacaccaacacatgtgccatatctacataacctaaaatttggtggattaacaaatctaatacctggatgtaccctggcacacagcacttgtttcccaatacctgtgacttaagcagctgaccctccaaagaaatttccaagagaggctttttcaactattaggctgcagtttcacagaggcaattgttctttagattctccatggttgatggcttggagcagcatatggcatactcacattacaaaagcaaaatctacaagaaacagaagtgttatcaaggtttctagtcaccaccctttcaatgcaaaacaaatagtatgtaatgtgagtatgccatatgctgctccaagccatcaaccatggagcatctaaagaacaaatagattagcttttagggagggttctttagcagtatagaaactcaaaaattcttttgtatgtaacttgtggagttgggctagattgtatattggagaggagtcctcttcacttataggttttttggagtggttggcatccacttaagggctggtgaggttttttgtttcaaaacttgctcttagaggtttaggctaccttatatacatcctgtatgttttgtggctgtttgccttttgataatatacttcatgtttatttatcaaaaaaaaagaaaaaaagaatgggattctattgtgaatgctaacaacattgtttccacttgggaaaccttaatgactagtggattcacccatcatgtgctctaatataacctatcaaaaaaaatcatttgctctaatatgcacatagcatggtagcaatcatgcatctttaaaagctattgagttaactactttctattgaagaattgattcatctttctgtggttttatgattttccaatagtaatctatccatgctttgcttcgtaatttctggatgctctgtcatgtttgctcagttctgtgactttgccattaaatattatatcctgttttgctgaaatcatgccaaattttggttttatcacttactgatgtatacatttgggctcctttttgttaggtgctttttatacactcttctttacctatcaaaaaatgaaaaaaaaaaaaaaggaaaagaaaagaaaaatgatgtatatattcaatatcaaaattttgtttttttactcattctatgatttctgttattatgcagattctggaaggcgatttggtaaccagtctcgtagg

SEQ ID NO: 11131 - DNA, 1333 bp, Vitis vinifera
  Intron number 2 from transcript GSVIVT01023548001 (locus G SVIVG01023548001) derived from phytozome v7.0 (chr-ID chr1 4; pos 9835083 to 9836415 reverse strand)
aaagggtcagtttatctctcagaatccttctctttttaattcttatgattttaattttccttttaacattgttatcaatcaaattattggaggaaaataaagaaaatttagattgagctggttcttgtttctctctcttttttttttccacctaaatttaacttaactattaataatagagtttaatataattaaatgtttaatttatttgtttttatacaggtttgaatgttggacgtagaatgtagttcgtatatcttaaaatatttatgaaattaattatgatatttcttctaactctaatttgaaaaaattatattcaaatatcctaaaatatttgaattattaatattataaaagttttataataattaattatatgattattatgaacatttgtattggaataataaaaatgatttctaattatacttgattagtaaaaaactgttagaaaattttctaagttaacacttctatatagtgtacatatctttggataatgggtttataattgaagtatatgtttgattattgaaatcaattcattaacttttatatttttaatttgggaaagaatatcaaattctattttttgaattacaaaactcattgaattatttactctaatgaatatttagatgaatgtgaataacgttttgggtttttttaattaaaaaatttatattagaattagtggtagtttatttttattttgttgtgtgataaatgtatagaattttagtttgatttagaatttcatggatttattttttattaatttattatgtagataaaggaattttttatagacaaataaaaattatttaagtcatattttttttatgataattttttgtaatttataatgaattcattctcatccaaattacacggtggtggtttaattttttttaagacaattagataagaatcaatcaaaatatttaaggcttaaagtaatttgttttaacaattaaataaaaaattggagaaaaaaaaaaccaaacaaacgagtcttttggaacatttcaaatgtataatagttgtattaaaatgaattccacgagaactctgctatttcttgactgattttttccttacaaattcttacagttttaaacgatgaaattcaacttgtttaagcatgtacattttcctccacccttctttaagatgcagtttattgtgtttttcttttgaggtccctaattctagctggttctagacatggataattttctttttttagttctttaaaatatataaataacaaaatggtgggatgaactctgcaggttgcatttcctagcttgaagttcttaatcatctc

SEQ ID NO: 11132 - DNA, 1227 bp, Vitis vinifera
  Intron number 1 from transcript GSVIVT01013373001 (locus G SVIVG01013373001) derived from phytozome v7.0 (chr-ID chr1 8; pos 874350 to 875576)
gtttagggtttcgcgtgcggatttcgctgttccaggcaaggatttgtttcttctctagttcgatctcaagtttaactacgttgagaagtgaatttgcggtgaatcttggtgctggtttttgtgagtttatttgaggaataggaggcattgcaagtgtcgaagttacagtcgatctctcgtctaattttattgaggaagtgaatttgcgatgaatcttggtgatacgatcttgtttttttagtttgtcagaattcaggaaggatacttagcaactttctttctgtttttttttttatttaaaaaaacttagtttgtttctttgaaagttttggaggattttcggatgattttggttttgaatttcaacaggagagaagatgaaaaagaaagaaaaagacagttgaatcggttttagcaaaattcttccttgaaaattgaagttacgattcttaagtatttatttttttgaagttatgattcttggtaggtgttcaggttcttgtgtttttaatttttcaatcttggtcgtagttttttttttcttttttttttctgagttattcaggtgtagggaatcagaagctttgcggggaactttttttttttcccctttcttttttaatttgtttcttgaagttaggagcattggtagttgattttggttttgaatttcagtagcgtcagagaagaagaaagaagagagttgaatttatctttcttgtatttgctttattttcgaagtgacaaatattggtcgatgagcggagagaaaatcaaagaaagaggattgaccggagtctttcttgcattttctttattttttgaagttatggttcttggtttcttaattattgaagtttcattatcacttttcttctttaaatctagatgcatggaaaggaaaaggaaagaaagaaaagaattactttagcaaatggggagataaaataaaaggaaagaaaagcaaaaaaggtggaatgtattatttttaattctccagaataaaaaattacaaaaaatgattttcgattttattttcctcagatttatgagtggctgcagagagtcatagattacattatcttggttgaattttggtataatctatcatttgaaatcagaaagaagggtattcttctaatttggaaagaggatgcatcgctttctactgaatttgcatttttctgtgcaggtattgtttcttgtatttataataagtgcagagag

SEQ ID NO: 11133 - DNA, 4884 bp, Vitis vinifera
  Intron number 4 from transcript GSVIVT01013548001 (locus G SVIVG01013548001) derived from phytozome v7.0 (chr-ID chr5 ; pos 20543771 to 20548654)
tgcatcaggcacgggacatttggaactcttggcaggttagtgttgactacggtatggaatttttacttgcatttatgatcacaacaacatgcagtttctttttggtgttttattatgtaatgcttttccaattgctgctttgtcttctcacttgtttgaatgtgtatggttgtatttataacatgatattttatctatatgataaagatgaaaatgtcaatatcgattggaaatactggtggttcgatgtcattggaaatatcaagaaaatatcaatattgatatcagtaaaaatgaaagaaattacagaaattgatctcaaaacatggaaactttgaaactttcaacaatgataacataaacaataatgcacaaattaaactagtgtttttaatagaataagatatgtatgataaaattagtgttaatggtcaataatataatatgtgctgaaaacaagtaagaatttgaaagtgaatactaaaaactaatgtggtgacaacatattacatataatataaaaatgatgacttatgtggttcccattggaaaaaaaaagggagctggaattttttttatgatgaagaaatttgagggagaaaaaatactacttttttttttttgatctctactttcgaactgattcttgcattgatatttatgcatgaatggttgaggtcattttccttagaaagtgaaatctatccttgattttaggagaaagtttctcataaaatcaggagaaaattagaataggaaacaactatatcacagctgtaccttccagatttttacaaatgatcataatgaaaaatgttgatactttccaaatatcgtcaaaatattaggatatatcagtgataatttgacggatcaagtcttagattttccttattttgattgtattgatattttgaagaaattgtggtgatattttgaggaatttttgcacattaccttttacctcgctctttctgtatcgacaccccaaattgctgatattttggtggaaatatcagtgatattgttgattctttcattattgttgtatgatgagaaacttgtgaaaatttattgtggcaataacactaataatgcttttataattaagtcggctaattagagagttccaatttgtatatttcttgaaccttaatgttttgcaaccttggttagataccctactcatttacacataactgtaattttttttttcaatatatttggaccaaagggccaaaatttattccaaaccgctatagtttttgactttacattggaggcttagttgccggcttgactaaagtggcaagggattagaatggggatgtggaagattctgggtttagttcccaacaagagaaaaaaatgtttcctaccataaaaagaggatggaggcttagtttttaaatcagtgaggacatgggactaatttctattaaggaaaaggagactaatatctatgtttgctgagaactcggaatcaaatcaggccatacaacctggaggagtttactgttaaagataagaagtcgaacttggtggaatagcctaaaattcttggattaattaggttgatttgttcctatatttagattgttttgaaatttttacagttattttcccattttttcttcctagtttttagccttgatcctagcgttactcatgtctatatttagcagcaaccatgtagacaattcatcgagtcaaattaatagatttttttttttttccatcctttccctcatggtattagactctttttttttattttttttgggtttagggattttcttaagtgaccctcattgctagtgttgctagaggacaatattcaaagatatgtctaaggcaaaggaagtccccataggacaagtttctgattctacagaaagtcctgttatacatattacaactcgtgtctcaatgggcaaaattttctgcgttggacataaccagtaaggttctttaacaaagatcaaggcaagatgagatatttggatggctcaaagaaggctctaagtgtgactgatcctgattatgctctttaggatgctattaatattgcattttcagttatggacaacgactcaatcttatttgatctaaaacataaggctcctgaaatcaagtaaggagaccagggactgatgactcatttcaatgcaatgaattgcctttggcaggagatggatctttattaagatcttgactggaataatgttgaggataagatcaatgaattcaacttggcatgatagtatttttgagtcaaatgagtttggtaggtgctacattgatgaagaaattgtaaattttacccatctttgttgcttccttgccaaatgatattgatctaatcattctggcttagatgatggaaggcgaagtttgggaaagtggagtgtgccttgggaatgaagtctcacataaatacatagaggatatttatgattggacaagctgcataaaagtcgcaagtgttggtttgataaaaggactagggtatgtagatgagtcctagtggtggcaatcggttatgttgtgtcagatttgtgttgtgttgaggtaagaaatagtgaaaatttactcaatccgaatatgactcgattaataatcatgtcaaaatgacttggcatgaacatgcttcatttaatgcatttaataaatgggttgagttggattgtatatgaattgacacaaataacttgttaatatgattctaactcattaaattctttaacatgattctaactgttaaacctgttcatatgattctaatccattaaacttaaattaaaatttacttttacacttatttattattattttttaatgttttaattatataataatttaaatctttataatgaaatgtataaaattttatttagttagttatttaatttttttaactatatgatatttctaattaaaaatatgtatttaatttttaaatatataaaattaataaatttatataagttaaatgggttataaataggttgggtttaaatgggtcattttgacatgattaaataaatgggttaaacaagtcataaatgtattgtactataaaggagtcataaatgggttgtgccataaataggtcattttgatatgattaagtaaacaggttgagttgtcaaacctaaacacaacccatttattaattgagttgacgcgaacatgattacacctaactcggacttgctaaaatttgtatcattttcgagtcatgttgtcatgtaatgttaaagttgctactttaagtcttccactgttagttgtggtaaaataaaatttttaaggctagtgatatcatctccatcttagaaacaccttctagggcattattcatgcactcattcttataagaagggtcattctagttgtaagcatgatatgggtatgactccaatgctctaggtgattaaattcccaatgttaggaagagtaaaagctctaagaaggtttctgtagctctaactcaagctaaattttggattagtattcaaggttcacatgaacctcatattggcacttcatactttgtcttcaacgtcaagttttagtttttgaaacaacgtttgttaggatttttcatcctcaaagttgtagtattgtcatttccctacaacatacagttgtaatttgaattcctagtttgtccaatacatccaatcggtctaaaatgaagcttgatgaggttatagtcataatgcattttgaacatttatgcaattgcaagtagtcttctaccgcatattagagatggtaagatacctttgaatcaagtccaacttaggaaaaccaaatatggttcttgttattcttacaaattgttttgttgtactaaaactaagtctttaccaatagcagggctaaagcataggataattgctattgatcgatctacagtgttgttcagttgattgacatagatatttccatttggattgatcaactaagatggaaaattgcaattaaatcaattgggaggttgatcaaacaattgcatagtctggcctgtttggagaactcctttattccaagttctcctttcagagatctagcctgattgtgtagctttgtccagaatcacaaaatccagatgattgcttttctactgattctctggcattaaattgagaaaaacatctagagaatctttttataaaaaattcatccttttgactgaacttagtcaaattgatttttgaaaccacaatcttaagaccttgaccttatatgtattatacatgactcgtcaagagttattggattctatggagttttagatttgtgtaggagatctactaaaaggcaaactaggagagcagtatcatgtggattcacaggtttgcagtaagaatttggaaagattaaatgctgatgatcatggattggttcctatggacagatttccagctgattagattgggtaagagtgttccatggttttcccctaaatacatggaatttggggtttccaagtaatttttttttgcttttgttccttatttatacttttgaatattgctgtattttgggcttgattgcatgaataggagtattataattgggaactgatttgagctctgattgaattaaagaaacctgatggtttcaactgagacctattaagccccctttcctgatatgacttgttcatattagtgtttctttgaaatagctttgaaaacaatgataagatataaacattagtgcttttcacttttccctatgtattgttagttaaattattgattttaaattacttattctcagtttcattttttcctgacattattgtgcataagactggaaatcattatctgttcaggattagctttattgaagacacaaagccaactccct

SEQ ID NO: 11134 - DNA, 7823 bp, Vitis vinifera
  Intron number 8 from transcript GSVIVT01014679001 (locus G SVIVG01014679001) derived from phytozome v7.0 (chr-ID chr1 9; pos 8505543 to 8513365 reverse strand)
ataaaacgtgggccatatttacctctccaggaaaagtatgtagttgacttcttactatcttcttcctcctgatgatgttagccatttaaagtgtctgtaacttgattgaggttgtgtggaatgttctctttcctggctatttgtttttttaatctatgatgtcacacacatttctattacatatgatgttctgcagaaagaatttgatcatcactatgaacttttttcattcttatgaatactttgattgaagctattttagaatgaagattaaacttaaacctgtaaacatacagatacaagtgtaatggaatcggagacaccagattcctgattccatagatttgacatctcaaaattttattttttaaatctttatgtgccttctacgagggatttggaaggtagatacaagtcatctctgttcatgcttgttgggtaaggaatgagtcaagcataaagaacagtcagataaagtgctgagggaagcttagaaatctaggggaatgcttgattcagttatgccaagttgtcaaccatgaagaaagagactgggtgttttggggctcaatattttaaaactttacattgattatgtttttcttggaacaggtttgataatagaactgtttagtgaaaattatgacgaggaagagcagataatctttgtgtagtgattgtgaagccgagcaaggatattaaagtcctgtttggattgacctttttgaagcaaaagatcttatttaagctccataagttatgggaatgagccctccaagatttactcaggaaaggaatagaagagggtaaagaaatcttaagttacccccatgaagggtatttgggtaattttgcagatttatagttttttaaagtcataatgaataatagttggctatttgagtcttattttgaatagaaagttctatttagaaatttcttattgtacaagttcctatacttttgaacatttcattttgtaaaagcttttatttctaggaagctgtaaatttttttaaaaatgtgtctaatttctaaaatcttttaaaataaggctttgattttctaaaagtatctatttctaaactttatctattttgtaaaaatctttctttcttttttctttttttttttttttcagttaaggtttctagtttcttgtaatccaattatttggaaggttttagagttctatcaaagaatttaagtattataatatgttttttttttttctatattttgtttagtattttgagttttctaaagtctatagctaagattactagatgtaaccatgagaggaatgataattattactttggtatatgttgttggtccaatttctaacagcataaacttttataagagttggtaggttaacatagtattagatttatctttaactggaggtcttaactagaggtcttgagttcaaatctctcatttcaccttctcttcttcttctctcacagagttggtgcaatccaaaagatcaccaaatagggtaatggctatagatgtgcatttatactttgccaattatgggaaaaaactgcaattaccattttgatcttctaacttctgaaaattgatgaagatatccctcaaggtgctacctgatcaaattctagggacttctagatttattataaatgcttacctcataagtgttcacctcactcaagcactaaagctaaaattgccacatcaacctttagtcaatataaagaagtagaaatcaagtgctgtgacaaacaattcagcaaccaatctattggagaatgcatgagtatttatataaggtttgctatcttaaaatagtgataataataattaaataaaataaaattttagattcaagctatcaatctcagctctctttcttcttccttttgtatctgctttctctcttgtgaaacatcacaacaactactggtcaaaggatatgatgggtccttttgtttttcacaattaataggagggtttagaaaggaagaagtatttagtgttctggagaaggtcgagtgaggcttggagttctagaatctttcaggaaaagttgagaaaggaagagatgcggaatgtactccacttctattcctccttgtgggcctctagtaccattacctttagaggcgttctactcaatgttactcaacttagttgacttttggtttgtaattcaaatgggtggataacaatgacaggatttgagtccacttttggggagatgttacctttgtttatgcttaagtggcctatacctttgtgtatagttctccttgtatagtggaggtgtttagtcttactttgattagtattctgtatttatggggagaaccatctcatccttctcttgtacttttttcataattaatatatcttttgtttccgataaaaaaaaaaaagagtgaggcttggggtgggtttatggaaagcaataaggagaggttggaagtgtggatctatctattgaatagatttgggaggtagcagtgatgtagaatctggaggataggatgattgagggtgttccaaggatggggaattatctgtgaaatcattttactgattccttgacccaactagtagggagttccttgccaaagcgatttagggttcacaaaagtgggcttctttgcttgggaagctgtttagcgaacaattttaacagtgagtgaggaagaatttaaccaacaacattcattatagtctagcttgtaatctgtagcacctctttctgtatttgttcagcctttcttgggtattcttcattgattaaagaggttttgttaaggtgacatggaagttttgttgaaaaatgcccacgaaagtttggaggacaactccattatgcttgtttttaacaatgtgaaaggagtgaaattgtagaatgtttcaacacttggaatagtgggttgaatctttaacagagtttttctttgttctcttttcttgtggtctagtaagccttaggatgtgggatctttgtctttgttgctccttgtttgtttgtccatgttagtgtttaggagattgttaagttgtttctcctgtggcactctttgtattctcctagtgcacatggattgcaccctcctttgttaagctccttttcttataaacctttcttttgtatctaaaagaaaaaagaggagtgggggaggaaggaaagaaaaatagttactatgaattctccagtcaaacacttaaatgatttgtcatatttgaagttgatctacatttgcttgtttgtgattgcagtttctattgtagtagctcaagaatgcctcttccatttttggaatgtggaaactcatgattctcttatagtttttaatgattctttttagttcatatagttttgttcgcattttgtaaaacttgtttctcggtcattgataagattttaagatatgcatacatccaattgtgtgctaatgatctgaatgaaggtttatttgtttgagtggagtatggacccaaaaaaaaattgtttaggacaatgtcaaaggataaaatatgagtgtacacaatgtttctcattgtcctaaaattttgtgaacttccatttattccacaagtcaatcttaggtgactttctactgaagttgactttaaaactttctatcagtttgatagagttttagtttttaaacttttgtaaaattgttggaattaattggttacatatttgtttagaatatgggactaatcaaatatggaaaactctactcaaaacccacaagtgtttcttagaggatggaaggtttagagtggtcacccatttttggagagagtgtcgcttagctaaaccgtcccttccctaaataggaggtgcacttggctattttcctaccgaacaaggagaaggcccttgaccttgatggttctactattgtggtgtatcaaaagtgttgggatgtgataaaagaggacttgttgagagtgttttcagagttccatagtaatgggataataaatcaaagcaccaatgccatttttattgcccttaggcaaaaaaaagtcaaacaaccaaactttcagattttggacttattagcttggttacaagtttatagctaaggtcttattagggcatttaagaagtgtttaatgaaacaatctttctatctcaaggagccttcttgaggggagacaaattttggatgcagttttgataaccaattaagtggtggatgagaaaaggaggtcgggggagggaggggtggtcttcaaattgattttgaaaaggcttatgaccatgtgcttgaaaagaaaggttttagcataaaatgaagatcttgggtaaggggatgcttgtcttcaacaagttgtgtagtcctagttaatggaaatgccaaaggttgggttaaagccattagaggattaagataaggagatcctctttctcctttcctttttaccattgtaatggatgttcttaataggatgatgactagagaggaggaaagtggtttatttgagggattcatagttggtagggacaatttttctatcaatatatccctttgttttttcctatcaaaaaaaaaaaaaaaaaaaaaaagttggtagggacaagactagagtatctattttacaatttgcagatgacaccattttcttctctaaagcttctccggaaattttgcataaccataaattaatccttttggtttttgggcaattatcaaggttgaaaatcaatttagggtagaacattttttccgctattaatgtaagccaagtgttgatatctaggttggctacgacacttgactggaaagtttcagagtgaccattgtcttatttgggtcttcctttaataggaaatccaaagacaatgagattttggggccctatggttgatagagtcttgaggaggttggatgagtgcaaatgacacaattttgttctctaaagcttcttcgaaaattctgtaaaaccttaaactaatctttttggtttttgagcaattatcaaggttgaaaatcaatttagagaaaaacattctttctagtattaatgtaagccaagagttgatatccaggttggctacgacacttgactgtaaagtttcagagtgaccactgtcttatttgggtcttcctttaatagggaatccaaagacaatgagattttgggatcttgtggttgatagtcttaaggaggttggatgtgtggaaaaagtcctttttgtctttggggggaaggataacattaattttgtcttgtttgtcttacattcgtagttatttcctttctcttttcatgattccaacttcaattgtcttaaaaattaagaaaatgcaaagggatttcctttggttaaggtctggggagggaaataaagatcatcttatcaagtgggatgtagtgtgtagaccaaaggagtttggaggtttgtggattgggaagacttccttgagaaatcgtgctctcttagggaaatgaatgtggaggttctctaaggaaaattgtggtattagacattaggttattttgagtatttatgggacacatcctaatggatgagacgccaacgtttcggttagatggtcacacagatgtccttggaaggttgttgcacaagtttttcagaacgtttccctacacccccctctttgtggtgggaaatggggagagaatccaattttaagaagatttatggtggggagatcaaccttggtgttcacaatttttaggtctttataaagttatctcagtgagaaatctcatcatttcagttgtccttggtaattcctatccacattcttgtaattttaactttcgacataatcttattgatttagaaattgtacttctcaaaagactcatgtcttcactttctacagcgcacttgtctctttctactgcaaactcaagagcttggacatgttctccctttggtttattctcagtaaaatcttttttcacggtgttgtccaagtccttaaatccaatctcataccttctgtctaattttgtttggaaatcaaaagccccttcaaaggtcaaggcctttacttggttagtagtgcacagagataaaaatatcagtaaacacaaatatatcagtacttggattttactgatatatcgaacatatcggtaaaatcttgtagatattataacaaaaatatcgatggaacagaaattgtttaaaattcatggaaatgcttggaaaaactttaaaaaaataataaaataagcaaaatacatatatcaaggttattttgtaagtgtaattgacataggtttgatcaaagataatatttatcaattttttttatagaaaaaattagcttaaattcctttgatatatttatatttatttattttaaaaattaaaaactacttttattaaaacatgttcgactacattttaaataaaaaattaaatcgattcatataaaatattttatttgagatttaatttctaaaattttattacaaatttgtggtgatagttttttgctattaacattaatttatttaaataattaaaattgttaaaaattatattagtaatttatcttatcaaattaattttaatttataaaacattagaacttcattaatttttttttaattttatattttagcaatttttgaataaattcatatttttaatatttcaaaataaaaatatttagaattaaataaaattaaaaggataaatataaaaaaaatttaaaagtgaagtgatagtaattttataaaataggattaatgagataaatatgaaaaataattaaaaataaaaggataatataaaatgaaagtgtaatataaatttaaaaaaaagataaattagaaaaaaataattaaaaaaataaaaaatacggataaatattaaaaaaatgacatattttgaaaattcttcgatttatcggtgattttttcacctcattggcatgtgttcccccaacacaaaaaaattggcgatttttatgtgttttcactgattttttgtgtaatcgacaatcggtaactgattttgtttcgaaccttcctgatatctaatatttcgtcgatattttggtgaaatttcccaacattttcgtccataatggtgcacaagaaggtaaatatcaattacatgctataggtgagaagaccttgcaaatctttaagtcttcattggtgcattctttgcaaagggagtggagagtcagttgaccacattttcttacagtgcccaataacgttggggctttggcataagctcttcatggtggcgaatatggattgggttccccctaagagtattggaaatatgatggttatctcatttagagggttgaggaattcaattagagacaaaacactttggcatattgcttacctcactgtactgtggattgtgtggaaagagcaaaatgctaggatttttgcggataaatacagaatagaagggatgttgtgggatcttcttcacttctactcctccttttgggcctattgtattgttgcctatagaggaatctaatttaatgttcttcaactcagttggacatcagtttgtaatttgaaaggggtggataatgtttgagagagtttgaatttggtttcttgtgatattttatacatgtcttcatttgtagttatcgttgtatagtggaggagtatagtcttactttgatcaggttctgtattttgtgggaatgacctctcatcgttatcttgaacttcactattatcaatatcgatttcgccatatttgttctgaccatagatgatttgaagttggagtttaatactttgatccacagcacagatgcatgcccttgcactgaatattgtaaaattttgcagat

SEQ ID NO: 11135 - DNA, 3473 bp, Vitis vinifera
  Intron number 8 from transcript GSVIVT01005320001 (locus G SVIVG01005320001) derived from phytozome v7.0 (chr-ID chrU n; pos 20708663 to 20712135)
gcattgtacaacaattaaaaagctacaatttcctctttggagaattcaaagaatctgtcaactattagcttgacagaattattacattccttggaggctgcggaacaaagaagactcatgagacaaggagatattgtataaggagcatttcaagcaagaatgcagaaaaatgcatgccataaaaatggcaagatgaacagcaacaagccaagcaacaacaaccaaaaaatggagtttttctaccttgtcctcattgcaagaagacaaatcattctccacaaaaatgttagtggagaccagatgtgaaatgcaacaagtgtggtaaacaaggccatgtggagaggatttgcaaaaatcaacagtagaaagaaactagtgcaatagttgactactgttaggaggagtaattatttgcagtaacatgttttgctaataaaagtacctctaaaagctagaatgtggatagtggttatgcaaaccacatgacaaataatcaagatctctttagagaacttgataacacaactatttccaaagtcagaattggaaatggtgagtatattccaatgatgggcaaaggaacggttgctatcgaaagccaaacaggtttgaaactcatttttgatgttttgtttgtgtctgacattgaccaaaacttactcaatgttggacagctcgttgagaaaggatttaaagtttattttgaagataagaattgcattatcaaggatgctaaaggcaaagaggtgtttaacataaaaatgaagggcaagagttttgccttgaatttactggaagatgagcatgttgttgttttaaaacaagatagcacaacaatgttttggcacagaaggctcgggcactttcatcatgatgttgtgctctacatgaagaaaaatcaaatagttgaaggacttcctgacttagaaaaagatcttcttataagtgttacttgtcaatatgggaagcaaactaaactttcctttccaagaaaaacatcctggagagcaacccaaaaattgcaactggtgcatactgatgttggtggatctcaaaagacaccatccttgaaagggaatgcaggcatcattcaccagctcactgcgccatataatccacaacaaaatggagtagtggagaggaaaaacagaatgattttggagatgacaagatgccttctgcatgaaaaaaatctacctaaaaaattttaggctgaaactgcaagtacaacagtatatttgctgaacaatttgccaacaaaagcatgagagaagcaaacccctttcgaagtttggtttgagtttctatgtgcaagacttggagtttgcatctacaaagtcgaggagtgttgaattttgacttagtatctgctggaatttgaattttgaagttaaatattgcagttggagtcttgcacaaaatctacaacatccaaatattttcttgtttttatttggtcaatattgagtttctattttaatggaagtagttgttcatcatctagtagcttgattttctattattctaatgtcatttcagttacaagctcatgtataaattcagcacttttcatcaataaaatgtgttccagcaacccaaaatatatattttgcataagtgtttaaatcttagactaatagaaagactttaatcaagtccagctcacattgagcaagattttagttggaaaaaggtttttgctagttttggacgatgtgtggaacattaacaattatgaacaatggagccacttacaaatgccctttaagtcgggggctagaggaagtaaaattgtagtaacaacacgtcacgcaaatgttgcatcattgatgagagtagacaactaccaccatttgctcaatcctttatccaatgatgattgttggaatgtatttgtgaaacatgcatttgaaaataaaaatatcaatgaacatccaaatttgagattaatttatacaagaatcgttgagaaatgcaatggcttgcccttagcaacaaaggtgcttggtgggcttctgcactccaaaccacaagatctatggaacatgtattgagtagcaaaatttggaataggagtggtgttatcccaatgctaagattaagctatcaacatctcccttcacatctaaaaaaatgttttgcttattgtgcattgtttccaatatactatgaatttcagcaaaaagagctaattttattgtggatggcagatggtttaattcaccatgcagaagaagataaccatcaaatggaagatttaggtgttgattatttcaatgaattgttatcaagatgttttttccaaccaccaagtaatagtaaattacgatttattatgcatgacttgataaatgatttagctcaaaatgttgctacagaaatatgttttaatttagagaatatacataaaatctctaaaaaaaactcatcatttttcatccatgcataatgagtatgatgtgttcaaaaaatttgaaatctttaataaatcggagcaattacgaacatttgttgcattcaccgtagatgataagaagaaatgttacttaagtactaaggtgcttcatggcttgttgccaaagttgatacatttgagagtgctctctttgagtggttatgaaataaatgagttaccaaattcaattcgtgatttgaagcatttaagatatcttaatttgtctcacactaaacttaaatggttgcctgaaccaatgagtggtctttacaatttacaatcgttaatattatgcaattgtatggaactcaataagttgcctatgggcatcacaaatttaatcaaacttcgacatcttgatattagtggttcaatgatgttggaagagatgcctccacaagttggcaacttgataaatttgcgaactttgtctaggttttttctaagtaaaggtaatgaatgggtcacaaataaaagaattgaagaacttgttgaatctccaaggagagcttgccattttagggttggagaatgttttggatccaagagatgtggtgtgtgtcaatttgaaggagagaccaaatattgaagacttaattatggtatggagtgaagattctggtaaaaaaatactgagatagaggtccttaagtggttgcaacctcatcaaagtttgaaaaaactggatattagattttatggtggctcaaaattcccgcattggataggacatccatccttctccaaaatagtttatttggaactcacaaattgtaaaaattgcacatcattgccaacacttgggggtttacctttcctcaaatacttggtgattgaaggaatgaatcaagttaaaagcataggtgatgggttctatggggatactgtgcacccttttcggtctttggaatctcgaagatttgagaatatgccagaatggaacaattggttagttcccaaattgggccatgaggaaactgaagcattgtttctttgccttcgtgagcttagaatcata

SEQ ID NO: 11136 - DNA, 14377 bp, Vitis vinifera
  Intron number 3 from transcript GSVIVT01022685001 (locus G SVIVG01022685001) derived from phytozome v7.0 (chr-ID chr2 ; pos 14951972 to 14966348)
tgtggaatattcaacatttcacaccttgctaagtggtaagagtgttcattgcaatggttgtgttaacttgcaagattatctctttggcattttcaaaaatttcctattttaggcggggtgaaatcattgtaactcttctaattcatggtatagcctatgaataaacatttaagagctcttggttccaatttacttcacccctaatcatgaatatgcacatatatgccacacacccaaatatttcttactctaaaaccattactaaggactagatactaaatggagcttttgatttacaccctcttccccttgcatccattttttttcttgaacaacctttgtctaccttgatacaaccatttgggtctaatccaattacctcagtcgtaacctcaatgagtgattttgtcctagtgtctatctttaatgttggtaagatctaatttcaaagatttggagtccccttgagttatccctagccaagaggggcatctcttttgatagcttaggatatagcagccctagtgagacattctataaatacaggtcaatttctggaaccaatttcctccttgttggaaggatttcacttagagggtctcacacacctcgtaaaatagcaagcttataatcagttttggcaactatgaacatcaagctagtcaaatacggtgagattgccatcccaaaggcaatagtagggtacgttctacggataaggtttatttcatcaagaagtataaaacttctcctggagtttttagtgattcttagtttttgatcttatagtttgttaagttgtggaacctaattttttaagggttattttaggtagtctacacatgtattagttttgctctaattttctcattatataagggattgttaggggggccctttttagtgtgagagtgtgtgaaaacaaaggagtagtattaggcgaagatcaccttgtatttttctttttaatcatagtggaaatattgtagcggcaaagtggacgtagctttcacattgagagtgagccactataaatcttgtgcatgctctatctattttatatttcttattgttattgctcttgtaaattggaattttcccctaacaagtggtagtagagcctgatttgagtgagaacaaaggattgagaagatggatctaagcctggaattggcatttcaatggtatggattttgcattttggagaatgcaaattaaagatgatctctatggtgaaaagctgcatctgtctcttttcgaacaaaaatcagaatcaatgcaagaagtcgattgggatctccttgatggacaagtgttgggagtcatcatattaacattggtaaagaacatggcacataacttggcgaaggataaaattatgaagggactaatggaggtcctgtctaacatgtatgagaagtcttctgcatataacaaggtatatctcatgaaaaaattatttaatttaaagatgggagaaggtgctgcaatggtagagcatttgaatgaatttaacaagattgtcaacctattgtcctcggttgaaatcaatttcaatgatgaagcttgtgtcttaattcttctagcctcactagcaaatagttgggagccttagtaattctataaggaactcaacattaaagttcaatgatgttgaggatcaaattcttactgaagaagcttgtaggaaagattcgaataaagcaacatcaaactctacccttaatattgggaccaagggtaggagttatgtaaggaattatactttggttcatggtagattgaattaaaaaatgcaaaaggcaaattcagatcttgacaaaatgtggaatactggaattgtggcaagcttggtcacataaagaagaattggagaaaattgaagaaggatgggaataaaaacgacacggccaatgttgtgaatgaggaggtacaagatgcattactcttatttgttgatagttttggtttttgggtgttagactcaagagtctcttttcatactactacacaccacaaaattacggataattgctagaaatatggaaaagtgtatctggatgatggagaacctttaaacattattggtgttggtgatgttcgattaaagatgtcaaataggtttgtgaggaaagtctagagggtaagacatttaccaaagttaatgcgtaacttcatctcaattaaacaacttgatgatgagggttataatgtgacatttactagtggtgcatggaaagtcactaagagagccatggttatcgctcgaggaaataaaattggaacatggtatatgacttttagttgcaagaatatagttgttgttgatggcaatgttaattcaaatttgtggcattgtaggcttagtcacatgaacaagaagggaatgaaagtatttgataaattgctgaatgaatattctcttatatctctagggtatttatataggatatataaggctattttatgatagccagctatacaaaataatcgataattatacataataaatcactactatttgataactatacaaatgcttgtacatagctgtaccgacagttggacacagatgtaccgatagttggacacaactgtactgacaactagactcagttgtaccgatagttgactttccccttgaagtaggtgcatagatattgcatatgccgaacttggataatgatgtataatatggaccattagtaacaacatgagtcctcatatccgccatctgatttgcactcttgatgtagggaacctttattatgccaaacactagtttatacttgatgtaattcctatcaagttcaatatgcttagtttgatcgtgttgtaccgagttatttgcaatctcaatagctatcgtgttatcacaaaaaagcaccataggtttcttgagaccaaacccaagcttgcttaagagaattcttagccaagtaagttttgtaatcgcatgatggagtgcacgatattcaacttttgcactaaacaatgaaaccacattttgtttcttactcctccaagtcaccaaattttttcctacaaatgtaaacgtgccctaaagtagactttctatccaatctagatccaacaaagttagagtctatgtaaccctcaatatctaaatgcacatgtttggagaacataatacctttgcttggagaggactttagagaggctaggatacgatttactacattcatgtgtcggtcacttggattatgcatgaattgacttgcaacactaactgcatttgacaagtcaagtctagtgtgggtcagatagattaatttccgtactagtctctgataattttctttattcgttggaatctgatcatggtagatggacaagttatgatttatcttaatgggaatatttacaggttcgcaagcagatttaccggtttcaaccaagagatctaatgtatacttcctttgtgagaggaagagtccttgcttggaccaagacacctcaatacccaagaagtatttttgagcacctaagtccttcatttcaaattccttctccagataagtttgaagcttctctatttttgtagagttactacctataataatcatgtcatcaatataaacaataagcaaagtaatatcatcaccatctctcttatagaatagactgtaatttgccatcgcttgtttgaaaccatactccttcatcgagtagcttaacttgccaaaccatgcccttggcaactactttaatccatacaaaacgtttttagtttgcataccttgcctccttttggtgggggggtccatgtacacctcctctaacatatcaccatggagaaagacattttttacatcaaactatcttaatggccagtcaagattgaccgtaagagagagtatgactctaacggtgttcatcttggccataggtgcaaaggtctcttggtagtcaattccataagtctaggtgtatcccttggcaaccagtctagctttgtacctgtcaattgtcccatttgctttgtactttactaaaaacacccacttacatcccactgtcttctttccttgagggagcttaaccatcttccaattagagttcttctggagagtcttcatttctgctaccatcgcagacttccacttaggatcttcaagtgcttcttgaaaatgactaggagttgacatagaggacaactgaagagcaaaagcaaggtgagtcttagatagacgatgataagagaaaaatcataaatgagatagacaatattagaaaatgattttgagaaaccgaacctattaggttctttacgatcacgaagaggacatctcctaccttgattaccaacttgtggatttaaggtagcaatgtctaatgttaaaggtgaagaaacttgtaccttaggattggtttcaaaagagtcttccgatggcatggtagtatcattaagtggagtattggtgtctggagggcgtatgacaatagaaactttgtccttccgtataaacttgttggaataatctagctggtctttcatcacttctttcctcagattcagactcaggtgcctcctccttacctaagttagttgaatcctccccctaacctgaaatccatacctttttttcttcttaccataacttttcctcttccttactactaatcttctcctgaagaggaaccaaagacacattccctgaaaaataagactcccttttgcaaaattgaacatccatggagacagtatttgcttgtaaggggatgaaagcatttatagcccttttaggaattagaataagtaagaaaatacatttaagagcacgaggatcaagcttgtccctttgatgagagtgtatatgagcataacataaccaaaaactttaggataaagattcaaagtagaaggaatagggtgaaaccgtgataacattcacaaaggagtttaataatcaatgacacgagcagacattcagttgatgagaatgataacagtcatgatagccttagcttagaaatgttttggaacatgcatagtaaagcataaagcttgggctacctcaagaatgtggctgtttttatgctttgctatgccgttctattgtggcctgtatgtacacgttgtttggtggaggattccattttctttgaaaaaatcaacaaaggactaattcacaaactcatgaccattgtcagagtgaaagaacttaacctgagtattaaattgtgtgacaaattttggaaaattgaagaatgacatgtagaacatcattcttagacttaagcagatatacccaactcaccctaatacagtcatcaataaaagacaaagtatttatgactcgaaacaagagaggaaaaaggaccctaaacactataaaaacatgggtaaaaggaatcaaacttttattgaggcttattttgaaaggcacacgatgattcttagcataaatgcattgttcacacctaaaactagaaactgaaatatttcaaaacaactgaggaaataaacgttccaaattagcaaaagatggttgacctaatcaataatgtcaaaaataatcttttctctatcaaacgcctctcttactacttgaaaaacacggttagattcaaattgtaattgtcttaccccctttaagtagtaaagatctcccatctccttaccaatgccaatcgtcattttcgtgagattgtcctgaaacacagtgagtagaattgaaggttatagaacaattaagatgtttggtaatcttgctaatagaaagaggactattagagagattaggggcaagtaagacaaaggacatggagagtgtgggggaaagtgagacattcccgactcctaaaattgacataggcgttccattagcaacctaaacagacttaacagatgagagcagtagagagtcaataaagaggaatgactagtcatatgatttggcccttgaatcaataacccaagtgttagaggcagtagaaataagggccaaaccagaattaccttcttaagaagataatcgagaaacttgagaagcagaagcaagaggaataacgttggcaacctgtgctgatttcttgttcttccttttagcttgcttaagattgtactactatggagaaccatgcttcttccagcaaacatctactgtatgtttggtgctatttcaatgagtgcagaagcgagaagaggagtcattaggagtaaaagatgttggttgtgtgctattctcatggatagccattcagaaaccttagagtgatcatctattcccatggtgacctgcctctgtgcttcacgatggactaatgaatacgtttcctctagacttggcaaaggagaggtggccaaaacacgaccactaacttgatccaaattgtgatcaagacttgtaagaaatacataaacccgatcctcaacagtacgcttcctttgtttcttaatatcaactacacacgtcatatcattggacctttgataatcaagctccatatatattgagtttaactcattgtagtattttgtaagaggacaaccaccttggtgtgattgaaaggatttcttcatcaattcatgtacttgagaagagtgaaagacatcaagatagcttctcttgactgcatcccaaacctctttagccgttccacattatagaaagtgtgacattagtttatcaatcatggaattgatgagccaagacttgactaaaacatcttcgaccttccattcatcatagtttggatcattctctacgggtgcaacctttgttcctgtgatataaccctttttctttttgccaacaatatgcatatccaaaatttgagaccaaacactataattagtaccgtccaacttaatagaaattgttggagaggtagtctcatgaatggtcaccatggatgaattgttgctataataaatacccacttctgtgtttgtagacaccatatggtaatgaagaaggtgaaaagaaggaagaagtgttgattaggtagcaatggaaattctcgacttttgctttgataccaacttgataaattgttgaatgaatattctcatatatttctaaggtatttatacaagatatagaagactattttaggataaccaactatacaaaataatcgacaactatacagaataaatcacaacaattcgataaccatacaaacggttgtacacaactgtacatcacaactgtaccgatagttggactcaattgtatcaacaactggactcagctgtaccaacaactggactcagctgtaccaacaactgactaaagtgcttttgtcaaagggaaaactaccaaggttgaaatatgttgagcattgcttatgtgaaggttgcatcatactgatgtgtggggaccttctcctattacatcccttggaggctccagttactatgtgacattcattgatgatttgagtagaaatgtatgaggttatttcttaaagaataaatttaacattttttatgccttcaaaaggtggaaattgagaaagagtcaaatttaaaggtgaagtggttatagtttgataatgagggagaatacattgatcaagaattcaaccaatattatgctaataataggatcaagatgaggcaatccattccaggaaaactcagcaaaatggtttggcaaaaatgatgaataagaccctcaatgaatgtgctaggagcatgagattgcatgcagagcttccaaagaacttttgggttgaagtagtttgcactgtagtgtatttgataaataggggacccttagcaccattgaagtgcagaatctcagaggaggtttgtaatggtagaaaggtaaacctttctttcttgaaagtgtttggttatgtttcttatattcatattgactttgttgttagaagtaaacttaacccaaaattcgtgaagtgtttttttattggttatggtgataccaagtttgtttatcacttatgggatgaccaaaattgcaagattattaggagtagggatgttatttttagtgaacaagtaatgtgcaaggacaggttgagcataaaatatgaaagcgtatgttctgaagttaaaaatccattaatagttgagtcgaaagattttctaatgaatgggttgtagaaaaatgattgagatgatcaacaaaaagtaactccagaggtggacccacatactcccatgattgaactcatgatatcttttaggaacatcaaacaactatagagatacaaccctaaattagactacattttgatgattgattggggtaaatcagaaagttatgaggaagtaatgcaagttgatgaatcagttgagtgggagctagcaataaaggatgagattgactctttattatctaatgagacatggcagctgactgagctaccaaaaactaagaaggcattgaataaaaaatatatttattaagtgaaagaacatgatgagagtaagcagtataaagcaagactggttataaaggagtttcaataaaaagaaggcattgaccatattgaaattttctctcagtgataaaattgaccacaatctgattggtgccttaactagtggcaaaagaacactcgcactagaacagttagacataaaaacaacctttcttcatggtgacttggaggaagaaatttatatgcaacaaccatagggttttgaagtacaaagcaaggagagaatggtgtgcaaactttaaaagagtttgtatagtctaaaacagacttgaagaaaatggtataagaaatttgaaaggtttatgagtaataactggttcttgtgttgtcaattagatccttgttgctatgtcaagaaatttgacaactcttttattatcttgttgttaaatgttgatgacatgctgttgtaggagcttgcatacaagaaattaataagcttgaagtggagttgtcaaaagagtttaagaaattagacttggatctgtaaggctatgttggtgttgctatggttggtaatagtgacaacaagaagagtactattgggtatgtatacatgattgaggcagaatatgttgctatgatagaagctaccaaggagttggtatggttatagaatttgttggagaagtgaggccaggaacatgaaaagaacattttgtattgtgatggtcagagctctattcatctagtaaagaatccagtttattatgctaagactaagtgtatacaagttcgatatcattacatacaaccagttttggaagatggaattttggttgttgaccctttttagggtgaggatgtgtgaaaatagaggagtggtattaggcctgagatcaccttgtatttttctctttgatcatagtgcaaattctgcagtggcaagggggatgtagttttcacattgagagcgaaccactataatcgtgtgtgttctatctattttctatttcttggatgttgttgctctcatgaataggcattttctcctaacatagttttctagcgtctaagtgttcacatgaagatcattaattggagtattagaaggttgaattcttgaaagtaaagaagagtggttaaggattgtcttagccatgaaaccccaaacattgtgatgcttcaagaaagaaaaaggaagacatgtgatagatggtttgtggttagtgtgtggaaagtcaaaataaagagttggtggttctttcggcttgtggatcatcgagaggggttgtgataatgtgggacttagatgagttcaattgtttagagatgacgttaaggtcttttttggtaacaattaagtttgtttcaaatgtggaggggactttttagctcaacttagtttatgttcctaataattccaatttgaggaaggatttttgaatggtgctttaagacttttttagactaaactttttgaaatagtgttggttgggggttggggggaggggggagggggtgggtggtttaatgccataagaagaatttcaaaaaagttaggtggctcaagattaacccctaacatgagggtttttttgatgaattcacaagagagtgaattaattgatccctcccttagcaacttgtctttcacttggtcaaacatgcaagatttacttgtttataagagataagataattttttatactgaaatgagtggaagcaaagtttcccttaaagcctctaagaagtgcttcccaggctagcttttaatcattagtcaatcatcctagactctaatccatttacgggaggtctagcttcactcaagtttgagaacatgttactttacttgactttaaaggaaggatttagtttttgggtcatgagtgctgggttttaggataggaatgtcacaaaggcgggaagaagctacaatttttcaaatctaaattgaaagaacaaaataagatgtctttttctatacatacttacattgtcataattgatgctagtgagtaggaagagattatggtttttgaactttaaataatgagggccttaaggaagggggaattggaggagttactattaaaggaagagattcattggaggtaaaagtcaagggtcaaatggataaaagaagaggattgaaaccaagtattttcataaggtggccaatgataagcgaaaaaggaaattcatgaagtccttgttgtttgaagaaggaataactctagacaatattgataacatttcggaagacatagtgcattcttttggaaagctatactacaagtccctaggtgattcttggaggttcgaaggattgacttggtctcccatattaacaatgctatttcttagttagacaaggaaaaggcctttaggcatgatggattcaccatagcaatgtttcaaaaatgttggactatgattaatgaggatttatgaagggtgtttttggagtttcacaataatgaggcaataaatcaaactaatgttacctttattgcttttgtaccaaaaatgagtcaagttaatagaatttaagatttcagacctattagcttagttactagtctgtacatgatcatagataagatttcattagggtgcatccaaagaatcctccacgaaaccatctatatttcttaaggagcttttgttgaggggagaccaattttggatgatgttttgattgctcatgaaatggtagatgacaaaatgtgtttagaagaggacgaggtagtcttcaaaattgattttcaatagacctatgatcatgcggattggggatttttggatcgcatactagagagaaaagtttgaacacaaaatagaggtcttggatgagggattgcttgtactccgtgagctttgcagtcctaaaaaatggaaagagaattctctgaggtttgggaaggtttctttaaggaatcatgctctcctagggtaatggctttggaggttctctggcacacatccgaatatggtcacatcaacgtccttgggttaccattgcataggtattcttggatttttctacatatacttactttatggtgggtgatggggtgaaaattcgtttttggggagatttgtggtggggaaaccaaccattgtgctcacaattttgaggtctttatgagttgtcattgttaaaaatctcatcacattagcgatccttggcaactcccatttttcttggaaccttaacttcctttgcaaccttattgatttggaaattgagaaccttgaagaactcatgtcctcactcacctttgtgcacttgtcttcatctatcccaaatgcgagagggttgtttttatcctatttaggcttattctcaacaaaatcattctttatggcttcatccatagatcagttctagtttcattctctccaaccaaatttttatggaaatttaaagtctcatcttaggttaaagcctttgcttggctagtaatgcacaagaaggtaaacaccaaggacatcctatagttgaaaagacctttcaaatcccttagtgcttataggtgcatctcatatatggggagtggagagtcgattacccatttctttctagattacctaataactttggggctatgacatagttgattcagacaagctagggtggattgggttttgcctaggcgtatatgaggcacaatgatcatttaatataggggttgtggggttccattaatgggaagaccctttggcaaatcgcttgttctcatattactttggattgtgtggtgagaaagaaatgtcagaatcgttgatgataagtggagaatgatatagatgttgtgggctttgcttcacttctattccactttctgagtctcttataccaacacctttaatgacattcctttgaatgttattcaactcaattatcattcagtatgtaaatcaaatgggtttgatagcaaagagaggagcttagtcttgattgaggaagtgacatctatgcatgtccttatgtagagtaacccttttgtataggtctccttgtatagtgtagtttagttatgctttgattagttttgttttttctttggtatattgtggggaggaaccctcatccttctcatgtactttttatccataattaatatatcttttttcttttataaaaaaaaaattaaataaataaattcaatcaaatctcgaaagttagggatttactttttggtatttttaatcatattagtcaacaacatgtatatattgcctttaaaatatcttgagagactaaacttgcccttaatgaaattatcactaataaccctttaacaaaaccaatacttagaaagaagaaagtagtgtacaagtgtctatccaatactgatacacgaaaaagcacacaatagaatcagtaatctacattctcagtggctaaacacttgaagaggtaatttctaagaaacacttttttgaagaggttttgcaatgacctgcacccaactatgtagatattgtttttgctctaggcataaaagacccttataatttaaatgcgtctacatggttaagagaagcttatacatgtatttaggaactttttccctatctaatggaggatatcacaatcctaatgcagattcaatatctttgttgtatcttacaagattgcgagcccaatgcataggcattccttatagggctaaacaaagtcccacactggggggtcaaggattggctgtaatatcatttgtaccgatctgctcctaaccatgtggatattatttgctttgaagcccccccggctttaaaacacatctacatggttaagggagcctagacatatatagtgttaggaactttttcccatatctgatgtgggatatcataggttctttgcttcacaacttgttttttactgatctatcaacataggcctcctaacaaagcaatagacaaaaccacttgaaagatctataattttacaaatccaggaatccaattttcatagctctttttttccatgtgtcacctatgagataactgaccacctcctccaagaggttattaaaatccaatgaggatgtctcaactcaatttgtaggagtagtgcattggcttctacataaatggccaaaccacaagtagcagttgaagacattttcatttatagtaaatggacatcatctagaaacccataagtcagttttggtataagctgttttttctttcctttatttggtcctgacttctttgttattatgctttattttgtctttctatgggcttaaatgctttctatagctaaatctttgttgtgattaatcctagaaaaaaacgtggggctagtgcaggagatttcaaacattgaaaaatcagcatggttttaggtcatttaaaataataggtttttcagcattattagtaaaatttttcatccatcttaagaaattggtaacatctaaaggttctagagctttattagtacagttggcagcaaattgatgataggatccatttatctttttcttccatttaactagaatcaggctgccaaataataaattgttggaatatcaccaaaattctgtaatgatcatatctttattaagttcaaagtagcttatcacttaaccttgatgggaaaggcaagaagatgttacttcttgtagaagctctataatttagcttatataataatctattttatgtttttgatattttatcctttgaaaattatggctttgaatcagctttaagctatcccaagttaggtcgtactttaaatgtctgtttactggtatttgatatgttttaagcatgtcctaataaactttcaaaaataaagaaacttgattcctctcatttccatgtgcctgcaatgtttccttgacttctgttaatttcagcaaaatctaaacattttctatgtaactgcagcttatgctgatgcctaattttaaatccattaactctactgcctattttgtgttaattcagacaattcagtgaagggtt

SEQ ID NO: 11137 - DNA, 1562 bp, Vitis vinifera
  Intron number 2 from transcript GSVIVT01024559001 (locus G SVIVG01024559001) derived from phytozome v7.0 (chr-ID chr6 ; pos 8855300 to 8856861 reverse strand)
cgggtaacttttcttccacttctagacttgcattcttgaaaaattttcatgtatgggtggtttattggtagatttgatgctcctggtactgtttggggatgtgggtttttgttctgtttgaatttatttttattatttatttattataacagtgtctgatttatgtccagtaactgttcaaattggaattttgggtttattaaaagttagtttgtttttgtgtttgattttgctatttatctgttaccttctccccaagtgggattttgaaactaaaaagagattaaggttaattggaaatatgataaattttcattttcatatctaaaattaaaaaacttaaatagagaaaagaaaggggatagaggagatccttgttgacaagtaattgccttagaaggactaacctgtttgataaattttatttaatcaatactttccattagttaatcacattgtggttgataaagggccaaagttttctaaatcaatcttcaaagagcaattcgctaatgccattttgtaatgataactattcctataggctatagtggaatagggatcattctcattatttttagttttgatttattttatttttttaatagtgatgagatttatgtgaggatgaggaaggaatctactatttttgctaagaagaattctttggatgagtagcttaatacggctaaatgttgaattgttttatttatttttaacttttattttttgtttcattcttaatcaatgatctctatgtgaataccgagttaatatctcacaaccaaaacataacatagaaaacataaatgttaagaaggatttttcttgaggttcaacttggagtaacttgaaagtgggagtttcatgtttgaatcgtaaaatacatgtccaacaaattgagaatgatgttattaccatcggaaaatcagtctttgaggcttggttgtagtggcaagggtttgggggtggggatgtgagaattctacacatctctaccctgatttgagctcatgatgctaagcaaaacaacttgacttggaagttaggatatacaaagaaagcaacacttgaagaatggaagcttgtattgcactagaatgctttacaatgcttttagaagctttaagtgcttggcgccttaatcaaatgaggtcaccacctatttacaagcaccaagtgaactctctggaaccctcaaaggttccttacatatttagaattttctagaaattctacacaaatgttatgtacatgttatacacaagagttctcatgaactctccatccactagtagagatgtgtagatgactcttggtggttctagaagcttcttgctccttataaaagctcaagtgagggatcatttgagcaggttttacattttgcttccttgctcctatacatcaactaacaaagaatgtcgcttgtacttctatcttatttttatatttacattttttatcaatggaacatatcatatcattctaataacgttttcttttaaagttttctgcttggctctacctaacttgatatcttatgtgctttagttccgctt

SEQ ID NO: 11138 - DNA, 4208 bp, Vitis vinifera
  Intron number 2 from transcript GSVIVT01020716001 (locus G SVIVG01020716001) derived from phytozome v7.0 (chr-ID chr1 2; pos 2797710 to 2801917 reverse strand)
tgacagagaagaaaagaagacctctttatagaaaagtaagtatacatatcattctgcttagatatcaaaaaaaaaaaaaattacatatcattctgctatatcttgtcctttcttttgtgtggttcttaccaaatagggataaatatctatttgagaaaaatagctgtagttaagtgtcacttataaaagaaaatcagtatttaaccattgaggccatatgatattctaatctattgcttctttctttcttttgctgtgttagttatgtaagcattgattaatctctgatggcctttttgtaatttcgaactttcgatgttatttgattcttgtgctttcccctttctataagaataatccagtttcagttggttgtagcattaaatatgatagctaaataagttcatccagttgatttttcttctggttggatgtttggagtggagaaactccaattatttttatttttattttctgataaataaaagaatgtacttaaaagtgcaactgacacacaagagtacacaagacgtatacaatgagtgccaagaggcaaaaaaaaaaaagaaaaaaagaaaaaaaagaaaaaaggaaacaaaaaactactccctccctcaataagaatctagccaatctataaaatcaattagaggcatagtgcctccatctatgtgcaccttaatccccaaagatagattgttaaggaaaatgcttttgactcattgatttgacatcttctcattttcaaacgatcttcggtttctttccttccaaatagttcaaaaatataaaagggagcggctctccaatctttcttttgccttctacctacaaaagagtcatcccaccctagaagagtctctctaacctaaccagaaataacccaaggaatactgaataaagaaaaagccaactgccattaaatcctagccttatcacaatgaagaagaacatgatcaatggatttcctcctttttgcatcaagcacacttgttgactgatgagcaacctcttccttggaacttgtccaaagtcaataccttaccctaacaagcctcctaagtgaaaaagctcaccttagaaggaatctaggagttccaaattatccctaatgagaagggtacaatctaactccaataaagggcttatacaaagaaccttcgtcagttattgcccttccaaactactttatcgtcctcctccctattcattgattgttcattgattgtccttagaatttaaataggaaacgctctacgatatccaactcccaatcattcatattccttgcaaaacagaagttttagtctctgccttcctccttttgctcccattaatatgcttactacgcctttttcaattcagttaacacaaacaaggatgagaaaatctcacttaaaggctcctcactacaccatctatctttccagaacttctctttgctcccattacccattgcaaagggcactcttttgttaaagagatcccactcctttcttgtagttttccataaactgacccgatgagagtctctcactttatacaaaggtgagagactccctttgatctagctaccttgagaatttttgggttggaaggcaaggaatgatcctggagggagttggatgcgtggttttaggagttcatttattgtgaataagagaggttgctagggtacaaactaatttggcatgcttcaaagaaagagctcttttttttttcttttttttttgtctgtcttcttcccttcccttctttctttttaatgtgaaatcctactataagattttgatgggttgggagtacaactttcctgccaaaaagatttgggactctagttaattctaaggtggttctgtctctgtggaagtaacattggaaaagtcataatgatggatcagttggtgaaacatatttgggacgatggtcaatcagtgctgcctttgcaagtgtaaagaatttcctaagatcatttggttgcgttgtgagcaggcttttagcttgtgaagcctcatttttgttttatttggagtttcctgggttcttctccacacaatctaggatttaatgcttggatttcatgatagctttgtgggtaagaggcatttggaaaatggctctcctttgtttatattggacaattcggaaagagagaactacaaagatgtttggggaagtggagcaattagaactagccatgaaaaacttctttattagaagttgcatgcatggactaatggttctagagaaacttgtacttctaaactagattttgttgatagttgagcctggctcaatccaggttccttttttgtcctttttgcgggctttggcatgctttggatactccccatgtactgggttgagccccctttttttcagcactttgtttataatattttattttacttgtctataaaaatagttgttctttttcctgtatttttgcctgtggtctgattcatataattccatgattttgttgactgatggatattgaaaaaagacgagggatgatatggaaaaccatgaccagtgaataacatgcagcatatatatatgacatccttaaatagaatccacaagatgagcaagctaaaagtatattcatccaaatattagcttattagctatacttggagtggttacattgtaggagagcttcttcctcctcctgacatttttgcatatggtatcattatgtgttattgcatactggggcaaaagttaaaggctatatggctatagttgatcttgaggcttgttgtagcgatggaatttattaccggattcatagccaggagagagttgatctgacgggttagaaacttcattctgttgtaggtgtggagaacaattgtcatttacagtttgtttctgtaaaactgcatggtttgatttataatgaagcttctattctggttgatggttgctggagaactctatgaacttagtctggattcattttagaacaacatcactgtcacaacatcactggattcattgtacagtggctagagagctttgggatttagtgttgggcttagttggggtcaagtgggtgttccctaatactgtaaaggaggttttatatagttgggggggttcttttgtggggaaaaaaaagaaaaaattctggaattccattccgttattcattttttggatggtttggaaggaaaggaatagattagcctttaggggggggggggggttcttagcaattcagaggtttaaatattcttttgtttgtaatatttggggttgggctaaattgtatatggaagaggagccgcattcccttttagatttcctggagtggattgcctccagttgaggggtggtttgttttttggttttttgtttgtttttggcctttgttgcctggtatacgtcctgtatacgttggggtttttttagcctctttaatgaattgtgcttgcttatcaaaaaaaaaaaaaacatcactgtcagccatggagttgttcaatcatagaatgacttttctcttgttcaagattaaacttgggtgaatccttatatattgggtgatggtatattcagacttgaaagttttagattatctaaacaaattgatttggctcttcaaatagcttgggagttcaggcttattattctcatttggtacaacagtttagactttgtaccggtatttttcccttttttgggatgcagatgttatatggaggacttggaatttgcatgacttattgttataagacttaagaccattgacatcttgaaggagcactgggttcagaaattgctattcttagaaagagggaggtatgtatcccggtgttatcttgggagaaaatgtcaagaacctccaaaaaaacccctagaatcaccttattctgcctgcccctgttccatgaattttcttagttaatggggaaagcgaatgttctgcttcctggaagaacaaatattattttggaactccctttcctctaattttagtatcttatgcaggcacattatgcaaagtggttggataatcccaaaagattttttttttccaattttcttggatgaattcatgtttttattacttcacattttgcctgtagttttcaccccagtcgacttctttaccaacatggcacgcgacagtctctgtgttttaaatttatttattattattattattaactcacgttgttattaataatggcagggctttg

SEQ ID NO: 11139 - DNA, 3930 bp, Vitis vinifera
  Intron number 4 from transcript GSVIVT01023609001 (locus G SVIVG01023609001) derived from phytozome v7.0 (chr-ID chr1 1; pos 7958183 to 7962112 reverse strand)
caaaatcttaagaagggatcatcagggtccactaagtttgactgtgaattgaaaaattagagtggtccattaattataatggagcgagaaaggagaattctttggttagagaaggtggggccagattctcgaccattagatgaagctaaagattttatcctggaatgttagaggggccaatgacagaaataaaaggaatgtaattaaggccctaattaggtctcaaaaagtggatgtggtgtgtttgcaggagactaaaattcaagatatgtcccagggggttgttcatagtcttggtgtgcgaagattcttaggttggggagcagtgagtgcaaagggggcagctggtggggtggtagtcttttgggataatagagttttggagttagtaggtatggaagtgggtctcttctcaatttcgtgtcgttttaaaaactgcgaggatggtttcttgtggatctttacgggagtctacggacctacattgaaaagatatagagaacctttttgggaagagttaggtgtcattcgagggttgtggtctgatctttggtgtattggtggggactttaatgtgattagatttcctagcaagcgtagtagagaaggaagattgtctggatccatgggaaggtttacggaggtgattgatgagttggctttaagagatttgcctgttcagggagggccttttacgtggagtggagggctgaatggtcaatccaggtcaagactggatcgttttttgatttcaaaggatagggagaatcattttaggggggtgtctcaatgtaccctcccaaggccggtgtttgatcacttcccaattttgttagatggggatgatgtgaggagaggtccaattccgttttgttttgagaatatgtggttgaaggaggagggctttaaggagctgcttaagggctggtggcaaggtttcaactacagtgggttttatagttttatcttgatagaaaaattaaaggctttaaaaatcaagttgaagaattggaacaaggaagtttttggtaaagtgggggtgaacatgagggtggctctagacaaagtgtctttttgggatgatcaggagcggcaaagagttttaaacgagtaagagttagaggctagaaagaaggctagggaggatttcaagaagtgggcgcttatggaggaaatcttgtggagacagaaataaatagaaacgtggttgaaggaaggcgataagaacacaggtttctttcataagatggcaaattctaataggaggaattatttgaaaaatattaaagttaacagaatctagctttcagaagatcaagaaattcaaaggggtgtggtgagggcctatcagaatctgttattggatcttggtggctgacaccctagtatgaacagtttggagtttgacagtattggagttgaggaggcagctaggctggaggagatgttttcagtggaagaggtgtttttggctctttcagagttgaatggggacaaggctcctggtccggatgggtttccccttgccttttggcagttttgctaggactttgtcaaagatgagttaatgggatttttcaaggatttttttgagaggggtaaatttgttagaagtttgaaaaccactttcctagttttagtccctaagaaaggcgaggttgatgatttatgcgattttagacccatcagtttggtgggaagtctgtacaagctgctcgccaaggtcctagctaataggttaaagaaggtagtgagtaaggtggtgtctcctacccaaaatgcttttgttgatggaaggcaaatccttgatgctacgttaattgctaatgaggctatagactcgatgctgaaaagggatgaatttggtgtgttgtgtaaattggacttagcgaagacttacgatcatattaattgggattttctattgacagtgacgcaaaaaatgggttttggggagaaatgggctggttggattaggtggtgcatctccattgcttctttttcagttttgattaatggatcgtcttcgggctttttccagaacactaaggggttaaggcaaggggatcccctatccccttacttatttgttttagggatggaggccttaagttgcctcattaacagagcagttaggagggttttccttaccggttgcaggataaggggaaggggtggtagtgggatccaagtatctcatttgttgtttgctgatgacacgttggttttttatgaggattcccaagaccaaatggcttttctaagggatggcgtggaagagaggatgtggaagagacttaccttatggaagaggcagttgatttccaaggtagggagaatcactctcattcggagcactttggttagcatgcctatttatctcatgtccttgttgcatatgccaagagttgttagaatgaggcttgagaaaatccaaagggatttcctttggggtgggggagtgttggagaagaggccccatcttgtaaagtgggttgttgtatgttcttataaaaaaaagggtggtttggggattagaaatctttctattctaaatagggcccttttgtgcaaatggagttggcgctttgcggttgaaagggagtccttttggaagcttattattagtaggaagtttggggaagaaggtggagggtggaattcctatgaggttagggagggctatggggtggggttttggaaggaaattagaaaggaagactctctgttgcttaaaaatgtttcctttgctgtgggggatggtagaagggtgagatgagattttggaaggacacttggtgtgagaatattcccctttgtgaggcttttcaatctttgtttgccttagtcgtctctcaagatgtgtgggtagtggattgttgggattctgtgggagatgaggggggttggattccctgtttctctagatcttttaatgatttgggaggtggaggcggtggaaaggctcctttcgacccttcaaggaaagaggcttgttgctggtttggaggatagagtgttgtggaaagcatcgaagaatgggattttttctgtaaaatcccttacaatactcttgaatctagttgtgcagtctcgtttctgtggagcatcatttggagcccttatgtgcctacaaaggtgggttttttttgcttgggaagcttcttggggaaaggttctaacccaagatcaactcgagaagaggggctgtattttagcaaacaagtgcttcttgtgttgtgctaaagaggagacgataaatcacatccttattcattgccccaaggcgagggttttgtgggatcttgtgttctctttgtttggtgttaattgggtcctctcgtttacagttagagacactctctcaggatggtccgcttcctttgtggacaagaagcttggaaagacttggcggacagctcctctctgtttattttggacggtttggaaggaaagaaacatgatagtttttgataatgaagttttgtcgattctaagaatgaaaaattcttttgtttgtaatctcttctcttgggctaagtcttgtttagatggaggaccctgttctttaattaacttcgttgattggttgggttctagttgagggctggtgagtgtttgcctttttgttttttgtcttttggtatctcgtgtgtactccctgtatgcttcgggttgccttttaagctcccttttttctattaaagcttttgtgggtttatctatcaaaaaaaaaagaatcccatccaaaatttggaaacccttgacagaagcattctgggtagaagaaaccaaaagcaacatcaactccttaatgcagcaggagagcatcttaaagagaattttattgctctgtaagattccagaccaaacaacttaggaacaaggggtaaagcacaataagctcctgttctcatcttctgatcttgc

SEQ ID NO: 11140 - DNA, 6359 bp, Vitis vinifera
  Intron number 1 from transcript GSVIVT01022835001 (locus G SVIVG01022835001) derived from phytozome v7.0 (chr-ID chr1 2; pos 18944267 to 18950625 reverse strand)
ttttcagaaccggaaaagttatcggttcacggttcactggtcgaaccgacaatcgaactgcgatcgaaccgatgacgtcataaatatataatttataaattattaaaatttaaaataattataaaaataaaaataataatttatacattatttaaaaattaaaattttatttgaaaatcaaaaaattagtttcaaatttaaaatttaaaatccatttttaaattaaaaaacttattttaaaatcagaaattgatttaagctggtaatttttttattaatttaaattaaaatcataagttttaaacatgaagtaaaataataataaatttaaaaataaataaataatatagagatgagataaaaaataattaaaaaaaataaaacaacctggaataagggatgagagggtcaggcaaaaagggaatactttttccaatgtgggggttccagtgggggttgctaagaggagggtttggggggaaggaagaagggggttggctttttcggcacagggtgtgggtgggggttcctgggagtcgtgtgggggtgttccaaagggcaaaaaatgaaagcttttccagcggggatgggggcggaggttccaacggggtcatggaaaaatggggtttctagcgcgggggtgggtttcgatgggcaaaaaggggaagtttttctagcacaggggtgttgccaacgagggacaacaacaatgggaggaaaaaaataattttaatcgaatatccgaaccggcagattcgtccggtttaccggttggaccgctggttcggtccgacttcggttcaataccattccagtccaattggttggaccggaccagaacagtgaccagtcggcagtcggatcagccggtccaatccggtattctaaaaccatggtaaaagttcttcgttttcgcccgtgaatgtaggcttaaggtcgaaccacataaatcgttgtgtgttttgttatcctttttcttattcttttctccctattattattctttttcatgattttcacaacataatgtccattgatttctaatgtttgttaaacaaatccaccgcactaatgaaatccaaagttcaataattcaataatacaataagtatgaacaccttgttatatataatgtcctttcaaataaccaacaaactacactttgcaatacttgtacctaatatttctatcataaatatttttattaagaatcaaaattaatattttgaatataaataagaaaaaaagcaccttgaaagtatttttaataacaaaaaaatattttttaaaagaaatgtttatcaaatattaattcaaaaatcactttaaatgactttttgaattttgagcaaaaatactatatcttaaaaaataaaaataaaatctcaaactaaacctcttaccaaaataattctcaaactaacgcatcttagctacttaaatatccacaaggcctaagaactttttttttttttagtcacaaaactgtatttactaattttgaaaattttttaaacatatataaaaccgtagttaatgatcatgattttaaatttaagtttaaaatcataatcaccaactacaattttgaccattttaaaaaaaatattaaaactatagttttatgacacactaatttataaatgattttgagaatcaaattactttgtggaatttttgttttaaagaaatcatttttgcctaaaactttgatttttaaattttttttaaagcttggtttgatgctttattttttagtgaatgcgttttcaagttttaaaaatgtcttaaaccctataagaatatttattgatttgttttcaagttttatttttgtgacttatttgaaatagaattagaatatgagaatttatgaaattaaaaaaagggatcctccaaagagcctattattcaatttgttttggttaatattttaagtcctatttgtgttgatttggaatggcttgatgccactgtcttctactttgcgcccttccttcacccttacattgtcatgatacaacatatttaggtcttcttctatttgtagaagtcaaagcgcctctaagttctagtcattgggaattgtttcatttcaatcttgccaactaagctccatccttgacaaaagtggatcttcaacatcttgtacttcaagactaagattggattgttggttttggtatcaagtctccctatacacaaactttttaagatgtcattgcctatggtcataacaccgtgccaatcagctctccgggtataatatgtgacttgtcttattgtatatactcatgaggctctaattatgttccatagactaatctatcaacatttactgcatcagtccattttctgagggcacaacaggggagactctttttaatctgcaaattacaagttgttcatacatcattttgtaggttgtatgagattgaaatgtgtgataacttatacgtaaccaaaaagaaacaagcatgttttctttgggcttatacttttcaataactaaggcatttgttgctttaatttgtaataaaattatttcaaaggttgttggggatggaagatggagggaggaagattgctgctctttcaatgcctgaaaactttaacttgcatcaaatagggagatggcaagtacactactacaatttcttctatgtttctggtactgaattggttaagtcagatcatacttgattgcggttgctctgttctgctagcatacagggagagctcaccgattagtccacagttaacaggcaaggatataggaatataacatattttttatgcatttgctgcatttgtttctttcctaattcttatgtcatcttgttcttgctttggtttttcttaagtcttctatatacgtagtgttgccattgggatgatcacgtagatcactgtcatgtacccttacatagtgttgctgttgggatgatcactcagatcactgccttgggagcttttgcagcccacatagcaaattattggccactgtctgttggctcctcacaattttcaagatgtgaaagatgccacatcagtggcagtgaggtgtttgtatgccagggcttctcacgatttgcttccattggcaattttggccacacgagcctggttcagcttgataagagagagcgcgggaggccaccaaggttgcagcagctgcaaatccagcttctaattctaacacacctatcaaagctaagaaacttgaagtctttttggtggcaaaatgatatcttactttgaagctaacatttttttaatggatgcatacattcttatgcacattttcttgatgtgtaagcttgtggctttactgtgattttattgcattcagtttctctgcgagggaaagagtgttgaaagtgcagaggatgcgttgctattgtttttcatattcatattggtgaattgtgatttcctctgtaccctttagaacaaattgtttattgttatgctcttaaattggttattagattttttttctgtataaacatttgattcattgatgttaatcacttttcagtggttgatgattcagactaatgtgagaaagcatgtggaattggtctgtttacttgtaaaatatgggatagaatttcgaaatattaaggatggtggtagcgaaaggaagtagggtagtaatggttttcttgagcacggtaacgacacataggagggatcataatttatgaatggcataggtttaaacattttttgataggtagtgcttatatctaaaaatgtctttgtgcacctgaaaatttagaatcatgtcaccaagaagtaaagcatcaaactcaaatcactttttaattccatcttcttagggtaccaccttcaatggaaaactgatgtctaactaaggtggtgtttgttttttggctgaatagaaaaagccaaatatttggctttttttattcagccaaaaaaccaaacaccgtattagtcttttttttctttgataagctaaactaacctcgatctttattttttgtttgacaaaatattgttgccctagtgtctcaaatcctttatcaactttatttaaagtccactgaacccaccacaataatggaacccaaagttcaataattcaattttatgttgcaatcattaaacaaacataatcacccctttttatactaattgccctttcaaataactaaatacttactcttattacactttttactggtatttctgtcataaacatttatttctaattcctttttcactacaattggaaaattcatttccttatttagggaatttctcaacaaaagaatatttatttataattctcttctatacaaaatttaattttataaccctctgaacttcattacatgtcatcttttaattacatgttacgtgtctaatatatatgacccattccatttaagcccaatttttgttgaattaaaaaattatgattctgaagactaatttaatcacaatttaatctattaaaattttttatgtcttcgacaagtttaattattagttgaaaattcaatatttgttatgatttttcaaataagaatctacttaaattataattttaaattgggtaaaggacaagttttagctctttatctattcttttatcttctttttatttttcttttaatttatttaattatttaattaccacttggtgctctttgcttttattttgtttttttgacaaaaaaaaaaaattatttaatgtccactgatttataaagtttgttaaacaaatccaccacaataatgaaatccaaagttgaataattcattaatacattgttatagtgtaacaggcataaacacctttgttatacaaaatgtccttccaaataaccaacaaactagtctttgtaacactttacctaatatgtatatcataaatgtttttattaagaatcaaatatatatatatatatatataaaagcatcttgaaagtatttttaatagcaaaaaaataattaaaaaattctttatcaaatgttaatccaaaaatcgctttaaatgaatttttgagttttgagcaaaaataatgtattttaaaaaaaatcccaaactaaaccttcgaacaaaatagctcccaaactaatgtatccgtattgcaagagaatttttaatttttaatttttttttgtcacaaaaccataattactaaggctttaaaatttttttaaaacatatataaaacctagttggtgaatatctcttccaatttaatcttaaaacaatagttatcaattatggttttaaccatttaaaaaaaaaattaaaatcgtagttaccgattatcattttatgacattggtattcacatagataagagattaatttgagaatctaattacattgtagaaattctgttttaaagaaatcattttttttttggttttttaaaggtttgtgagatgctaaactttttgatgaatgcgtttacaagttttaaaagtgtcttcaagaatctttggtcacagttgagtacatgagtagacggcgaatctttacaggtggcaatcatagcatgtcacatacctacaaggtggcaatcaacttatttgaacctccccattttaaatataatagggttggatttcatacttataaaataaaagataagagagagtatgagatcagatcttgattttagcaagttgtgaacagtctgaatgaaaaatattatattctgcgcaatgttacaaggcacatgctttgactgtcaacacattaaaacaaactggccataatgcttttaatggaaattcatataaaattggaagcgtgaagaaggcttcctggcttcccggggtccatctgaaattcattgacccaaatcccatagatcccattctccataatagaagccattgccaatttgtttcctcttgtttctttgaattttggcccaatagtgcctttcgtgtatgcattgagttgttttttatacttatatacaaactagtgtccctttggattcatatcaataagatgaatttttaaaggtgcattcatccatacttttgtcctttgaattgtatatgtttgaaaatccaaataaaagaaatttaaaaaatattgtatccttggacggtaaatgttatcatttttattataattttataaagaataaaaaaagacccacaccatgaattagtattcaaatccactaaagaaattgaagataaccatggtgaatgtcaagtctattaattataatttgcacctcaatggatgaaaatcatttccaaccattaaaaaagcccagtgaaacaatactattaatcattgaccaatgatgttggcagaaagcagacgtacggggtcttccacgaaagtacct

SEQ ID NO: 11141 - DNA, 8419 bp, Vitis vinifera
  Intron number 2 from transcript GSVIVT01016481001 (locus G SVIVG01016481001) derived from phytozome v7.0 (chr-ID chr1 3; pos 3494946 to 3503364)
tattaaacgctttgagaagtaaaggtaatttgctttggattcatgcttttagtttcttccttttatttccatgtttattttgtactatgattgtgatggtcagaaccctatccaaccattcctcaaccataatagtctgatgccagacactctccttgtttcccatgctgaccaatcagtggtcagtccctatgtttttcttctttgtgagttaattggaggaaggagtgcaccaatagggtgaaaaaacaagaaatagggtagtagaatggttggcatatgctaagctctattgtttgttttcttattttccttgtcattgattggaaataccaagctgttttctatcactatcattgttgttttcctgtttccagtccatagcctatcatggcttcaagatttgtaatcagcagcatctctccaatctgttgtcactgttttgtttctgtaaaatttagattctgtgaaattttatcatggtcttactttatttgtgctggtggaatgggtgttcttgttcatcaaagttgattatttcttgattgaagtgtgttaatctgtagattaatagcaaaatttattgactaattgtgattgattgaaacttacagcttacataagctgtaaattagggttgtaaatcagtgataaagttagggagtcctttcttgtttgtatagttgactaatggtgttgacattcaatgtagtctagaattattttcctatattgttttcatatattcattataaattcctccatcaatacaagaaatacaattccatgattgttcacatggtatctatcatagcaaggtttctgttaaattcattctctgctcttgggccttaattgtcgtagccaagtgcattcttctttgctgcagctttaatgattcttggccttcattgtcaaaattgacgtagcgaaatacaaccttcattactggctctcccatgttctctacacttctatttccttcctttgcttttattcgctctcaatatgtctgaaatgtctactaatgtccaaatctctccctccatccaaaatttcaatcaaaccataacccactcttccgctggtgaataccaaaatctccaaacatcattcaggcctaagggtcagaattatctagtttggtctcaacttgtgaagacattccttaaatgaaagggaaagctaagccatttagttggactggtaccaagcccaaaagacccaaagtttgctacatgggatgaagaggattcaatgttaatgtcttggctttggaattcagtgcattcagagattagtgggacttgtatgtttctcacaacaatgaaggagatttgggagtttgttaagcaatcatacttcaacatacaagatgccgttgagattaatgaaattaaaacaaagatttcatccattgaacaaggtactttgtttataattgagtactataatatcttaaaaactttatggcttgagttggattattatcaaaatttcaagatgaaatgtagtgaagatgcaaccatgctactgaagtttgatgaaagggagagaattttttaattacttgttggattaaatgttgaatatggtcaagttagaatgtagattcttggaaaagaaacaattccatccctcaagaagctaggaggagaatagtcacgttagaagcctcatcgagtaaaggaatggctcttgctgtagtcaagccgaataccaatcagctgaataatagggtggctactaaagagacaaataggaagaatgggacctctagatcaaaaaataatagagatggagaatggcgtacttactgcaagaagttaagacacatgaaggaaactgttggaggcttaatgggaagccacaatcctttaggaagggtaataataaccgaaacgggcaagctggacagttgggaggagaggcgcatatggccaaatcagaagatagttctagccaagaaacttggaattctagagggtctgatggtggaggactgaacaaagaagaaatagaaagacttcgaagcttcttgacctctctagaaaagcatagtacctcatgttcattggcttgctcaggtaagtactcaaactcttatgcccttagtgcttcaaaagactgtttttctagtgcttgggtaattgactcatgtgctactgattgtatgaccaacgcctttcactgatttacttcttatatagcctgtccatgaaataaaaaaatcaaagtggcaaatggtaaccaaggaactgtttccttgatgccatctcttattccaaaatttgtgtcatatgttcctaagcttttgatcaatctacaattgattcaccagctcactaaaaacttgaattacagtgtgacctttatcccatcctaggactgggttatggggaagatgattggatgtgctaaggaactagaagggctctactatcttgaaaccaaaagtggtaacggtggccatggatctcaccctcatttttcagaaaaagttccatccaatataatacaagtttggttacatcatctttgtttacaacatcctccttttgctttgttaaaaactacgttccctttattgtttggacatttaaatgttaatgaatttcatcgtgaatttgtcaacttgctaaatatcattgtatttcatttccttttgagtgataatagaacatttagtccttttcgattaatacacactaatgtttagagtccatcaagaattcctaaatgagatgttagtaggttttgagaccatttctcacaaaggaaagaattatacactagtcctcatgtaatgattccccataacaacacagtattttttttttttttttgataagtaaacgaatatattaacgaaggcaaaaagccgaaaagcatacaggaagtatacaaggctacaacccctaaaacaaaaagcaaaacaacccaacccctacttggaagctatccactccaagaaacctataagggagttcgactccatatcaatgtacactttagcccaaccccaaaaattatacacaaacgaagtctttaacttctgaaaagctaacacaccccctttaaaggctagcctatttctctccttccatattgtccaaaaaatgaaaagcgggatggaattccacacttttttcctttttttccccacaaaagagcttttccaactactaagaacctcctttacagaattaggaaaaacccactgtacaccacacaacgcaagaatgatatcccacaatccttttgccaccgtacaatgaattaatatatgattgatagtttcctcttcacacccacacaaaaagcaccggttagggaattgccaccttcttctctgcagcctatccagtgtaagaaccttcccccaagtagcttcccaagcaaaaaaagcaatttttgttggaactttgcccacccaaacattgctatgagggaaatccgcaccttcagcattagccagcaccctatacgcttccttgactttaaacagcccgtccgctcctcccctccaaagaaccgaatcttcctccaaagttactctataattcctcaactcaactaacatattgtccaccaaccccaactcccaatcattgaagtctcttaacagccttagattccaccctccatgacctagattttggtcccaataatcctccacagtgacgttcctttgggcagccatggaaaaaaggtccgggaagacttgggacagcagagcaaaaaaactgtcatctcctagaggtaacccaagcactgttatttcaaacgaatgttcttaagtcctattggggagaagcaattttgattgcaactcatttgatctgtaggttaccttttggagttttggggaataagagtccaatggaaattttttcaaagttctaccttgattttcatgtttttggtcatcttcctcctaaattatttgggcgtgtctcatatattcgcatttattctcatcaccatggtaaacttgatccctgagtattgaagtgtgcatttgttggttattgtccacaaagaaaggatataaatgttatcatccagaatatagaaaattcctcataactatggatgccactttcaatgaaaatcagtcattctttttccgtccttatctttagggagagtcaccaagtgaagataaggaatctaataaatctgagtcatttttttttcaagatttgtcctttcatcctaccactgtctctagtcctactgtttcctgttctcctccattgagtctaaccactgctttgccttctaaaatcaccatgactttattacaacttgaaaatgaggaagcttctagaaagtcaacagctaagccacttcagttctattcaagaaggaaacagctcattgtaattcaatgcacgttcaagaatctgaaccggtaacatgtccacaaataaatcccactcatttttcatctgaaaattcaagaaaaaagcatgcaaaataatgaggcttctttgagtaaaaacctagatttattgatagccattaggctagaaaatgtaaccaacatcccatctctaatttcacccatccctaatttcatttcctttgacaaactattctcatctaatagatcctttctctccgaacttaatcccataaaaattcctaaatagcccaaaggacttagagatgagaattgaagaaaacccatgaatgaggaaatgagggctcttagaaaaaatcaaacatgggaaattgttgaacttccgaagggaaaaggactggttgggtgtaaataggtatttatggttaaatattatgctgatggaaccttgaagagatacaaggctaggcaattagccaaaggatatatacaaacttatggggtggattatcaggaaacttttgctccggtagcaaaaatgaataccattcatgtgctattgtacttagtagttaactatggctggttattgcagcaattttatgctcaaaatgctttttggcatggtaatttagaggaagacgtatttatggaggctccacataaacaaatgcttagagcatggttcgggaaattgacaaatgcaatgaataatatgaagtttctgtagagtcagagagaccacacactatttatcaaggactcatcttttgtcaaggtaacaattttgattgtttatgtagacaagataatagtaataggtggtgatattgaaaaaattgactcactgaagaaatgttggccaaagaatttgaaataaaagacttgggtagacttaagtattttttgggaatagaagtaactcattcaaaagatagaatcttcatttctcaacaaaaataaatacttgatctgctgcaagaaacagggatgctcggttgcaaaccaatggacattccaattgaatagaactacagattggtagaggctaaggaggacgttgtagtagaccatgggaaatactagcttttagttggcaaactaatctatctattacatgctcagctaaatattgcgtatgcaggaagtgtggcgagtcaagtcatgcattcttctagagacatacatctagaggtagtgtataggattctatgctatttgaaggctattctatggaaaggaattttttttagaagaaagagaattgaccttggaagcatatagcaatacagactaggcaagatcaatggtagatagaaagtcaacttcaagttactgtacttttcttggaaggatttaatgatgtggagaagcaagaagtaatcacaagcgattagtggtttgatccatactctatatatttcaacaaaggagcagttaattgacattccaaacaaaagactggctagtgattcttttcagaaaatcacaagtaagctaggaatggaaaacatatactctagcttgagggggagcgttggctaattgtgattaattgacaacttgattgattgtgattgattgaaatttacagcttatacaagctctaaattagggttgtaaatgagtaataaaattagggttacaaattagcgattccttccttgtttgtatagttgactaatggtgtttacattcaatgtattttaggattattttcctttatagttttctttgtaaaccctatatatattcactgcaaattcctccatcaatacaaggaatataattccatgattgttcacaaaattctcaggattgtttggtagaaccatagaaaggatggtctctcatgggttggaaagacaatgttttggggccatcacctagtatatgagagcttgatgctcgaatatggggagcacaaagcaagtaacccatgtgacattttgtgaatttaccctttagcttttgggttcgagtttttggagcaatatgtttcttgtccaaacctattgtacaagacatgctttatttctattgcaacttactcaatctaatgaggttgacaattattgattaaacattggcatgtttaagtacctgtgcagccaatggaaacctttcttcaatttgattggttgaaaatagatcaatggtttctcttaggccctggtttttcaattgttcaatagcaaaatacctctttctcatattgattgcaaatttatttatttattcttttgattgtggggaatccaccccaatagtgagacattaatcttggccatcggtgaagcaaaccccctagtgttatgggcctaccgctctaccctagaccacttaaatattggggagtcttgaacttgggacctttgactcatttctagatttcaaggagcttcttgtgtggattggagttgaagttttgaacgatcttgtttggttacaatttgaggaacatcaattttaagggagtgttatgtgtataaggaagtttgggagagttgctctatgatgtggtgtacaacatttccatgcaatttggagttgattgacattttgttggatttgattaagttagaatttgatataagaacatttgagtgtgattttatgagaattatagaattgtggcaggccttattagattttgtatgtgatacttatttccatattttctcaatcctataatatatttaaatccatcttgggtgttactgatgcaattaagtcagttctattctcctttcttactttccaattgtctaagccaatggtactttctaatttgctttaactttgaagatatgtcatggtaatatcaaggaagaatctgatgagatgcttgagaatagaagtggctttgacccaatgcactaattgaccatttacccagcctggctaacttggatttggtggcactatgtttgcttgttcttggtcctggtcctggcaaacctcgagcttaagatttagcaacttgacatggctctagatgaaaattttgagcttggacttgatttcttggttatgcatgtttttaaccaatttgcaccaacttccattattatatgattatctcctgggaatgcttgtggcattgccaatactcagtagtacttgggtactcatgtacccaactgtcctgaaaccaaataatcagttttggttctaatattatgaaatcaaataattttcagtttcatgctggaaaaaccactaagatttaggtctatattagttactccgtgagtcttcatctggtaatctggtaagtaatgtattcatgtaatgcttacccattataagaagaatcagtactacgattaaattaggcatctatacttcacttttcatggttaagctaaatatattagaaatcttcaaagtaaacaacagttgctctgatataagatgataagagatctaaaaccagatttctctctctttttttattccatttcttatttattaaatttcatcttgttatttttgtaggccttcaattaattccaaaactttgagtaaaaattacaagtaatggcttattccaaactttatatctacttgtcctatgcccaacaggtactcaatctttgttgggcctgttctagatccaataatttttcagatgttggtccaggcactgataaaattggaagcagtgttcaaatagactctggttctgggtaaagcaagaattggaatgtaactcctgatgcatgatttttctctgattcttttggcatgtaggttgatcaggacaaacttagcaagtttgtaaattgataattacatcatcttatgtggtgcatatgctgtagaaaacaaaagggaataataatataattcctggttgctatcaaaatgacctgtcaatcacttcttaattactttttaacttgtggttccattgttggcctacctcacataataaaagagacaaggagcacaacgtaatattatcaatttgcattctgagacttaggtgattgtttttttctgagtgtctcatattttcattttgtgataatgatttacaggtgg

SEQ ID NO: 11142 - DNA, 2431 bp, Vitis vinifera
  Intron number 5 from transcript GSVIVT01019462001 (locus G SVIVG01019462001) derived from phytozome v7.0 (chr-ID chr2 ; pos 844637 to 847067)
attgaaggcaaaactacttgaagcaagactaaagggtaagcgctcaagattaaaggctacaaataccaaaggttccctgtagatttatcagttttgtttaagttaaaaaagcttcaaagatgcttagttattaggcttatgggttcggctggatctgcccttttcccctttgagatttgtgttttttgcttactgggctctcaatctgaatatttgatgtgtttgaatatatagctgtatcttgaattgtatatgcagtagtgttacatagccatatgtatatatatatatatatatatatatatataaatctctttgtgcaataggatttatgatatttggatcgttacctgcagctgtaacctttacctcagaaaaaaacctaggaaagaaaataagaatgtcaaggagttatattttcatgtttggtttattataaaaaatataaatgaatatcaaattaagtataaatccttttttcttttttattcctggtataaacacatgaaaaaaaatgaggtgaaaatcgaaagaaatgaagtgaaatttgaaatgaataaggttaagctataaatcaatggacccatttgtaaggtacctattcaactcaaaatattctaaggactcgtttctattcatgtaaatattatagaaacatgtaaatattatctatcctaagctcaaatggtccttataactttaaaatatattcatatattcatatgtatcatcatgaaactgaacaaactcccacaccaagattgaggggtgtctatatgattaacagaagtttatacatatatagtatcgaaaactttttcgtcaatttaatgtgagatatcacgagtattatatgataagtagtagtcttcatacctaacccttcggtaactaaacccgatgtataagtctttttctatttaaaatcatatttgaaagggattcaaattgattatgcatcattaagttgtttattggtgagatccaaaggtaaagacacaagattgatactcaatttgaatgcaaaatgaataggaaactccttaattttcttgtttttaaaacttaaagaaaaattaaaaagagatattaaggctttgttgggtaattattttcaaaaacgattttttgtttttaaaaatagaaaataatatattttcaaagaatatttttttagttgtttttacttgttttttaagagttattttaaaaagtaattatataaatatgaaaaatgattataaataaagcattacatataaaaattaattttaaaaacatataagtcagtttaaaaaatacttaaagagtcttcataccaacatatttaaaaattattttttaaaatagttacaaaatagaccttaatactcaatactagacatatagatgggttaggtttaggcaattattaatgagatttagagtgtgtttggtagcagcttaaaaatacttcgagttttcataccgacatatttaaaaattatttttaaaaatagttagcaaatagaccctaatactcgttactagacgtataaatgagataggtttaggtaattattaatgagacttaaagtctatttgatagtgattttacgaaatgtttctaacattattaatacttgaaagataaaaattttcaaatttagaaagtttgaaaatactttcttaaatcactatcaaacgtaatattataatttgattaatggtaattttaggaagtgattttaatatttctaaaattacattcaaatacaattttaagtgagtgtcacaatcaagtcgggaatttaatttttaacttgaccccaaccctaatcccaacaatttaacaaatataattaggggtttcaataataaaaatggatagttggggcatagtcatgtttgacacaccataattttggaaggatccaaatcctaagatctatttattttaggatatttttggaattaaaatagtttgtaaatacataattatttagaatatattaattatttctttttttttctctcacataataggaataaaatattcttctaagaaagaaataataagaaggtttgaactcataatattttgtacccaaaacaaacaagctatcatattatgcttaaggcaatattacctatgaacattaaaaaaaattcatctttaaaaatatcttttttattttctattatataattatcaaatatatttagtattttttaaaattttaaaatataattgaaaattatttatatcgtttattttttaaaatagtaaaaatagaagtatattccacctaagttcccagagtttacgacttttaagggaataggtggttgttcgatgaaacggtgtcgttttgatgtggccataaaaccgcagtctctctcgcggagctctggtttcagaggcgcctctctctctctctctctcacttca

SEQ ID NO: 11143 - DNA, 2595 bp, Vitis vinifera
  Intron number 2 from transcript GSVIVT01029319001 (locus G SVIVG01029319001) derived from phytozome v7.0 (chr-ID chr1 1; pos 16928095 to 16930689)
gagcactggtgcatctgtgcgagtactgtcaggaggtatgctttaaagacttcatagcatgatgcctttagtttctatggaactgtaacattatccattatttgcaattttgtcagttggttttcttggaaataactggccctctgatagatcaactctgtaaatgtgtttttcttttagctgtcagcttcctcttcttcatgtactgctaccttccatttaaatctgctgatagaaatcggtttagtgtactgcatattttttttttcgtttatgtagatctgaaactagaatttagcagtttcctgtgggggctagaaattgagaggtggaaaaaaaatggaagcatgggctacaatatgtttttttcttgatgcactctgtgctacacttgcatcaattatggtaggtttttgggtcgtagtagcactcttatggagcaatggttttattcatctaccttagccggatactgaagaaacatgcctgggaatttggaattgattctgttctacagttatctataaaaatggaacgtcatgagaaagaaaagaagatcttaagtcatctatcttagctgcatattgaagaaacattaggtgttttgctgatagtttctccataagcttgagaactctgtttgttttcattttcatcttaattatttttaactctcattttgaggatgtttgtgtgctagctctgcttattctgatgttctgctcctctagaagcatatagccagtcaataagttatagctgatctgcaatactagggccttatgatataatttatcccagctaaaggcaccatgtggtccaattgtcaataaaaaatgtttgaatcttttgcaaagcctttcagttgctctgtttcagttggtttgcccattttgggtccaaatttcaaaatctaacagccttctccactgaagtatattctgcaaagtattaaatagtaagagtagatggatgttaaataagtacagagattaaacttcttgttgcatttttgttggcagaatggtttgtttattttgggtagattttagctggtgattctcatttgtgactcttacctttttgtggtgttgaaagtgctcagtggaaaatttgaaatttattactttaatgagcctgacttaatgatatcaatctgtattagttaaatgatcaatagcagatgaaaaattttcaattgcggttttgttgctcatggaatttctttcaagataagctgtattcatgtctttgctagttctaaaggcatttttataatcttattcattagcaatgcaatcattccttttgttgaaatgggaatgttgaaggtcttgaagactgaaatcaacactgtgtacattgaagttttaacttgttggaattttgaagtgtgcctaaatgagttgaattcataagagcttgctagcaatctgtcttaagaaattagaacactccaacaatattttgtcagtgatgcaagatttgggatctgctacttcgtataaacactgccaattttagctttctaatcctatgttctagacttgctaatagttcaaatcttaacagtatctttgttaatggtgctcataactgagaatatgctctcttgtcacttaactaggtcataatatttaacctgcaataggaagcttaatattaaattgtagcttgtcaagaaaccaatgggagacaagaagaggagcttatactttattctttttgctcttatgttactaaatattcctcaagtcctaaacaagtacttggttgagttaggtggagttttcatttatgagggactaaacagatgtaataccttaaatttcttttctttggaccccatgtttgcagagttttgattacctaaaagctctttctaaatagtgaggagttttacaaggtgtttgattgcataatgaaaacttcagaggagaggtttgaggcctaaaagctcttttcattaaagatgaagggagatgtttttgcagaagggttacaaatttaggaagatgttccagaatttagaattcttttacatattaaatagaaatcctttctttatcttaaatagaagctacaaatgtgccaaatgggccttagttgtcttggcagccaaatggacaggaaaggaaattttctgatagatgaatgtggtcatttgtgctttaatctagtagattgtcctagtaagttactagaaacccaaatggtacatagaaggatggaaaagtacttggaaatgctgtctgaaatcttggtagaaatgctacttagtttgattgaatgtctccaaatgatataacttggggccccttagaccttagatttggcagctgtgttgtcatcagataattcatctctgtattttttttctatccccccaaaaatcttcaatttcatttcttcccagtggcccattgcatagacaccggtagattgggttctataccagtggacctaatttatatcattgtttggtcccaacctccaggttttgaatttataatctctttatcacttctttcctagaagttattccttatctccaaacgccaaggcacatgatatattttttttttgttatgacag

SEQ ID NO: 11144 - DNA, 1549 bp, Vitis vinifera
  Intron number 2 from transcript GSVIVT01024790001 (locus G SVIVG01024790001) derived from phytozome v7.0 (chr-ID chr6 ; pos 6935477 to 6937025)
gttcagtgagcgattcagcgaagggataagaccaggttctctctcctttctcacttctctttctctctctaagatctacaaaccctagcgtcttgcatttacggaaacttttgattttcgcggtccgtgcaaacatggccttccgtttggttcttcagaaaaagtttttttacggtcgaatcatacccttccatttggttaccgagaaaaatcaggagacatgaaaggaaaatgtaattttgagtccgaagaatgaaaatctgtttctcaagcgagccgaatggttgtgttcggttttctgtgttgccaaagggatcataaggcttgttgtctgttgaattttgtgtttttctgaattagtgtgtaatttggttgctgtgacgtgttagctttatctcgttgtctcaagcttggtttcgtgaactttttgaaattttggtatcgatttgaagagcgaaaaatggaaatattttttctagtaagctgaatggctgtacttaatttggttggttttaaaaattagtttcatttctttcggtttctacattttcgctgatatccaacggatcataagagttttgttttgaacgttcttcttcttgtttagttgttttaattatatgcaatttggttgctttgagctttatctcattccctaaaacatgtcttatgaattcttgagatgtgcgttcagcattatctcagctaccaatgggatcataagctcacttataaagaatttttttaatttgactgtcgtgagcgttaagtcattttctcaaccatatttttgggcggtttcagaaatattatgctgaagcgtgaatttagccttgttcataagctgactcaaggatggttttgacgagattttacgtcacagtatatgtgtgttattttggatttgtttgttacttttgtgcaattaaaattaatttgtttctgcatcagagaaagcaaactaatgggtttgatttatgcattcaaaattaaatcttctcaagtatttgtgcatgtttgtataattttgaattatgttgtcactttttgtgatttaaattaaattgcttctgcagttgcagcttttgtttgaattctgtgatcaaaattaaatctggttcagtgtcataagtgcataggaaattctgcttctaacaatttattatgtagtttgtggttgtgtagactttctaaataatgagaccttgatggttatctaattttgagatggaaagggaaaatgtttttttcttaattttttatgagatttatgtagttttcttattacaaaaatgaaacctttttaatcgattgatgagaaagttcaaattaaataccatcatctaaaggtttgttgacatgcgtagctatggaaaaactagttcgagatttcaccatggttatgttgttaaactgttaattttacatattctattatgggtatgagtgaaattctgttggatgaaggttacgcttttgtcaacatatatttttggttttattttggatagccaataacattcgttaatctggtttgatgattcttcag

SEQ ID NO: 11145 - DNA, 8354 bp, Vitis vinifera
  Intron number 2 from transcript GSVIVT01026446001 (locus G SVIVG01026446001) derived from phytozome v7.0 (chr-ID chr4 ; pos 23580136 to 23588489 reverse strand)
attggttctagttgttgtgcagtcaacttctaagggtaagttatcataattactttagtagttatataactttgatatgcatctgacccttgaaatagcaaaagattaactaaagagggtcagcaagtagttattaagtttttgtgttttcttattcaaggccattattttttaaattcaattctcattttttttttttttttttttttttttttttttattaaaaaaaaactaaagtcattatatgatggctgcatgttttctgattaagttcgtgaatctgctggtgattaaacatctatttccatgatgagatgactagtggctgctaatttattcttaggaagttacccgctgttactatccatatgccctgttactatctgtctttatttaagttacccgcttcagttgctgcaaaaatcgagaggttgcagagggattttttatggtcagggattggggaaggcaaaaaggatcatttagtcaggtgggatttaaaaactgtctagtgaataaaaaaatttgaaaaagcgatgggagagagagagagagaggacgcgagagagagggggggcgtgagggagagtgaaggcgcgtgcgacggcgacgatgaggagaccggcgaggcgagccgaaagcgaagtttcacggttgaatccaagactttcgagctcgtcttggacggaagaaagggaagatgtcagatcctcatcgtggagaagaaacggggggtctcgacttgggttcgcttagggctggagagcttagggcttttcaaggaggggctaatccactgtatacgagatgaagaagaagggagatgggaaaaggagtggagagaaagaggcaagagattctctttggtgcggggtttcaacagatcaggaggctttttaaggctgggggtagtggatctggaacgaaaacatttctgcatcttcttgcccagaggaaggagggccaaaagaggatggacgactatggtggagattattcaacaaatggaggagatggtgggtagaagaatggaggtgcaggtagtaagggccggcgggaaaatctctccgacgaaatcttacgtggaagcagtcacgagcacaaatcagaagggcgcaactgcaatcaagatgaaggtcgcgagggaggagatggcagaaaatctacagaagctgaaacattgtctcgtcgcgagctggaaatcaaacaagaaggaagacgaagatttggagaggatgggaagcctttgggcaaggtcttggggtttaaaaggtaaactaggaatggccaagctggaacgaggtagggcattgctggagtttgaagatataaaagaggctcaccgagttgcctcttcgggaagcagagtaatgggaggaatttttttaggtttggatttttggaacccaaagtcgggttgttggggagagaaggagagagcacaggaggcatgggttaagatttttggtttgccaatgtcgttatggagcccggcgattttgaagaaaataggggaggaatgtgggggttttgttgacattgatgagcggacaagatcgatgggggaaattcaatgggctaggatactggtcaagatgagaggtgaattcagaccgagtattctagaaattgaggcagaggaggaggtttacacgttggcgctgtggtgggagatcaggccggaggtgagaaggcttccttctgtggaggaaaccagaaggagaaccgagatcaggggtgacatgcactcacgcgcggagaagcgagtggggaaggaagtgacagaagcgggaattgagggacagttcctgacagatgatgggaggctgctgcagaagaatgggccgggcctaaagtctgggaaccaaacctatggtccaatgccccgggactgggtctatgtggatggtaaaaaggatgggctgcccttatgtggcttatccatgggccttaacgagcaggagaaggagggtgggctagctaagttaaatgggccattgggccgaaaattaaaagaaaaaagtaaggaggctggtgagtcagaggcaggcccatctaactgggctgctgatctgggctgccatttttcagctgggatggatggtctggtaatggatggtccactttttttgggccgttctaactccagaaatataatcaacccagaggacccattgatgtgctgggcgccagaggagattagaagggaacagggggaggcaggcttttccttgactgaccgagcccttgaggaagaagcaaagaggtatgtcctgcattctcattctaaaggatacggggttatggggacatttcttccttcttcttctaattctgatcgggctccagtgggggggtcttttgattgcccaggggaaatagaggaggaatcatggggggataagtcaacctggttgacagtctatgaggggaatggtgagaatgacaatagaccctggaagttgggagaggccaacaaaaacagagacaagggtagggacaaggaggggaaggttggtgcttcagaatctcaagacaatgaaaatgagaaagaggaactatgggaggagtgtgatttagcaaaattcagccagttcctgggtttctctacgaagggactggaaagggagatactgaattttctgactaaaatcagaaagaggagggaaaagattcacaacaaagaattcttggagaagtccaaatttgaaagggagcttaagagattggaatgctctatcaactatgagggggggtataagcagaaagatttatcacagggcaaagggaatcaattgatagttgcccaatgaagctgaagattataagctggaatgtgaggggagcaaatgacagctctaagaggaaagttattaagaattatataaggaaccagagggtggatcttttatgtattcaggaaaccaagattcaggagatgtcggagggtattgtgagaagtctgggcacgggaagatttatagattggagagccctaaatgcggaggggactgcgggtggcattttgatatgttgggacaagagggtcttggatattttggattgggaggagggtctgttcacgttgtcttgcagattcaaaactatagaaaatggggccacttgggtttttacgggagtgtatggtccgttttctaaagtggaaagggagggtatgtgggaggaattgggggcgataagaggtcgttgggatgatccctggtgtcttggtggggattttgatatcattctgtatcagcaagaaaggagcagccaaagaagaattagttcagccatgaggagatttgcagagactgtggaggacttagagttggtggaccttcctcttcaggggggagggttcacctggaatggggggcttaacaatcaggcctgggcgagactagacagattcttagtttcctccagttggttagatctgtttagtggtgttactcaggtcaggttgtccgggccaatttctgatcatttcccaatcgtgttagaggggggtggaattagaagaggcccaaccccatttagattcgaaaatatgtggctgaaggttgaggggtttcaagacatggtgagaacatggtggcaggggattgatgtcaggggcagtgctagctacagattggcttttaaaatgaaggagataaaaaagaaactgaaagtttggaacaaggaggtttttgggaggctggaaaccaataaagcttcagccttagaccaagtagacttctgggatcgggtggaaagtgagagaaatctgactgtggaggaggctggtttaaaaaaggatgctaaagactcatttaagaaatgggtcctgttggaggaagcccactggaggcagcactcaagggagatttggttaagggagggggatagaaacacggggttcttccatagaatggcaagtgctcacagaagaaacaatattatgggcagaattaaggttaatggggagtggttggtagaggagcaagaggtgagagaaggagttgtgaattcgttccagcagttgctttctgaagatatggattggcaagcggatattggtaatattcaggtgggttgtatcagccagcaagaagcagagagtctggaagtcccttttgtagagattgagattcattcggcgttgatggagatgaatggggataaagcccctggcccggatggttttactgtagccttctggcaaaatgtttgggactttaccaaagaggagatcatggagatgtttaaggaatttcatgagcataactcctttgttaggagcctcaacaatacctttttggtgttgattcctaagaaaagcggggcggaggatctgggtgattttagacctatcagtctgttggggggtctctataaactattggctaaagttttagctaataggctcaaaaaagtgattggtaaggtggtctccattgctcaaaatgcctttgttatgggaagacaaattttggacgcgtctttaattgctaatgaggtgatagattcgtggcaaaagagaaaagaaaagggccttatttgcaaactggatatagaaaaagcttatgacagcatcaattggaactttctaatgaaggtccttcaaaaaatgggctttgggaccaagtgggtgggatggatgtggagctgtgtgtcttctgctaaattctctatccttgtcaatggagtgccagctggtttcttccctaacactagagggcttcgtcaaggggatcctctctccccttacctctttgtgatgggaatggagattctggacgttcttatcaggagagcggtggaggggggttatcttacagggtgcaacatccggggcggtagtagaacctcattgaatatctcccacctattttttgctgatgatacagttgtgttttgtgaggcgaataaagatcaagtctcttacttaagctggattctcatttggtttgaagcagcttcgggtcttcgtattaatctagccaaaagcgaaatcatcccagttggagaagtggaggagattcttgagatggcagctgagctagggtgtagggtggggtcactgccctcccagtacttgggcctccctttaggagtccccaatagggcttcttctatgtgggatggagtggaagagaaggtcaggaggagacttgcgctttggaaaagacagtacatctctaaaggggggaggatcactcttataaagagtaccttggctagtatgccaatctaccaaatgtctatattccgtatgcccaagtctgttgctaaacgagtggagaaaacccaaagagatttcctatgggggggtggaaacttggagggaaaagttcacctagttaaatgggatgtggtctgctcagaaaaattcaatggagggctaggattgaggagaatagccactttgaatagagccttgctgggtaagtgggtttggaggtttgcttgtgaaaaagataacctttggaaacaagtgatttcaacgaaatatgggcaagaggaacatggttggagggctaagaaggctagtggggcggctggtgtgggggtctggaaggaaatcatgaaggaatctgaatggtgctgggaaaaattggcttttctagttgggaaggggtccaaaattaaattttggaaagacagatggtgtactgaaactccgttgtcccaatgtttccaccacctttttgttcttgcagtgcatagagacgccacgattgaggagatgtgggaccaacattcgggccaaggagattggaatcttgtttttgtgagggatttcaatgactgggaaatggatatggttggtgatctgctccttactttaaggggtcataggccttccatggaggatgattcagttatatggaggcaaggaagaaatggtcgttacagggttaaagaagcttacaggctgttggacaagcctaatgccattgagtttcccgcaaggagaatatgggtggataaggtgccaactaaagtctgtttttttgcctgggaggctacatgggggaaggtgctcactttggacaggctccagataagaggggtgcaactcccaaattgctgttttttgtgtggttgtgatgaagagaatgtaaatcatattcttttacactgtatagtgactagagccttatgggaaattatttttgggttgatagatatcaagtgggtcctcccagaaactgtaaaggagactcttatctcctggaggggctcatttgtagggaagaaaaggaaaaagatttggaaatccattccgttgtgtattttttggacggtttggaaggagaggaataggttagcgtttagggggggtgtggtgaatattcagagattaaagagttcttttgtttgtaatttatggaattgggccaaagtgcatttaggtgaggagtctttctcccttataggttttttggagtggatagcttccacttgaggggaggtagttctttttggtcctttttctctttttgaggatatagccgtcttgtatactccctgtatgctttgtggcgattagccttttctaatgcaattcttgtttacttatcaaaaaaaaaaaaggatcatttagtcaggtgggatgtcgtgtgtaaaccgaaggaaatagggggtttgggttttgggaatatttctctgagaaatctcgctcttttagggaaatggttgtggaggtaccctagagagggttcagctctttggcatcaggtcatactaagcatctatggttcacactccaatggttgggatgccaacacaatagtcagatggtcacatcgctgtccttggaaggctatttctcaagtctttcaggagttttcctcgtttactcgatttgtggtaggaaatggggaaataattcgtttctgggaagatttgtggtggggggaccaacctttgggatcccaatatccaagtctatttagagtagtcttggataaaaacatacctatttcttcagttctcggtcctactcgtcctttctcttggaatttaaatttccgtcgtaacttgtcagattctgagattgaggacttagaaggcctcatgcgatctcttgatggagtgcatttatcaccttcggctccagatgccagattgtggcccttgtcttcttcagggcttttttcagttaaatctttctttctagctttatcccaattttttggatctcctcaggtttttccttctaaattcgtttggaattctcaaattcctttcaaagtgcagtccttcatctggttagtggcacacaagaaggtgaatactaatgacatgctacaagtgagaagaccctacaaagcccttagtccggatatttgtattctgtgcatgaagcatggggaatcagctgatcatatttttcttcattgctccttgacaattgggttatggcacaggttatttcagttagctaagatggattgggttcccccgagaagcatccttgacatgatgtacatcaaattcaatggatttggttcgtctaagagggggatagccttgtggcaagctgcaaacatcgctcttattcggattgtgtggagggaaagaaatgcgaggatttttgaggataaagcaaggaattcagagtctctatgggactctattgttttccttgcttctctttgggcctattgttccaaggtttttaaggggactccccttaatgcgatacttcttgattggatagctgtgtgtactccataaggagtggtttttttagagtgtttgcttgtttttcagtgtattttactatagtttagctgtctttggcaggaggattcctcatccttcttttgtactttttatctatcaataaatctttgtgtcgtttccaatcaaaaaatttattcttaggaagttccacaaccatgaactaacttcctgccaaattgtgatgaaaaatttgtatgcaagagtaaaagaaggattttttttttaaattaataatgatgactttaaaatctcaaatatgtacagtcctgttgaaaataattgttttcttattgatttagtcataagaatgaatacattagtttctctttgattaaaggaaggcctttggctgttcttgtctgtttaagggacactatgggaatatgataataggtttataattaccatatcagcttataaatgtgatagttagtgatataagtgctacttcattttgtaatttgtttgttcttttggtgttcttttttgggggattgggttggtttgtccggggagtttcaatatatatatatatatttttaatttcatcattctttgagtattattaggataacaagaaagaagaagtgttatgatgaggtcatttgatgcag

SEQ ID NO: 11146 - DNA, 13999 bp, Vitis vinifera
  Intron number 6 from transcript GSVIVT01022434001 (locus G SVIVG01022434001) derived from phytozome v7.0 (chr-ID chr8 ; pos 2944536 to 2958534)
cttacacatcaaaatcttttgcaccaggtttgatcattttctttctttctctctttttcctccctattcttatcagtaatgtcatttgtgaaaatcatatttcagcattctttcttttttctttttctccgattctaatatgtaatgttgtttgtgaaaattatatctcaactaaatattttacatccactataaagtagttttgtaacatgtgaggaaaaccatttgaatatagaatacaggaaaatcatgtgaaggaattgcttggccaagttaatccagatattgcactgtttcaggaaacaaaaagggagttttgtgataggaggtttgtcggaagtgtgtggaaagttagaaaccaagagtgggctgttcttccagcttgtgggacgtgggaaagggctgtgattatttaggatgctttcaagtttaggtgttcagaggtggttctagggtctttttcaataactttaaatctaattcagatgaagatggaacttcttggcttacctcggtctatggtcctactaattccaattttaggaaagacttctggatggagctacaatatctcttaggcctattttttccgaattgttgtgttggaggggattttaacgttataagaagaagttcagaaaagttaggaggctctagattaaccactagcataaggatttttttatgatagaaagtgagttaatagacccttctcttagaaatgcttatttcacttggtcaaatatgcaagaattacctgtttgcaagaggctagatagatttttattttcaactaagtgggaacaagggttcccttgaagcattcaagaaatgctaccaaattgaccttggatcattgtccaatagttctaaacaccaatccttttaagtggggacccgctccatttagatttaaaaatatgtggttgcatcacccaaatttcaaggaaagatttggcttgtggtggaatgagtattacgttataggttgggaaggtcataaattcatgaaaaagttatagtatgttaaatcaaagttcaaagaatggaacaagatgtcttttggagatttaaaggagatagaaaagtatcctcacagacattgttagctaggatgtcagggaataggaagggaatctgactctagaactttcaacaatgagaaccttaaggaaaggggaattggaagagttgttaaaagaagaggtgttttggaggcaaaaagctaaaatggataaaacaacggaactataacactaagttttttcatatggtggtgaataacaagtggaatgagaaatttataaagtccttgatgtcaaaagagcgggcaatcctagataatatcaaagacatttcagaggagataaagaactttttgcgaaggtaatactccaaaccttcgaggggtcttggaggatagaaggattggattggtctcccatatcaaaagagagtgttgagcgactagatcaaccttttttagaagaggagattcacaatgttgtgtttcaattaaacaaggaaaaggtgcctaggtcggatggatacactgttgcactgcatcaggagtgttgggatgtggttaaggaagatcttttaaatgtcttttcaaagtttcacaataacgagataataaaccaaagcaccaatgctaccttcattgctcttgtgctaaaaaagagtctttcccgtagaaccttagatttcaggcctattagcttggtcactaacttgtacaagatcataactaaggtcttttcaaggcatttatgaaaagtccttcatgagaccatttccttgtaccaaggggcctttgtcgagaggagatagattttggacattgttttgattgctaatgagttagtggacaacaaaaagagaaagtagtagtcttcaaaattgattccgaaaaggcatccatgtagatggggggtttttggaccatgcacttgagagaaaagggtttagtttgaaatggcttggatgagggggtgtttgtccttagtaagttttgcaattttaatgaatggagaagccaaaggttaggttaaggcaaggagatcctctttctccttttctttttactattgttgtatttacaatttgcttatgacactatcttcttctctagagcctctttggaaaattttcaaactttaaagctaattttactagtttttggggttctattagggcttaggatcaatctaaacaagagcattgtctttggcatcaacatgtcacaatcaaatctccaggttggctttgatgcttggatgtatagtctctttttggcctttaatgtacctaggtcttcttttaagggggaatctgaaatcattatcatttgggatccaatgattgatagtctttctaggagattggatggttggaaaaaagcttttttgtcacttgggagtagaataactctaattcatttttgtttatctcacatttcaagttatttcttatcgcttttcaggatttctacatctttagcttcaaggattgaaaaaatgcaaggagattttctatggtcaaggtatggggaaggaaaaaaaggatcatttaattagttgggatccagtgtgtaggcctaaagagtatggtggtttagggtttagtaagatttctctaaggaattgtgcttttattagggaagtggctctagaggttctttaagccttatagtaaaaaaaaaaaaatgtctgaggtattagaaactaccgctattactgctcaattggaaggaatgataactagtcacgatataggagaattgtagaatattcaagcaacatacaaacttaataagaagaattatttaaaatggccatagcttattcgtacctctctaaaggaaaatgggtaattaacttatcttctgggaactagaccaaggaaaggagaccctcggtttgatgcttgggatgagcaagactcaatgattatgacatggttgtggaactcgatgatgcctgaaataagtgatacatgtatgttcttgacaattgctaaagacatttgggatgcagttcaccaggcatactcgaaggcactagatgtaagccaagtgtacgaaataaaagttacgataggagcggcaaaacaaggaaacaagatagtcataaagtacgccaatttgttgaaaaatctattttttttttatagataagcactgaatataatttgttgaaaaatctatgataagaacttgaccactatctatgaattgagacaaaatgccccaaagatgcaacaatgtagaagaatcatatcgaaaaaaatcaagtctacgagtttttatatggtctcaatgttgagtttgaccaagttagagttcaaatatttagcaaagagctcccaactctaaatgagactatctctattatccgagtagaagatagcaagaggaatgtcatgcttgaaccttaaattttggaaggcttggctatggtttccaacatgaaaagtgattagaaggcaaacactactgatcataaaagggctaatcgaccaagggttccaaattgtgataataggaataacttatggtgcacttattgccaataggcaaaacatacatgggagaaatgttggaaactccatggcaagccatccacatctagcagagagtggggttaccatggagggtagtagaaggataatgggcaagtacacttgtcttctgtttaactagttgaagaaagatatttggaacaaggcaggttcaattaggagaagattgaaaaactaagaactttgttgggaactcttgagaaactttcaggtatctgctcactgacacttttaggtaagtttcctatttctattgggttaaaagtctcaaatgaaacctttgccaattcataggttatagattcaggtggcatagatcacatgattcgttcatcacaccaatttaacaactataacccttgtccaagtaataagaaaatagccacaactaatggttcattaaccatcatcgcaagtgtaggagatatccaaattagtcttacactcacttagaaatgtgcttcatgttccaaagttgtctactaatcttgtctctatacaaaagcttacacaaaatttgggttgtaatgtgattttttatcctacttactacgtattttaggatcaggatttggggaagatgattagatttactaaggaatgaactagcaatactaccttgagacactaagcaaaccatccgtatcttttctttctaagcaccacctttttaataaagaaaaaaattggctttatcatcataagcttggacatttgttatttagaactcttaagatcttatttccttctctatttaggaaattagatgttgagagattttcattgtgatgtatgtaaactagccaagtacaagcgttcaaccttttcagtcggtaataaacaaatgttcacctaagtcatagtgatatttgtggtctttcagctgtccctaatatatctaggtagtttgtgtctttcattgatggttgcactagggtctcttggattttattacttaaacacaaattttatgttagttttgttctcccaaatttccataacatgataaaaaaccagtttggtgtcactatcaagaggtttaggtctaacaacgtcaaagattatttcaatcaagttctaactccatactttcaacatgaaggaatacttcatgaatcatcatatgtaaacacctcataacaaaatggagttgttgagaggaaaaatgaccacctctttgatacaacatgagcattttgttctaaaaatatgtgcctaaatcttattggggggaagtcgtcctaactgttgcccgtcttataaaccgattaccttccagaatcttaggtttcaaaaatctcctggacatactcacattattttatcctactatgagaaccacaaatcatctcattcctaagatatttgggtgtgtatcctttgtgtatgctagtcaaaataggggaaaattggatccaagagtagtcaaatgtatttttgtgagataattttcaactcaaaagggatataagttctaccatccactatttaatttatttattcatttttattttttattttttagtcgatgttactttcaaggaactaaatcttatttttccactcctcttcttcagggggagaattccatcaaggaagacaaggatcgggatttctgttttctgtttcattagcccctttctcattaaccctcctaaaatgtttgatccaatagtactgacaacgccaaaattggatccaagagtagtcaaatgtatttttgtgagatattttcaactcaaaagggatataagtgctaccatccaccatccaatttttttttttttttgttttagtcgatgttactttcaaggaaactaaatcttaattttccgctcctcatctaaaaatatgtgcctaaatcttattggggggaagccttcctaaccgccacacatcttataaactgattacccttccagaatcttaggtttcaaaaatctcatggactataagaaccaaaaaccatctcattcctaagatatttgggtgtttgtcctttatatatgctcatagtcaaaataggggaaaatttgatctaagagtagtcaaatgtatttttgtgagatatttttcaactaaaaagggatccaccatttaaaaaaaaaattgttttagttgatgttactttaaaggaaactaaatcttatttttttgctcctcatcttcaggggagattccatcaaggaagacaaggattgggatttctgtttcattaatccctttctcattaaccctctcaaaatgtctgatccaatatctataccctccttccctaaacccgagtcaaccattgaacctactcatatgggttgaatgattatcaaagtgtcctcaagggagaaagttgtagtctttagacttacacaagtccaagattctgaactggtttttggaaatgaggtaacaatttctcatcttcccttacaaactgagttataacttcagtcccatagatcaaaacctccttattgccatcaaaaggggaataagggaatgcactaaatgtcctttgtatccattttcccatattgtgtcatttggaaagttgtttatgtcccataagagctttctcacaagtttaaacaatattcatattcctaccgctctatctgacgttttatctaattgaaattggaaacaaaccatgaatccaaaaatgaagaccttggagaagaataaaaattgggagttggtagatttgcatataagaaaaaagctagtggcatatgagtgggtctatactgttaagtatagagtggatgggtcattagaaaggtacaaagtgagattggtggctaaaagatacagacatatgatgtggattatcaagaaacatttgtcccaattgctaagaagtacacggtcataattttgttatcattggcagcgaattataactatgatctataatagttcaacataaaaaatgcatttctgaatgaagacctgaaagaagagatttatatggaagtcactcctggatttggaagtgacctagtcactaaaaaagtgtgtaaactaaagaaaactctatgcatcctgaaacagtttccaagggcgtggtttggaaggtttgccaaagtaaggaaaaacatgaggtacaaacaaagtgagggagatcatacgtttcatcaagcattgagattcaaggggagttatagctcttttggtgtatgtagatgacatcgtcatgacgggaaatgatgaaaaggagagacatactttaaagcaatgtttgaccaaggaatttgagattaaaaagttaagaagattaaaatacttcctaggaattgaggtttcacattttaagcagggaatttttatttcttaacaaaaatatgcaacaaaccttctcaaagaaacaaggaagtcggtgtataggccagcaagcacaccaatagatcctaatcataagcttagagaggctaaggaatatgttgttgtagatagagagatgtatcaatatttggtaaggagactcatttatctttctcacacaagactagatatagcatatgctgtgaggatgattagccaattcatgcacggtttaaaagagaatcatttgcaaactgttaaccgagtgctacattatcttaaagggtctccaggaaagagcatcttatttaatcaaagctcagggctaatacttgaagcatacacaaacacaaattatgttggatttgtggctaacagaagctcacccattgggtattgcacttttcttggtaggaatttggtcacatggaaaggtaaaaaatagagcttgatggtgaggtccagtaccaaagcaaaatttcacgcaatgactcgaggagtttgtaaactattatggttaaagattattttgaaggatttgaagattaaatgggatgacccaatgaggcttttctgtgataacaaatttacaattagtattgcatataatccaatgcaacatgatcgaatgaaacacataaagataaacagacattttattaaggagaaactagatagtgaattgatttatactcctaatgtatctactgatcgtcgacttgcaaatatactcactaaaggtttaagtagtacaacatttcaagcaaatgtatccaagttgggaatggaaacatctattcactaacttgagattcccaacttgagagggagtggaagaatgaaattaggaaaatcgtagctatataattttgtaatttatgagagaattagataatcctgtaatcagtggatttgatgtaattaggttaggaaggttcctattctggtgctatgaatgtgtgtgtgtatacgtcgatatatacatatgggtctctatacaaattaaaaattagggaagaaatttatttctttcacctttcaattcttgatattctacaataccaactattttgtttttagaactttgctatcaaagcccttttgaatctcattagatgaatgagaggacctagagaaggaacagtctaagctgctaactatatctgggatttgatcaagccaaatattgtatttccaaggacctctctccaacttagataaccgtgaaatcactatagcagaatctccctccaccataatattagaaagatccaaagccttggcttgtaataagccctctaaaagagctaagatctttgcatcaatagctaaacccactcctcctaacactctcaacactataccatggtgatccataatcacacctctaattcccctctgatttgggtcacctagagtacacccgtcaaagtttagcttaatcgaacccaatgaaggtggagtctatattgagagcatcttacaacctaccccctttaacttgtaaaccattttccaatcaagctgtggaatattcaatagggttatggacctgcatttttcacgtgcgtcctcactcaatttgcgagactcgtttttatttggtgaacaatttagttttggaaaagttggagtcaccaattattttattttattttattttaaaagggaaaataaaacaataaaaaaaaccctaaataagtgactctatagtttttggaaaagcgagtctttgaaaaacccgagtataggtctggggattaggttatctattgggaaggtacctctaaaaggtagcacctctctaagccctacaaaggtctctactgactaagttgagggaatttggacaattaattggttgattgagggtacctaggtagactaggtgatttaaaaaatagcatgtcaaacaaaaaaaccaatcacaatcataaagaagatttagggtgtgtacttggactgtttctcaagcgctatcataaaacatcaaagttagtatagaaaatagtatatcatccagcaagcattttatcagaaataatcgaacaatgaaacaaatttcaagacacccaagcactatcaaacatggacgtagttcacaatgacaagcatattcacaaaatttagaaggtgggtgttagggggcatacctggatagcatagataacttgtaatgtgtttccgtaagacatgaggggttagatgataaataataaaataaagaaatcttagcatgcttgttatctaattagcatagcaaaaataatcaaagtatacgaaatcatcaattatcacacacatcttgtatataattcctaaaaaatagatagatatgatttcaacaagtagcaaaggtggtagcaaagatgagttgaaagaaaaaaaaatgatttttatgtaggggtttcaccaattcctcaattgatatacacaaatctagcccaaaattattccatttgtttgggatcacaagcttggattcgcgttccacttaagaccagaatttttattaaaaactaagaaagatgcaaaccgatcaagacatggtcgcttgatatttaagaaaatgaaaatttgattctaaagactttaactgagtttttgaaatagatttttaaagggatcttttgagaaagtgttatgttctaaaataaaataaattaatttgaaaacaataaaatgtaagaaacagaagaccaaacaaaacaaaagaaaacaaaatcacaaagtaaaatttttgacagccgaacaaactaaagtggtgagaatgaaggccaatcttcactatttttcgatggcctctaaaaagtaaatgtgacaagagactgccaaagcgataaactattaatacttagatcaaataaactaacaagatatccatcaagaattaatgactaagattccaggaacacatcaattgataataacaattgagaactaatatgggatcaattaacacacaaacacatttaggctaaaagataggttaaaactaaactaattcggaattaaaaaaacatgaactttatcttataggatcaattaaactaatcacctaaaactctgaaacacacccgaattgaaattggaccaaatgaaatcaagcaaactaaaaacatgaattttcagacataaaatccattttattaatgaactaatattaaaaaaaaaatatttaaacgaaatagatgaatttaatttaatcgaagtagactaaaaacatgatttttttctgttcacatgaaattgattaaaccaaaagataagaaactcacaaacacatctaaactaaaagaaaaaaaaatcaacactaaactaaattggaatgaaaaataagaactttatcatgtagaattaattaaactaattataaagagcatttaaactaacgaaatgaattaaaattaaattaaaacaaaattttaaaaagaacttaccttcaagaatgcatgttgttgtgcttgttggagaatggttcggcttatgtgtttctctaaagatccccccacttagagaagcgatgatggatctcaggaagcacttgagaaacagccacctgtatgaaccggtctgggtcggtgatgattgagatggggacatgtccagacattgcattaagccaagattggaacaaccaaatgaatgaggattcagactcattgaaaagtaatgcacagccaaacaaaactggctggccatgatgattcagccctgtgaatgcagtcaatggtaccctatatcggtttgttctgcatgttgtgtcaaaggtaactgcatcttcaaaatagttacagttcatcctggaaattgcatcagcccaaaatatgtttccagcagaatgatcatcatcatcttgaactgcataatagaaagaaggattttccgcctgcattcgcttcaaatagtccatcacaatctgaccccctccactgagggtcctcttgatggtggggaacacgtctgttcgcttccatggagaatgatctcctcctatctatccattggtggacttcttcccttatgtagccgtgattggtggatttaaacttctccaatggtgtgctgtgatgcttcttgaattaatggtacccttttttggtgtgtgatgctaagagggattgctaagagggatctctaatgatgcagattgtgtgaaagtgagggcggttgtccaataagtgaagaatctggtgctcgtatcaccatacagatgtggctggacctgccatccagcttctatgatgttgagatctgagccactgaatgatccgacaacaacccaaatctgggagatgctcatctcaccatcttgtacggatgggttccacatgcttatttctgcagatgctccgtacaccgcttctggtggttgcgagctcgcgtacgcatactcacggtcattgctacggatatcatcaggagaaacggtgtgcctagcaagagccattcttggttgtttcttccaaaatcatggagcttggcaatgagagaatttgcataaagtgatattcctgctgctaaaagaaaaccaatcacaccaccagcccaaccaataggaaccatagttgtcccagaataccccaaaacaaaagcactgttgattccggtggtgaggacaaaaccgacttgaagccatgaattagtttactggtctgcagaagataaaccaaaagaaatctattcactgacttcccattcaattgtatcgagcacaagaacacctctctctgatctgatgtgccatctttggtatttcaaccgccaaattctcctcaccatttgcctttggagcccgagacttagagctaggcccctccatcatcagctcctctacctccccggaatctcaccctccataaggagtaaataaataaacgcccccctcctccttaccgctgaatgatccccctttccaaaaaaaaatcaccttcctcatccatggcctttatgtcgttcaaagatcaacccccaaaattccacagatgtactccaaatcctccctttgaccagccttcgttccttccctaaaagcataccaaatctttcccctaaaattggcctgatttttctttccaaaacactgcttaatctctccaaaaatagtgtcctttccttccaagaattcccccaccaattttgatttcgaatgcctactgtatggtaggtatgccaccctttcctttggtagtgtgttgaccctgctcttatatacaacatatttccattttttacatggcagcctgcagagaatatatggaagagtagaaaatcaggaaaataataagagaattatgcaacccgcccacttaatcaatcctcaaacggtgtatggaatcatgtcctttaaatgtgaagttcatagggttcttttcctttttggaatggtaagtccaccttccaaagtgacatcctctccataaaacaaaagaaagtagaaggttagtaaccatatattaataataaaataataaaatttgaaaatcttaaaaagtaggataaaaaatcttgtaattgaaaattaaaaattaaaattatataattaaagctaaaatattaatcgcattaaaagaattaaaatcatgaagctcaagcaatttcctacaaaaataaataaatgaataaagtgaagtaagtatataaatatatatgaaatatcaattcatgcaattaggaaaaactaaaatctcaattctcatgcaattttctaaaaaatgaataagtaaatgaatgaaactaataataataaaaataaaaaataaaaaaatcaagcacatgctagtcatacaagccatgcaaccatacttgaaaggtgacctaagcaagactaggtaaacctaaatgggccaaggcgtgccaaaatgggcccaggtgagcctaggtgggcctaagtgagcctaagtgggccaagtgcatttaaatgggcctagggtgcctaaagggtctaagatggtgcctaatgggccaagtgtacctaaatgggcctagggtgcctaagtgggcctaagtctaaattagggttgccaagggtcacaatgagttagataaatccctcaaccaaagtccccaaagtggcttagaaaagataggctacacgagtagtaatgggccaccagagaattgttgtaaagtaccgaacaaatacctaataggacatgtgctaggaggataaaatggagggtctacaagagtgctctcaaagatgaagaggaagaagttgaaaatgatgaatagaaatgtattagatcagaaatagattctaaggtctccatttatcttaaaaaatcattgtgtttcctctccctccaaactatccataaattaaataggtgtgagaaaaggagaacaaaattctagttgattgtaaataacgttaggctcttgttggacattgtatcttagttatgcactgtaatttagcacattgtagagaatgagaaaaaagagaaattaggttatatatctgtgaccttttgccatgagattagagattgcacaaatctgatatctagagtcaatctaacacgcgacactaggtaccctatctccacagtttatgataaagaaagtgtgaaatcattaccacaatgaattatctctgttgaatcttttctttagtgaggaagtggaattaatcagtgaagcttaggttaaaaaaattttgtggtctttatttctcagtgtcaagaatcgtaaaattagacaacaataaattgattttcttcaaagtgcatttcctttttgatcttgttatagttctagttgcattgtaaatgtccttaattgtatccttgggaggataaatatttaataagccagttctgccaccaaattgactttcatttatttatattgcatttggtatgctacactcttctaggttttttttttctttaattgaaaaatgaccaaaatatgttgtaactggttttgtctatttctatcttgtttttatgttccatgtccctcctttctcttttctcttgaattgaagtcaagacttatcttaattatatttctaacttactattgaagtgatttctgcttccaatgttttgtagataaagaacttgtgggatattgttcctgctgaacc

SEQ ID NO: 11147 - DNA, 14680 bp, Vitis vinifera
  Intron number 18 from transcript GSVIVT01038529001 (locus GSVIVG01038529001) derived from phytozome v7.0 (chr-ID chr 3; pos 11124259 to 11138938)
tcttaaatttggggaatcaaatcttcaggttggaggtcagttgtttccttttgcagcttgcacttagagagttatcttctccttttatcttgccacaagaaatcgccttttactttaccttttaataatgaagatacatgaagtgaaaatgatatacatctaatttgcatgacactacctgtttcctggagatatattgccttatcattggaaagtaagggttttagttgttttatccaggggaaagtgcttcttgttaaagaacaaggaataagaaaaaaggatgtgtttttctcttctttcattttgttcttaattaaatagaaaataataatctgaagtaaaaatattacatactgaaccctataataaccctaacacttaaaagtacaataatacccctacaaattatttttaacaatccccctcaagttggagcatagaaattttcaatgcctaacttggaataaaaagatcactaacataagaaataatcacatcacctcaatatgtttaatgcactcatgaaacattggattacttggaatatatgtagcaacttgattatcacaagacataaccataagcttcttagtttcaacactgagttctttcataaggttttgtatccacgtgaactcacaagcagcatgattctctactttagaactaaatctaaccataacatcttgcattttacttttccatgttaccaaattacctcccacaaaagtgcaatactcattagtagatcgtttattagataaaaaatcagcttaatgagcatctgaacaagtgacaatgtcaacttcaattttcttatagaaaatactcattctacctatttctttaaaacattcaagagtacaacaaattggatcctagtacacttgcttaggacactccgtatattgactaacaatactcacatcaaagataatatcaggatgtgtcacgatcaaatatgtgaattttccaacaagacttctatgccttcttgtatcagcaaattctacactatctactctaactacgcattaggatccatgggtgcattatatgtttaaatcctaatatactagtctcataaatcttacacatttctctgagacaaaaccaatggggcaacatctaaccaacttagatctttaatttgaaaagtatttttcaactctgttttctcctcttcaatctcatacgaatcattactagatacaagtatatcatcaacgtaaataattaaagccttcattcctaacccatgcattctttacaaagattgagtcatttgagttacatctagaaaaaacaagagagatcaacactccactatgtttatcaaaccatgcttgaggggattgcttcaatctatatatggctttcttcaacctacacaccttccttagcttccccaatgcaaaaaacttgggtggttgcttgattagcactcaaaactagtgtttttccatatataaaaataagtttttgaataatgtttgagtgcaaatcattatcttttagcttaaatatgtgctaagccctaaattgaggactaatgtttacatctagtgaagaatgcaatgaaaaaaaagaattttgatatataaaagtgtatttcgacaccactttgatacatgggagcagagtcaatctggatatagtgagtttagggtgttatcaaaatgaatttcgatactagacgacacataatttgataccaggatacatatcatttcgatccaattttgatacaagaaatgcatttcgatacccatttcaataccctagtgaggtattgaaatcaccaacctcaaaccttacagagatccaatgagtttaggagtttattgaaatggatttcaacaccattttgatacaagagatgaatttcgatacccattttgatacagtggtggtatctaaattttcctgtaaaagcattccaaagatacaaaaagtttgaaggtctatcgaaatgaatttcaatacattgttgttgaaagagagagagagaaaaccttaattctcattcatatgattaacttcttacaatagagaaatatataaacaaggctaggttgaactaactaccatatatgtgacctatattaagaaaggaaagaaagattgtacactataaatacattatattcaacactctccctcaagctagagcatatatgtcatatgcaccaagcttgttacaaatgtatttaatcctaagacctctgagagatttagtgaagatgtctgctagttgatcatttgaattaacaaaacttgtagcaacacaccctggtgcgatcttctctctaatgaagtgacagtcaacttcaatatgcttggtcttttcatgaaagactggattggatgcaatatgtaatgcggcctgattgtcacagactagttttatctgttcatcttttccaaatctcaattcctaaaggagttgcctcaaccatatgagttcacatgttactaaagtcatagctcgatactcagcttctgcgcttgatctggccactacatcttgtttcttactcttctaggatattaagttacctccaataaaaacacaataccctgaggtggaacgcctatctgagggtgaaccagcccagtctacatctgtgtaaccaacaatttgggtatggcccctgtcttcatacaacataacttggcctggtgttcctttaatatatcgaagaatgaggatcacaacatcccaatggttgtcacatggtgactgtagaaattaactaaccacactcacaggaaaagagatgtctggccgagtgatggtgaggtagttcagtttgcctacaagtcgtcgatatcttccaagatctcttagaggctccccctatcctggtacaagtttgacatttggatccataggagtgtcaacaggtttacattctaacatacccgtttcttccaagatgtctaaggcatacttcctttgtgacataaccacacctgaactggattgagctatttcaagtcccagaaagtacttgagtttgcccaagtctttggtttgaaagtggttgaaaatgtgttgctttagtctttggataccctcctgatcactgcttgtaatgacaatgtcatccacataaactaccaaatagatgcattggctcgaagagttatgatgatagaaaactgaatgatctgcttcactccgaagcattccaaactcttgaacaactgaactaaaacgcccaaaccatgcccaaggagactgtttcaagccatataaagagcggcgtaacttgcacactaaaccagactccctctaagcaaaaaaaccagatggttgctccatatacacttcctcgagaagttcaccatgaaggaaagcattcttaatatccaattgataaagtggccaatgacacatagctaccatggagagaaataagcgaacagaagcaatcttggcaacaggagagaatgtgtctccatagtcataaccataaatctgagtataacctttagcaaccaagcgggcctcaaggcgatcaacctgaccatcaagaccaactttaacagtgtagacccaacgacatccaattgtagatttaccaggaggtaaagaaacaagatcccatgtgtcattggagtgtagagtagtcatttcatcaaccattgtctgtcgccacccaggatgagaaagtgcctcactagtgctcttaggaagagaaatagaggataaagtagagacaaaggcaaaataggataaagataatcgatggtagctcaaaaaattataaataggatgaggattacgagtagatcgattacctttccgaagagcaataggcaaatggtcagtagatgacagggttggggtaggagaaatcgatgggacaggaggtgagtcatcaggtacctcagctgaagagagagaaggagcaacagcacgatgtcgacgatgataaacctgaagaggacgagagagcgcatctgaagggtgggatatataaggaagtggcaatacttcagaaatgggaagagattcagaggatgagaagaatggagagtcctcaaagaaggtgacatcagtagagagaaaataacgatgagtattaggggaatatcaacgataacccttctgaagtcgagagtatcccaagaagatgcatttcgtaaccttggcggagagcttgtcctgtccaggtgtgagagtatgaacaaaacaagtatagccaaagacacgaggaggaatggaataaagaggttgggtaggaaaaaggagggaatgagggatttggtcatgtaatatagatgagggcatacgattaatcaagtaacagtctgtaagaatagcatccccctaaaaacgaaaaggaacatgactagagaaggagggtatgagctgtctcaacaagatgtcgatttttatgttcagcaaccccattttgttgaggagtatgagcacaagatgacggatggaggatcccatgttggaacataaaagaagtaaagggtataaaaaaatattcccgagcattgtcattgcgtaacactcaaatagaaacattgaattgtgtttggatttcagcataaaaattttggaaaatagagaataaatcaactcgatttttcatcaaaaataaccaagtacatcttgaatagtcatcaatgaaagtgacaaaatattgaaatcctaaaatagacgcggtccgacacagaccccaaacatcagtgtggacaagttcaaaaggagactttgcccgattattcaaatgctttgggaacgagacacgagtatgtttcccaagctgatacgactcacacgcaagcgacgacaaagtggaaaaacgagggaccatcttctagaacttggagagaataggatgacccagacgactatgaatgagaagagaagcatcggtggaaatgcaagctgcaggagatgaaggtgatgtgaggtgatagagtccttgagactcacgccttatgccaatcgtcttccccatacttcggtcctgcaagatcacagatttatcagaaaaagtgatagaacagttaagagtgcgagttattttgctgatggaaataagattaaatggacacttaagggcataaaggacagaatggagaggtagggaagggggaggatgagccaaaccaatacctttagccatagtttgggaaccattagctaaagtaacagtaggtaaggcaaaggtagtagtaatagaggagaaaaggtgtttattaccagagatatgatcagatgctccaaaatctagaatccatgggccaagagaaggagactgagtaaagtagatagagacattaccgatctgggcaacagaagtaacagaagcttatgtggctgcctgatgtcggagattggcatcataatcactaccaataagggtgatactctgagatgtggagctcgcagtggaatcaagtcgagatagcagaggatcagatgactgagcaatgtgggcagtgcgaagaggctgtccatgtaactgatagcaacgatctcgagtgtaaccaagcttattacattaggtacactgaggacgttgtcctcgaccccgattgccactacgtcctcctcgagagttagtttgagaggctaacacaaatgaatttgaaggaccattagtcgacaaggtctgagtagaggagaggcgtaagagacgagcgaacacatcatccaatgatggtattgatggactagcaagaatctgatctcggacagactcaagatctggacagagaccaatgagggttaataccataaagaacttgtcagtctgtgtttgttgagcttcagcaccattagtgaagggcatcaaagtaaagaattcctccttaagagacgcaatccggccaatataagtagacagatccatgtcctgctgtctcacatgaacaatatcataaaccaccttataaaatcgttgaatatcattcgtgtataatcctttagtctgagtccaaaatttaaagtaggttttgtaggcacgaagatgatgtaaaattttgggatcaacagattgtcataatacgctgcataattgtgcatcgattttcttccatcgcactttgtcaacattaggtatagcatcctcaggtgtaacaagatgatcctcataaccttgtcccataaaccaaagttccacggacgctgaccaggagagataattctcactaccaatcaatttttccgatgtgatagtaggagatccagagatgacggatgtaaaataggatttttagtcgccatatccacttcacttgagattgaatcacgtttggatcgaaaagagccctaaagggaggtcggatcacagctttggaagaagaacctggtatgtcgggacccaaacaaaggagaaaagtgactggagatgaagaagaggccttcccaaggcacacacaggtctcggccaaggaagggagctgctgtcggaggctgaaagaagacccgaggaggctgaaataccaaaaaaaatggagaagcagggttcgaagaggactgacggaggcttagaagtgcaaaatgatgtgggacgagcctgctggtagaaactcggcaccaaaaagtgggccacgcgccctcacgtgccggcgcgtgggattcaggccgccggagaaaaatggcgcgtgggaggcgcgtggatcggtttttggctctggtgctttgagaaaggtgcagatctcctctttgcgctcctgatgatgtggtcgatgtcggaaaatatcgccggaaaaaaaaagtcgtcggaaaaatgttgacggtgatgagggttttctgaccacaatatggctgaccggaatgaaacacgggcactggacggattcccgaaattaattacatgggtaaactagaaagaataaagttttctcccttggctctgataccatgttgaaagagagagagagaaaaccttaattctcattcatatgattaacttgttgcaatagagaaatatatatacaaggctaggttgaactaactaccatatatgtgacctatattaagaaaggaaagaaagattgtacactataaatacattatattcaacaattgtgataccattttcatacacgaagatacattttgatacattttgatacaattttgatactacacaatacataaagatacattgtgatacatgtcaaaattaatccaataccacattagaagcaagtcagaggtccagaaggttgggcatgtgttgaaattcatttcgacaccattgtgaaggtattgaaatttccaatacgagctacaatttccagaatttctctccaagactttccttattcgactcttttgcatgtgtttggacatttaaagaccttattcatgtttttagggttagttttatataaataccatagatttctttaggaacagagatcaaagagaagagagagaagttttgagtttggatacaatttttataatcatttggttttcaataaaatctctcatgattcagtttaattcaatgcatggtgttaatccgagcatgagtggataaattctgtctctagagatgtagcaatgaaggtggatgatttaggagagagagatgataagaaaaggtgatatctttccatgatagtaagtttctaatctttaaattttgtaagcaaatttaattctttgctagttcgtctctattagagatacataggatgcatgataggagtcctttgatgaataagggattgtgatcaatggccgacttggtgtgatcctatgtgattgataattgaggagaatttatcaaatgaatattgggttttaaatgtcttaaagattaaaactttttatcatattatttgttagaagactgttagaggatggatttcaaattttaaaatatggttccggacttagatgacctatattggtgattcaatcttagaataccaaaaattctttaacgaatacttgttatccctcaacccaaatcagaaactggatttgtgaaaatctccagatttaattatcctagttttctcggtttatcaatcaaatcacattttatatccaatcaatttttcataaaaatcattacatgatttggtttgggaaaaattagttaaattttctgattccctgaggatgataacttgaaatactacaagttatggttgtcttttctgtggtttttcttgaccaagatcacaacataattaggctttagtattttatttaccacagagattcacaatcattgctccatatagacttcttcctacaaatcatcatgtaaaaatgtatttattatatcaatttggtataaaggtcaattcaaatggacaactatcaaaattagagagcccactaaattgagtttagccacaagtaaataagtctcaaagtaatcaatattgtatatttgcatatataacttaggaaccaattacactttcaacctctcaatagtatcacccgagtggtattttacaacaaagacccacctacaactaacaattttcttatctttggtaaagtagttaaatcctatgtcatggttatacaaagtattaattttttcttccataaaatctttctaaccaagatgagagaaagcctcctagtgagtcttagtaatagaaatagccaatagagagagaatgagagattaaaaagaagaagaaaaatgagtacaatcaagatatttagaaagatgatattgactaatggttatcttaccctttccaaagaccattagggagatgaagatcatatgaagtcaaagggtcaatagtaggaactaaaactttgttagaagttgatagttaatggtgggttgattagctagaggaacaatctcaaccattgccaccttccttctcacatatactgatgcatctttacagatgccacgacgccctcaacatgtgatcaaaagaaatcccaagtatcttgagtgatgacacatgtataggagccatgcaagtggtttattgaatcggtccaaggggagaaaaagtcagctccgagaattgggatgattgagcaaccatgtgcaagctagaacaagtccgagtggtagtagaagaaataaagtagttgttgcagattgtttcatttatttcgcattctatttccgttatttgatttcattgtaatcatggacctttagtttcgactacacatgctgaaggttcgttaggttgttttatttataatcctaggacatgaatgagaggggagcatttttttatccaattacatttgtggtggtacaattctcacccgaagagaatacaaactttgttgctattgctaactagctttgactgggacctcatcaagtggcatcaaagccaagtgcaatgactactaacaaagaatgcattgagaatccggaggcaggactcgacggtttgtaggtagggatggaccggatggaacttggcgttgttgacaagttgcaccaccttgaggagaccacccgcctcttggaagctttgttttccaacaaggagggttcttcccataacaacaaccccaaggatcgtgacggtcattctcgcaacaactaggaggacaatcgcgatgagacggatggtggccagtcagtcttttaatccaagatggctaagctcaaatttccatggttttccggggatgacctaatagaatggttcaaccacatggaccaattctttgggtttcaaggcaccaccaacgtgcagaaagtttcattggcatccttccatctcgagggtgaagccaatcaatggtggcaatggttacgtcgtgcttacaaggaagggtgaatggtgacatgggaaattttttaagaagagctatgggcttgttttggtccccataaagtgtgaagactttgtcgaggctctctccagagttacacaagtcggatccctttgcgattaccaaaaagagttcgagaggctaggtaattgagttcatagctagacacaaaaggccctgataggaacgtttatgggtgggctaaagtcagaaatctcaaaagctatctgaatgtttaagctaaggacactaaaagaagccataaacttgacacgcatgaaagacgagcagctcattcgacaaagaaaattcgctcgtccatcccttccagctcgcgcgcttccacccccaacaaggactgcactttcttcttcagtaaagcgattgacttgggacgaaatgcaacggagacacgcacaagggctctgttttaactgcaatgataggtttatggcgggacacacgtgccggggacctcaactgttgttgttagagagccataccgacaaccatggaattatttgtgaggatgttacagaggagaatccgacaaaggacaaaaaagaggagctgcccgagcctgagatctctctccacacactaacagggtggtccacacccaagactatgagggatcaaagctcatattggcaatcaagatttgatggtgctcattgataatggatccacacacaatttcatcaatgcgaaaatggcagacaaactttaactcctaattatacctacggatccctttactgtgcgtgtggctgacggaaatcaactccaatgtagaggaagattcgagcaagtttgggttaacttgcaaggtataccatttgcattgactcttcattcgctacctctcacaggacttgacctcgtgttaggagtacaatggcttgaacaattagggccaatggtttgtaattggcaaaggatgaccatggagtttcattggaaagatcaagcacgtaagctgcaaggatcaaataatcccaccacatcggcttcattgaaggttgtgtctaaagaggtcaaccaagggagttcaacttttgctatttaccttcaaaccatgtacgaggtagataagccaacatacatccaaacatgcaaaaggcaatcgaggcttatactgatattttttatgagcccacgaagctacctccgacccatgcagtggaccactgcattccactcaaggatggtattgagcccatcaatgtatggccttataggtatgcccattttcaaaaggctgaaatagagaaacaagttcatgacattatttaaattggggcttataaaacctagcactagccctctttcttcacctgtcttattagttaaaaagaaagatgggacttggcatttttgtactgattataaagcacttaatgttgtgactattaaagataagttccccattcctacagttgatgatatgcttgatgagccccatggagttgcctattttaccaaattagatctaagggcaagataccttcatgtgcgagttagtccctatgacactcataaaactgcctttcatacacataatggtcactatgaatatatggtcatgccctttggactttataatgccccttcgactttccaagctattatgaactctattttttgaccgtatcttcgtaaattcatattagtcttttttttatgatatattggtttatagccccaattggaccatgcatcttgaacatgttatgaaagcttttgaaattttgaggcaacaccaattttttattaaagccaacaagtgtgcttttgggcaacaagaattggagtatatgggtcacatagtgacaaaccatggggtcaaggtggaccagagcgaaattgaggtaatggttaatcggccacgacctaataatatttcagaattacgtgggtttttgggtcttacaggctattataggaagttcatacgaaactatgggctcctggcaaggcccctcaccaacctattgaagaaaggccagttcgagtggaatgatgaggtcgagcaggccttccttgggctcaaatacgctatgaccacgacaccaattttggcaatgccgaatttcagtgagccttttaccatcgagacagaagcttctagtgacggcattggagcagtattcacccaacaaggcctacccattgtcttcatgagccgagcattaggggttaccaaactttcttgctctacatatgccaaagaaattttggccatactccaggcgatacaaacgtggagaccatatctgctcggtgaaaagttcttccagcaaaacctcaaatacccattggagcagcgaattgtgaccccagaacagcaaaaaaaggtggccaaactgcaaggctacggctatgaaattatttattgtccaggacgtgagaattcagttgcggaagtgttgtctcgtgtacctggagtcctcttcttaatgccttatttgtgtcgcaggttggattatgggaagacataaaaacgactacaaaagaccacccatatatggagcatatacgcaaacaagcccagaataatccggggaagtcatgctgggcaagacggactggttttctataaaactcgagtagtcgtgccacccaacactccattgattaaccagttgctccaagaattccatgatgctcggataggaggtcattcaggtgttttgaggacattcaaacggttggcgcaacaattttattagccacctatgcatcgcacagttcaggagtatgttaaatcgtgtgacttgccagaagaataaagttgacaatctttccccggcaagacttcttcaacacaatcaataataatactctggtgtttgccattaaaattagttggtcatcatcactactggctttaaaataagagcttggcatctgtatgacaccttgtttcagtttggaaactgaaagtgaatgtgcttctccacaagcacacacatataaagaagttttaaaatttttctgttacaaactaaaaatattgttattttgttaatttgatctgccaggtctgtgagccctattaggtatagtatgaatagacagagaaaatcaaatttgatatcaactacacatcttataccagtggcagagccacataaggcctctctctgtgtgtgggtgtgggggagagagggggttgtgggttttggcacaggcaagtgcccccctgaaatatgggaaaaaatgttggcacatagaggtgatccttttcccttgggtttgcttgaaagccaaagttaccaccaggttatgtaattgatttgtggtctattttgcccacctgaaataaattatcattctttccctactcaacttattttctgactctgccgctatcatatactatagggaagttctcacttatttcctttggctttttatgtcccatgccattatcccaggataatatgcttgtggcctgaattttgttatgcatccaaatgtttatgtgaaacccatagttcacatatcatgataaactcataatattgaggcattgcaaaatgctagtcaacttttaaaacctattccattaccagatatgatgataatcattgaataacatgtatttttaacatcatcagattactatgaagaaatttggtttagtttcaagttactatgctcaaagtcagtatcttattctgtgatttttttccccctactttttgttcttttcaagtgttctggcgcttgtattgcctttttggattgatgttttggtaaatatgttgcatggatatggtgataaatcaccatttagacactcttcaagcataggtttcttagagggtaaggaagaaaaaatatttttaagatgccaatagctgtctcccaaagttcacaaagaaagaactcaatgcctctcttgcaatcttctaatggcatacctgaattgaagcactgaaggagcaccaataccttgagagtacatatggtgcaagatgattccacaggaggattctctgctgaaggcatcaaatgatcacagatccatgaaatatgtgctgtagacccactttcaaccttgtaaaagatctctatacaagatgatgagtgggtcagttctatctataatatgtagctaaaatggtggaaactaatttgaacaccatcaagatcatgaatttcttagagaaatggcaaaaaagaagacaaccccatcaatggtgctcacctgagcaactcaaagttctttgattcaaatttatgacttctttgtcctcaacgaaatcagaatgcctaaaatgctcttatacttcttgaagatctaaatttcaaaatgaggttcttgaaatatatactccctgtttctttcaaataatatattatttttatgtaattgagaggaaattgctttgttattattttagaggtaatagattctgcagtcaaataataaactacttgtgattcacatatttttcccgttgaatacttttcatgtttctgccatatttgaaattgctgacaggattttgcctgttgttatgactagaagtctaggcatatttttctgcaaggttcttgattctacttttgaagcaatagagtttgaattaagatttaaatttagcttgatgcatcatggatggatgtttttagaaagaaattaatggcatggattctatgcgattttttcttaaatgttaagaaacctttcaattgtgtgtagttaggaaccgatctctttcaatggtgtaaattattattgagccatttcaattacttctaaatttctaattgtgtgctatttttctttttcaagcttttgcctccactaatgttattaatataatcttttctagcttctattgcctattggtttatacctgcatgtgttcatctgtttcaggttacctc

SEQ ID NO: 11148 - DNA, 13504 bp, Vitis vinifera
  Intron number 8 from transcript GSVIVT01026721001 (locus G SVIVG01026721001) derived from phytozome v7.0 (chr-ID chr1 5; pos 5569120 to 5582623)
tttagtgttttgctgctggtaggtttggtttatctcttgcacttgttgaaggatattacaaacttgatacttttatcctctttctgatatgtagtatgttcagtcactttctaactagtttaaaatgttagtttataggaaaatggtgcttcctgaaatttaatatgcttattggaagatatttttttgacatcatttagggggaaactccaatataggtacattcctaatagttttaccaactgtaccacttcagtttagactcatgattgaagttttggttgctattccatcctcccactagtatgaacatggctgaatgttctctctaggttgagttttggttggcaaacaaactgacatatattgaagtttcaacaaaattaatataaaataataaactgcctcattgagtgtgtttgcctatgttaagctgcccctgtatgctttgtatgagattccaattagctaatttagctgaaattttcattttaatttatttgatcacttgattttggccacttagcccctttgtaccctctgtctagccaactattttgataattaacttgttacttgcccatgcttaattccaaagaggggtagatcttttctccaattgtgtcttttggttttttatctttatatttgattggttgcaagtggtagacaacttggtaacagttgaagattattacaactataatatacaactgtggaagatatacaactatgtatactatgaaaagagagaaaagggagaatccctaatttttgttattgaaaaactgttaataatacacattgaacttgggtatatatatacatgttagtgggacccacaatacaataaggaaagaaaaggaaaagaaaaagtgaataacctaaataactgtacactatctaacactccccctcaagctggagcatatatgttatatgcaccaagtttgttacaaatgtatttaattctaggacctctgagagatttagtaaaaatatctgctagttgatcatttgaattgacaaaactagtcgccacacatcctgatgcgatcttctctctaatgaagtgacaatcaacttcaatgtgtttggtcctttcatggaagactggattggatgcaatatgcaaagcggcttggttgtcacagatgagcttcatctgttcatcctttccaaatctcaactcctgaagaagatgcgtcagtcatatgagttcacatgttgccagagtcataactcgatactcggcttcagcactagatctggtcactacatcttatttgttactcttccaagatattaggttacctccaataaaaacacaatatccggaagtggaacgtctatttgtgggtgagccagcccaatctgcatctgtgtaaccaacaacctaggtatgacctttgttctcatacaacacaccttgggctggtgtgcttttgatatatcgaagaatgcggattacaacatccaaatggctatcacatggtgactgtaggaattgactaacaacacttataggaaaagaaatgtctggacgagtaatgatgaggtagttcagtttacctacaagtcgtcgatatctcctaggatctcctaaaggctccccctgtcctggtataagtttgacatttggatctataggagtgtctaccggtttacagtctaacatacctgtttcttccaagatgtttaaagcatacttcctttgggaaagaaccacaccggaactggattgagctatctcaatccctaagaaatacttgagtttccctaagtctttagtctgaaagtgggtgaaaaggtgttgctttagtttctgaataccattttgatcattgcctataatgacgatgtcgtccacataaactaccagataaatacactgccccgaagagttatgatgatagaaaacggaatggattgctgtactgcggaacatgccaaactcctgaacaacagaactaaaacggctaaaccatgctcgaggagattgtttacagccatatagagaatgacgtaacctgcacactaaaccagactccccctgagcaacaaaaccaggtggttgctccatataaacttccttagcaagatccccatgaaggaaagcatttttaatatctaactgataaagaggccaagaacgcatagcagccatggagagcaatagataaacagaagctatcttggcaacaggagagaaagtgtcaccataatcagaaccataaacctgagtatagcctttagcaactaagtaggccttaaggcaatcaatctgaccatcagggtcaaccttaactgtgtaaacccaatgacaaccaactgtaaatttaccagagggtaaaacaacaagatcccaagtgtcattggagtgtaaagcagtcatttcatctaccattgcctgtcgccagcctggatgggaaagagcctcatgggtgctcttgggaagagaaacagaaaatatagtagaaacaaatgcagaataaggtgaagataatcgatggtaactcaaaaaattgtaaatgggatgaggattacgagtaaatcaattacctttccgaagagcaatgggtaagttagcagaaggaggccgagccagggcaagagaagccaaagggataggaagtgagtcagcaggtacctcggccagagaaggaggaacagtgacacgatgacggcgatgataaacctgaagtgggcgagaaggcactgcatcaggtggggagataatgggaaggggtaagacttcagaaacaagaagagactcaaaggtggagaagaatggtgagtcctcaaagaaagtgacatcagcggagagaaagtagtaataagtctcagatgaataacaacgataacccttttgaagtctggaatatcccaagaagatgcattttgtggctttggcagaaagtttgtcctgtccaggagtgagaatatgaacaaagcaagtacaaccaaaaacacgaggaggaaggaaataaagtggttggtcagggaaaagaagggaatgaggaatctaatcgtgtaatatagatgagggcatacgattaatcaaataacatgttgtaagaacagcgtccccccaaaaacaaaagggaacattactatggagaaggagagtacgagttgtctcaacaaaatgtcgattcttatgttcaactaccccattttgttgaggagtatgagtacaagaagactgatgaaggatcccatgttaggacataaatgaagtaaatggtgtagaaaaatattccctggcattatcactgcgtaacacacgaatagaaatattgaactgggtttggatttcagcataaaatttctggaaaatagagaataactcagctcgattttttattaaaaataaccaagtacatcgagaatagtcatcaatgaaagtgacaaaatactgaaatcttaaagtagacgcggtccgacaaggaccccaaacatcagtgtggataagttcaaaaggaaactttgcccgattattcaaacgctttgagaacgagacacgagtatgtttcccaagctaacaggactcacacgcaagcaacgacaaagatgaaaaacgagggaccattttctggaacttggatagactagggtggcccaggcgactgtggatgaggaggggagcatcagtggaaatgcaaactacaggagttgaaggcgaggtgaggcgatagaggccttgagactcatgtcctatgccaatcgtcttccccgtactccggtcctgcaaggtcacaaatttatcagagaaagtgatagaacagttaagagtacgagttattttgctgatggaaataagattaaaaggacactcaagggcataaaggacagaatggagaggtagggaagggagaggatgagttaaaccaaaacctttagccatagtttcggaaccattagttaaagtaacagtaggtaaggcagaggtagtagtaatagaagagaaaagatccttattaccagatatgtgatcaaaagcaccagaatctagaatccaaggtctaagagaagatgtgtgggtaagacaagtagaagcattgccagtctgggcaacagaagcaacaaaagctgacttggtggcctgatagtgaagatagtcatcatactcactgtcagtgagggaaataccctgagatgtggaggaactgggaggctgaggcggctgaggatcagatgactgggccacatgggtagtacgaggaggccgcccatgtaactgataacaccgatcacgagtgtggccaagcttattgcaataggtgcaatgaggacgttggcctctacctcggttaccagtgcgtcctcctcgagagttagtttgagaaactaacacagaagaatatgaagtgttatcaaatggcaaagtctgagtggaggagatacggaggaggcgagcaaacacatcatccaaggatggaacggaggaactgccaagaatctgatcgcagacggtctcaagatctagacggaggccaataagcgtaagaaccatgaagaacttgtcaatctgtgttcgttgatccccaacatcagtagtaagaggcatcacggtcaagaattcctccttaagagagacaatctggccaatataagtagataaatccatgtcttgttgtctgacattgacaatagaagaagccaccttataaaaacgttggatatcattcgtgtatagccctttcgcctaattccaaaatttaaagcatgttttgtaggcccgaagatgaagcagaatcttaggatcaactgattgccataacacactacataactgagcatctatcttcctccattgtactctgtcaacctcatggatatccgcctcctgcataacctggtgattctcataaccttgacccataaccaaagctccatagagttagaccaaggcaaataattttcactgccaaccaatttctccgaagtaatcataggagatccaaatatgacaagaggaaaaaatgaaacttttagtagtcatatctacttatctggagaacaaaatatgtttggatcgaagagaaccctaatatggcttcaaatcgcggctgagaatctccctccggtgctttgacaaaacttgaagatctccttgcgcacctgatggtatggtcggtgtcggaaaaggactttgccggaaaaagtcgccggtggtgagggttttctaacggcgatatggttgatcggaaagctttaggagatgggaaaggtgaccagaatgaaatacagtcactaaaaggtttcccagaattgattcacggataaaccggaaataattaggttttttttttctccctaggctctgataccatgtgaaaagagagaaaagggagaatccctaatttttgttattgaaaaactattaataatacacattggacttgggtatatatatacatgttagtgggacccacaatacaataaggaaagaaaaggaaaaggaaaagtaaataacctaaataaccatacactatctaacatatacagtcgtaatatatggttgtgtgtttttgtatcgctatatgcatatctatgtatgtagatttatgtatatttgtgtatataatccttgatttgtagggatctttaatagggtagtttccaattctttccttattctttcttttctttgttatatatatttttaaggttgtaaacttttaaatatgaatgagaaatgcaatttttatacacatgttatcagacccgaattaggctgcttgggatttttttcttttcaaccttcattgttgagttgtagtacctgttttcctttgttttttgaatcctagtttgacgaccttcattgccatttcaagggcactctactatatttttctctaaaactattcatgaattctacccaccatgtttgagattgttgacaactccaacattgcccaaactcaagtaactgatggcatgaatccttcatcaatggctgatttatgtatatttgtgtatataatccttgatttgtagggatctttaatagggtagtttccaattctttccttattctttcttttctttgttgtatatatttttaaggttgtaaacttttaaatatgaatgagaaatgcaatttttatccacatgttatcagacccgaattaggctgcttgggatttttttcttttcaaccttcattattgagttgtagtacctgttttcctttgttttttgaatcctagtttgatggccttcattgccatttcaaaggcactctactatatttttctctaaaactattcatgaattctacccaccatgtttgagattgttgacaactccaacattgcccaaactcaagtaactgacggcatgaatccttcatcaatggctgatttgtccaaaacaatgaactaggacactatttggtgtacctactacaagaagctgagatgtggaaatccagaaggtacatctataccgccagctgtactgcatacaattgtttcttattctaattttatttcctgattttatgaaagactctcttaaaattaaggattagattttttttttttctaaggcaaaggaccttagtcattcatgtataaatatcaatgcaagaatcactttggaagtagagtgaaaaataagagaagttttttttctctctaatttcttcatggtattagagctaattctgaaccattcaatctgtctataaccaaatacggaatggccaccaagaaggactctttaaccttagaagtcacctccactcaagaaacctttacccaacatttgagaagttgtctcagaagtgcgtcaagaagaaagtagaatgaaagtcatgttgaggtcacaaaccaaccaacctgtcaccaagggttcagccttagcggcttggggtcctcccaatctaatgacaatcgaccaagaaaagggagacctgggtgtgatcattgccgaaaaccaggtcacaccaaggacacatgctagaaaattcatgggaaaccaggggcttggaagtcattacgtcctcaaaatcatagagaaagtcgaggacaccatgttaccattgaaaacaacccaaaaccacacaattccaatccgttcaataaagagcaattggaattgttacaataaatatttagccagtgctcgcaaggggtaaattcctctagttctatcatcaagttcggatccttagcttaaaaaggtaattttcttgttgccctgaaagaaaaaaaggaaaatttgagtccttggattgttgacttaggagcttttgttcacatgactggaggtgctaataaagagcaattggaattgttacaataaatatttagccagtgcccgcaaagggtaaattcctctagttctatcatcaagttcggatccttagcttaaaaaggtaattttcttgttgccttgaaagaaaaaaaggaaaatttgagtccttggattgttgacttaggagcttttgttcacatgaccggaggtgctaataaagagcaattggaattgttacaataaatatttagccagtgcccgcaaggggtaaattcctctagttctatcatcaagttcggatccttagcttaaaaaggtaattttcttgttgccctgaaagaaaaaaaggaaaatttgagtccttggattgttgacttaggagcttttgttcacatgactggaggtgctataatttttcaaaactatacaccttgttctagggattatatggtttgtatagctgatggttctctctcaaaggtggttggtacaggttatgttgccatctctaaggacgtaactcttgactctgttcttttggttccaatcttggattgcaatcttttgttcattagtaaactcacttaagaaaagaactatgttactaaatttttccaaaaccattatgtcttttaggattggaattcggggaagacaattgataacgctaaggtgtgttcaggactctatatcttcaaggtgactaattatattgaaagacaacctcaaccgacaattagtgaaaaactgtctctttctgtctttagttctaataaagatagtgatgttatgttatgacactatcatctaggacatcctagtttcttatatctcaaaaaactctttccatcattattcactaaaaattcggatggttttcagtgtgaaatatgtcaattatccaagcatgtttgcaaaccctatccaattcaaccataggaaatttgtatggttcttccacttggttttaacatgcacttgaaaggaaaaaaggtatgtaaatttatgaaagttttgtataggctaaaacagtctccataggctttgtttggaagatttgccaaaatcatgataactattagctacaaacaatgccacgatggccacaccttatttgttaaacactcggcctcagggggagtaattgcctaactagtttatgtgaactatatgataatgactggaaatgatcttgaagaaagagaaacattgaagtagtgcttagcaaaagtgtttgaaatagaggatcttagaagactaaaagtatttcttaggagttaaagtggctcactcaaaaagtgaatttttgtctcccaatagaagtatattattgacttgttgcaagagacaggaaaaacaaaatttaaaatagctgacatacctattgatcctaatcacaagcttggagaaacaagtgaggatgtagccatagacaagggtatgtactagagattggttggcaagttgatctacctctcacatacgtgactggacatagcctatgtagtcaacctaatgagtcaatttatgcataatccgagggaagttcatttacaagctatatacaaaatcctacactacctgaaagcaactccaaataaaggaattttatttaagaaaagcactgagctatcattgaaggcttatactaatgtagattatgcaggattagttgttgattagaggtctactacaggatattgcacttctcttggaggggaattgttaacttggaggagtaaaaaacaaaacattgttgtaagatctattgcaagagaaagtttcgtgcaatggcccaacaaatctgtgagttgctttagctcaagattatcttgaaggacttgaagattaagcgggagacaccgatgagacttttttgtgacaataagtcggccattaacattgcacataacccagtacaacattatagaaccaagcatgtggaagtagacaaccattttattaagaagaagttggataatggcttaatttgtagaccatatgtgtccattggaggtcaattagccaatgttttaatgaaagtattaaccaatgcccgatttcaagaaacggtatcaagttgggaatggataatatctattcaccaacttgagggagagtgttgaagattattacggttgtaatatacaactatggaagatatagaactatgtatgcaacttaatatatggttgtgtgtatgtgtaccgctatgtggatatctagttatgtagatttgtgtgtataattcctgatttgtagggatctttaatagggtagtttccaattctttccttaattctttttttttttttttctgttgtatatatttctaagattgtatatttttaaaatatgaatgagaaatacaatctttatccatagtaacgatcaccaggaagaagtaatttgtgtagcttgttccttacgactagactggctaaaaagagtcactcaaaaaaggatggtataaggtgtctaggtgatgtttcttaccaacaattgaagttttccattgctaacattgataaattctctataagaactcttatttttattaaaaaaaaaaaaaaaaaccaaaacaaaacaaaaaacaaaaaaaaaaacctcaagataagttctcttctacaagaaacttttaaacaaaaggaatcttttaggaatttgagacttattccaatgagggagggagttttacttgtgataattgaaaacttctgctttatgtatgtttttatttaaaatgtttatagcaattcacctttgaattctagatttgaattgtagtagttcacctactaatgcaaaaatacatcagctcatcatatatggtttcataaattcaatactagttttcttttagtgacaatcttattcttactaaatattgaaactaagctctcaatttgcttttacttcatgcatgtaattttgcattggtagttctataaaaacttgtgttgcatttttctcttccagtagcatgtggtccttccattcagaaagtaacaaagcaaaagtgctagataaggtgtattttaaatgtaagtatagatcttccacaattttttttaagttttttaggagttggtttgtaggtttggggatagagcagtttttttatgaagatcattagttggaatatgcaaggattaggatctaggagaaaaataatggtggttaaagattttttgcaacatgagaacccagatattgtgatgcttcaagaaacaaaaagggaggtttgcgatagaaggtttgtgagtaatgtctggacaactaggaataaggcttggacttctcttccaacttgtggggcttcaggaggggctttgattatttagaattcaaagaagcttagcaatgaagaggtggtaataggctcctttttggtctcaatcaagatcttggagaatgaaagaggaggaatgttagataacattgatggtatcttagaggaggtattgtattttttaaaaaagctttatacaagtccctctggagagtcttggaggttaaaagggttagactagttgcccatctagcaaaaagtgcttcttggttggaactcccctttattgaagaagagatttgtaaagccattttttagttagatagggatggggcacctaggccgaatgattttaccattgttatgttacaagagtgttgggatatgattaaggaggatctagtgagggtgttcttagtattccataaaagcgggtaattaattagagcaccaatgtttgtagttatagtgcccaaaaagagtcaaaccaaaaagatttcctactttagacctattagcttgattacaagtttgtataaagtcatagtcgaagtcttatcagggcagttatgagatgtccttcatgaaaccatccatctaacacaaggagcttttgtttaggggaggctaatattggatgcaatgttgataaccaatgaaatagtagatgagaaaagatgcttcggagaggaaggggtagttcaaaattaattttgaaaaggcttatgatcatgtcaattggggttttctaaaccatgtattggaaaggaaggggtttagtcctagatagaggacttggatgagaggttgtttgtcatcgatgacttttgcaatcctaatgaatgaaaagccgaaaggttgggtcaaagcatctagaggaccaagacaaggagatccaatgtcccattttctctttatcattgtagttgatgtgttataggatgatgttgagagttgaagagactagattgttggttggcttcattataggaaggggtagagctagattgtcccatttgcaatttgtagatgacaccatcttttctagagcctgtttggaagaattgcaaactcttaagattattttgttagtgtttaggcaaatatttggacttaattctgacctagctcctttgctccctactaattttgtttggaaatctcaagtccctcttaaggttaagtcctttgcttagttagtggcacacaagaaggtaaacaccaatgacatgctacaactgagaagaacctttaatcctgatgtttgtatgttgtgtatagagggtggagaatcagtcaatcatccttttttacgttgctctttgacttgggggttgtggcatagattatttagattggctaagcgggaatgggttcctcttaggagtagttgtgacatgatgaccattgcatataagggattgggaagttcgagtagaggcttggtattgtggcaaattgcttgtctagctttgatttaggttgtggtgggaaagaaatgtcaagatttttaaggaaaaggcgaggactccaaaggttttttgggataccattcctttcctcacttcctttttggccttttgcaccacaacttttaagggcattccccattcatcttgcttcatgggcaagctcctttgatcttacctctaggctcaataaatgtaggaaataaacaagcgatgaggttcaaacttatgattctcctgaaaaaggctttgataccatattaaactaccaatttaacctaaaagtttaagttgtcacataagggtaggccaatatcttatattaagttgatgtatggactaccttaacgcgagtttccatgttattgaaattttaaaaaaaggaaaaaaaaaattgagatttgtgttaggtagtgttcagtgtgggaggtcccattttatgattcgaatggttaagattttcacttgtagttagtgtaatgatcacatgcaattcattaggagggattggtggaagagtcaaagcatgtcgaagatgttgggtttgaagacatttacattataatattcattagttttccttgtagcgagatctttctactagacatggtgccatggttttacctttattttgaagggtttccacattaaaaattgtgttcccattagttacatgacttgtttgtttgtttgttttgttgtgtcctatattttcttttccttttgttctgttttttgttggcttcttcatctttctctctctctgtttttttttttgttaagacacaaaataagtatttaaaggtatatatggaaggatgaaaggtctttccatcaaatgtgcaaaccaaatagacaatgtaagtattagagatcatgatatacattgtagactgaaattctagtaacttatacttttacgaaacttggttgttgtacttgatatcagagccttgttttatgagaggtcatgagtttgaacttcattgctatattgatttcccacaatttattaaagtcacatgcaagcccaaaggaggttgcctacgatttgtttgcaatctttctgcctctctagatgcaggtatgagattgcacatgaggcatattatgagcttaaatcctaagaaatataaaagagcccaaagctagatgccaggaaaggaatgtcattcctcttgtactttatagacctatttgttatctatttttataatctatatggagaattatatgcaggacacaacatgtggattttgggttggctttaataggcttagttcttaaaatcaattggtacttaaattaaccctaattttaaaggcctattcccaagtcattcccacaacatcaacaatctttcttttccttcactagtttcaatacaagattgtatttaaggcatgaaacttcaggttttgattattctctagcattaaatatgaaattacaacttttccatgaaattcaacag

SEQ ID NO: 11149 - DNA, 3881 bp, Vitis vinifera
  Intron number 6 from transcript GSVIVT01000528001 (locus G SVIVG01000528001) derived from phytozome v7.0 (chr-ID chr5 ; pos 13780966 to 13784846 reverse strand)
tattgcgcactgctgacctttcagttcctctaaaagtgagcttcctccttttttctattttccactttaaatttttttaatgttagattcttattgcttgtattgcttgtaagtctatgtggcatttgataaaagataataaaagcttaaagggaccgatgtaagtttggtgatgaaaatttcattgtggtgaggccttctataattggatcagtaacccatctaaatttaacaatactggctcaaatatgacaggcgagatttttgttggttaatggtttctatgttcaattttaatgtttagatcccaagccttagttctatggtagatatttccttaattgttgggagaagtgctttattggaatgtagggagcacaacctttccattctggctgggttaacgatgttgcttcaaagttcccttggtcaagtagttattaacacattgaggctttaaatggtcaatcacaaaaaaagtatggatccttataggggagttcacaccaacacctttggctaatgaaaatttgagaaaataagagaaattttatttgaaaggaaaccaccataccacaaatcttgatgaaggctataactcttaatccatcttaatgatgtacctttaggacaactaaaatctaggtatccttaggacatggctccactaggtgattttggatttttctcatcaaaatcattgtcttcatgtactagtaggacaactaaaatctagatatctttgggatatggcttcaagaggggattttggagttttctgatcaaaaccgttgtcctttgtgtcatatataggttataaactccaagccataggacaattgagaaagtgaatattcactattttgctattgtctatacttaccaaaaaaaaaaaaaaaaaaaatgtttttctagtgtctaaaaagagaagacgatgcttaggagccatgcttgccattctttgtgtgattttggttgcagaaggatggtagggggtacttgaacccttgtaggatgctttggaaacctttacgatgcttagggagccatgcttgccattctttgtgtgattttggttgcagaaggatggtagggggtacttgaacccttgtaggatgctttgggaacctttcttccttgtggggcatctatttgttagagttctaggcatcttcattagggtgactatgttggatttagggatgtgtgcaatggtagctagactcaacttggggttactgaagtatgggaatccctaccttcatgatgtctctaacttaatattcatttaggttttgccaggaagctttgactagttggggattggtggagtgtttagaggttgttatgcttagaactttttctaagccctagtaagttctaggagggagtagggattgagattctaaagttactagaatgcatggttgaggtgaaatctatggagatgagcaactttagagtggtaggagattcaagtgttcttatcttgtagcttctaagggtaagatgagagcatagagatgggagatgtggttcagaagattttagatcatttgagaggggtgcgttaatctgtttttggatgcttagttttaccaaccaggcagcgaatgggttggttaatagaatagcttcgttaatagaggcatttgttggggacttcctctctaaatgttcaccttgatcattggtttccttgcttgtatttatggtgatgtgggctcacatttttatcagttactttggatcctttacttctattctttcctaataggcatttgtttggcatgaaagatagcttgacctttctatatcattttttttttttaaatttttggaagagaattaacttctccttgcatttgataaagttttagagacctcctttgacatttggtggaagattaatccttcaaggtttcaaatcttaaaaaaattccttccgtcccttccaaaatttgagtaaattctcatgttactcattaaattgatctaataaataataaaaaaagaatggtttaaccttaaatgcaattaatttgacatccaatctaatctaatgagtatatcatttgtaaaagaaaattcagtttttttttcccatgaaattctgttattttttcaaattctagttataaaaaatctatattttttttagattcacttaaaatttttttcttaattagaattttttatgaatagaattagaaagtcgaaattataaaaatagaaaatttccaaaatgtaacttgaaataagcgtgtgtgcgtgcgcgcgtgtttcttcgtttttaatgaaaaatatttagaaatataatgttttcctatgaatggaagtgagaaaattcaaaacttttcataaatgaatatgtacaaggagatgattctgcagaataaaaattgaagatatagaagttatttgtaaatataattaaaattgagcgttttacttaaaatttatttgtttagtggattgaagccatattaattgagtttgggattagattggtctttcattgtgtattggattgatgtgagaaaggtaaataggttctttaagaaaattttggaaaaggagttttccattagaaaaattaagcctaagttaggattgcatctcaaatgtctggggaggtacctgtaatttggaaaatctcaggggaggttggtgcacttctctctctctctctttctttctttcgttccttttttttttttttttaaatgatttaaatgcttgtttgctgtaattttggtagttatccaagtgttaatcctcctttgagacatagaaggtgtttgttggttgactacttgtcattttcatcctaaatgaaccttctagtgaatagtctttaacgaccattaaagcatcaacattctctatagttaggccataccttcaaagaagatatacttcttggcagaatttgtttaaggcatcccataaatatttgaaagaccctatgacagaggcttaaagagtatatgtgatggggacaagtggcagccacctttaaaattttattgaaggagcaaaggaatgggctataaggcccaagatttaatttggcattctttggatgataatgggctgagcatagatcttatatgattcaatatgagttcaatctagaagtattttctagaaattagattatgggcagtcataagttatgacttttaatcattaatgttgttattttcctagaggcttttaatgtggtctagtagtcaatccaagtttttgttattttcaagctgcattactactatgtgaatagttccaaggagttataactctctggagaagttctatttggtagttgatctgtcttctaaaagaaatcagtagatgaatgataaaattttctaacatccactatttgctaggagttgttcacctgggtgtgaagcctaaaggtttctaggagtgatttctagagttcttttaggggtaccaaacatctaccctcctttcatttcactttgctgtcatgcatcaatatgctgaggagattattgtcaggggcctaagggacagtttagaagaattagtactatgctaaactagatacttgggagccagtttgaaattatccttaaaactgaagtaactatccacataactccttatgatcctattactttgtcatccttatcatgcttctatcagtcgtcacacttgttcctcaaggcaaatatcctcattcactttgccaccttattactaaagtgttacaccatcaaggtaatgctcaatcatcaccattacagtgcaccttaatgctgaaaggtcctcgaacaaaataacacgaaacatcttttattcatcaaggcaaaatttgatcctgctgtttattttgtgcatacagatat

SEQ ID NO: 11150 - DNA, 12324 bp, Vitis vinifera
  Intron number 1 from transcript GSVIVT01014512001 (locus G SVIVG01014512001) derived from phytozome v7.0 (chr-ID chr1 9; pos 4681340 to 4693663 reverse strand)
aactgcaagggcgttgggtgctcactgctctgatactgcttatgcaaattcagatatagacgaggaagtggatgctttgcctagtttagtgatttgactgatagctatagctgaaaatagataagaactttatataaaggatagctgcatcaaaatttgtatgaagttatctgttccttacacaagaaaggtaaatttgacacaaaacttctaggaggaaaatagtttctcctataaagcacaaaaatgaattttcttaagtctagcactggtccacatagaaattcaagattatgctgttttagctttcaattacagttaaacagattctgtataatgcatgattccccaatcctgcagtagttacagttgcctaaactcctgcttccatggttgaatactaggaatatatttgggatcaatggtccttcattattggaatcaatgcttttcctactttagtacatggttttccgttttatttgctttccatctggatcaggatgcttttgcaaggacaaatagcaaccccaatggaagaaatgaaggtggggtgattctcagctgtatgtcgactatgggaatgattccccctgagcccagttcttgccttgtatcttcaaatcatcatttttagtactaaaagctttcacatgtcgtgagggtggattggacctgtcttcatggtaaatatcatagaaattaataccaaaatggagactggatgtaatatgtatcctacaaatctgcaagagttatacatattgtcctagtagtcgcacaatatgctcttccttttggtagtagataatctatgaattagtaatatatagagtcatgtctccaatcttcatggtatgaaagtcaaggcatcaaggccagtatgccccatgccgttataggcgttgacacttatatccctaaattgtgatcctattatctaacttttggcatcacttcaattgatctatgaagttgaatatggctagttaaaagtgaaactgtgcaaagagcatgcctgaatgctaactataacaaaataaagttcacacaaaagaactagaaaactatgcccaaaagcatcaacaaacctgaccaaacattctcgggaacaagaagtggaaattgtctaaacatcatacgggccaaaaaggtaaaatattgaaaagtgacaaaagaaattattcaccaactttgattggatgatcttcattttcaactcccatcccaggtagttgcttagagtccctaggttggtcagcccctttcttggcgccaaagaccatccccacgtccttgttctcttcatgagtctctacatcctccatgatcttgtgttttttcatgcattattagcagccaaagagatacatatcacccacctgcctctgaaaattagttacgtgctccactttctaggtcaccaaatcctccttagccttttacagctctgtgtgtagtaagccacctgccaccctattcaatcaccttcttgtggtaaacaagtaaaaccttattctcaactagaaagcgatcactcttgttctgtgcctcttcctggctctaagcaatctcagtggccgagttgtccaaccttttcaacttggtgacttgagcttagatcgttttgagctttgcttccaaagatttgtacctctctaaggaccattacataggctcaaaagtaatctataaccccaagcttttagtattgtaagtataattggcattggttcagatttgtagattctaatgtgaactcatttgttagattctattcggtagaacaaacaaagcatggaggatagaaagtgaattgtcattttttaggatagagccttgaaaagcatgtcataatataacaatatataatttcattaatatttatattatgatttcggtttcacttgattatcctatttatgcattataattgacttgagcatttaagcctgcgttacctacatagtacataactttgatgttttaggagttgcatagaaaatctaagtcatgagttccttataagttgatggttcatagacttaagcaatccatatcagattgtagtacacgaccttctaattggagagattacttgtcttggtcattggaatgactttctcatgatgagtgcagtaatgtatatgattatacattgaacaagatctatgatgaatcataacattggttatcgagtagtcatgatttcaccaaactactatgttatatgagctctcaatctaaaatcttaatttttaaggaatattgagctagtgtttaggtctttagtggttttaaccaatgagtgagaacctatgaattgagtcattgttgattaaaacacaaatattctcgagatagagattatgatatctcatgggattgagatagtctatctacttgagtaatcctaaggacttattattaaaatttgtgatgatacagtaatttctataatgaaattttacatattctcttgatgagatagagtttgtcaattgtcatataacaagaagatatttgagatttaaagatggtaaaaatagtcttgaaaggttgatagcttctagtttattaaattacaaacactaatttatggagatattgcatgcaatgaattattagtagattatataccaaagaaatggattaaattagatttaatcaattcattttttcaacttaatttcataggatgttggagtagagttgattctctgtaatgaaatgttgaattaactttagaattagttctgaaggagctagtgttttcttataagtctcaatggtcctagctcaagtttacattccttagtgatataatattttgagggatatttgggtttttttattcatgtgtaaacataagattgcacaaaagtttattaattgtctttctgaatttgactaattaattgaaattcaatagaactaattaattaattaggatccaatgggatgaagacttacatatcctctataaatgtgaatcgttgcatccccacttgatggtgacatttggatttggtggaaaaatatttttgaaaatcatttttaggtattttggaattattgcttattttagttctttctatagggaaaataaaataacaaagaaaaccttgtggggctttttatcggggaaagacaagtctgtgaaccaaaaatagattaaagggaaaataaaataataaagaaaaccttgtgggacttcttatcggggaaagacaaatctatgaaccaaaaatagattaaaatgtcaagttacctattgagaaggttattcaaaagactttatttacataaaaaaataaaataaagttattccaattcaattatttcaatttacttttgtttacaaaagaaagtttcaatttattttaaaaaacatttgatttatttttatttatgggaaatgtttcaaagtataattttgtttacaaggaaattttcttataacctatttacttttttaataagaagaagatatttacaattttactataaaaaaaatgttttaatccaatttatttataagaaaatgatttttaaaatttttatttagaaaactgattttttttttttacaattttatttgtaaaatgtacaaaaaattacttcccttcaattttgttcataagaaaatgaaatttataatttttatttacaagaaaatgattctaatttatttcttactaagaaatttaactaaatgcaattttacttccataaaattatttgagttcatttattttttcagaaaatggttcttactttcttttattacaaaaaattattttaaaattttatttaagaaaatatttcaatcaacaacatgatttttatttactcttacaaaatgattccaattttttttttatttttttagttaaaagaaattatttcagttttacttaaaaaatagtttcaaattttatgttaacctaaggattctcctaatcaagttttgataatcacaaaacaaggtgtagaccctcaattttgtcctcctaacacatgtcttattagaacttgttcgatattttacagttagctccttggtggcccatatctactcacactatttacctttcttgaaccacctcggagactctggttgaaagattgtctaaccccttattatgaccttggcagtcctaatttagacttaggcactttcttgaacaccttaggcccatttaagcatttttaaacccacttcttatatgacttgcatgattgcatggcttacatgacttgtgtgacttatatggatttctttattatttttatttttatttttattttattttatcttattacaagttttctaaatcatatttcttggctttttgggcatgaggaaacgggccgccatctatttggaagaagaatcaacagaattttgaaaaagaggagattttgtttttagaaggatagtacatatattatttccatgggagaatcggttataaaagggtagaaaataagaaaggaaagtggatttcctttttttttggatagaagttttatttttggagggggggattgtttttcttgaggagagagatctaagacaagggagactttttctttggcgaggagattttttttttttcttttggagtagaaattcacatacaaaaagtaatcttttttagaggagatcaagacacgcaagagtgttttttttttttttgggagcggtagaggacctgaaagactaattgggctgccattttgacacatcaagagagtattttttccgatacaatataggttagttttcgatttttgataccatatttccttttttttttttttagtttgggttttagttgtttggtttaattaattgtttgtgataaattcttttaaatctcgatttcgaacaatcttttatttttcttagattaaatgtctctcttttatgattgcaattcattagttctatgctagtttatttttaatttacatgaaagtttaaataaagtttatatttttaattctaattagtttatttttaaatttgaatgagttatcaatcttaattctttagtttaaccgaccttgtgagataaaatttatatttttaattccaattagtttaattttagtttatttttaatttgaatgagatatcgatcttaattctttggtttaattgacctttgtgagataaaatttatatttttaattccaattagtttaattttagtttatttttaatttgaatgagttatttatcttaaatctattagtttaattggtcttgtaaggtaaaattgatatttttattccgattagtttaattttagtttatttttaatttgaatgagttattgatcttaaatctattaattggacttgtaaggtaaagtttatatttttaattccgattagtttaaattctagtttatttttaatttgaatgagttgttgatcttaaatctattagtttaattggacttgtaaggcaaagtttatatttttaattccgattagttaaaattctagtttatttttaatttgaatgagttattgatcttaaatctattagtttaattggacttgtaaggtaaagttgatatttttaattccgattagtttaaattctagtttatttttaatttgaatgagttattgatcttaaatctattagtttaattggacttgtaaggtaaagtttatatttttaattccgattagtttaaattctagtttatttttaatttgaatgagttattgatcttaaatctattagtttaattggacttgtaagataaagtttatatttttaattcggattagtttaaattctagtttaatttttaatttgaattagttattgatattaaatctattagtttaattggacttgaaaggtaaagtttatatttttaattccgatttgtttaaattctagtttatttttaatttgaatgtgttattgatcttaaatactttaattggacttgtaaggtaaagtttatatttttaattccgattagtttaaattctagtttatttttaatttgaatgagttattgatcctaaatctattagtttaattggtcttgtgaggtaaaatttatatttttaattccaattagtttaattctagtttatttttaatttgaataatgttatcaatcttaattctttagtttaattgatcttgtgagataaaatttatatttttaattctaattagtttaattttagtttatttttaattcgaatgggtcattgatcttaatctattagtttaattggtcttgtaaggtaaagtttatatttttaattccgattagtttaaattctagtttatttttaatttgaatgtgttatcgatcttaattctttagtttaatcgatcttgtgaggtaaagtttacatttttaattccaattagtctaattctagttattcatgtgtttcttgaaatctaaatattagtttttggatgataattttgttagtttgtttgattaggaagtcataaatttgttgccttagtgattgttggtcaattttttttttttttagggccactggaaacccatgaaggttggcctttactctcaccactttaattgacaagattttctaaaatctttatttcgtgatctttgtttccttttggtttgattgatattctgttttctatttttgttattttaaaaattaatttcttttattttaaaacaaaactctttttctaaaaaaaaaaccctttttaaattttttttattattcatttaagcctctagaatcaaaatctattttctttttaaaaaataatatgcaaccgtatcttaatcaattcgcatccttctcaattttcaacaaaaattttggttttgaacaaaacgcgaatcagagcttgtggtcccaataaatgggataattttaggctaaattcatgtatattaatttggggaattggtgaaacccctacataagaaatttttttcaaaatttacttttgctaccaccctactatttatcgtaatcatatttacatttttctttttaggaattgtatacaagatatgtatgataattaattattccgaattctgatagtttttgctaattaattagataagcatgctaggatttattatttattatttattatctaacccccatgtcctgaggaagcacattaggagttatatatactatccaggtacgttcccaaaatttcatgaatatgcatgttattgcccttgtttgatgtcatacttgattgcctcgatgcttgtttgatcatccttgataaaatgcatgtcgtgtgtcatatttctgaattaaccattgatgttttatgatagcggttaagaagtggttcaggtacacaccctaactctcctttattgtgattgatttccttatttagcatgctactttctgaaaatcacctagcttacttaggtatctacaattaatcaattaattgccccatttccccaatttagtcagtaaaggcctctttagagcttagaagggtgctacctcctagagataccttcccaataagtaacctgatccccggacctagactcaggtttttcaaagacatgttttttccaaaaattatggagtcatattttagggtttttctttcttgttttattttccctttaaaataaaaataaaataagtggcggctccaacttttccaaaactaaataatttttcacaaataaaaagagagtctcgccgatcgagtggggacgcacatgaaaaatgcgggtccacacaaggttatggttactaatggttcaaattaagttaattatttcaagttcacttatgataatttaaagaaagctcaagcaaccttggaggaaaatcaataccgtgaagaatttggatccatgaagacttaaaagattaattttaagattaacatttgttggtgcacttgagtctaaatcgtttttatgcacttaatggtttaaaatcatccatccttaaacttaaaagatcatttcttaccaaagaatttgatggtttcttgttttttttttttttttatcaaaatcttgagtcaaattctttctaaatttatcttaaaaggttttaagaatgtgaatatattgatagttgtttaagcactttatagtgcaatcaatcaaggttgtaagtaattggttgtgttggttggactcaaccgatttaggtgcactttgcaccttctctcttatctagtagcatatgttcaaccaattgtggtagagcctccactggtagaattgaatgctcagtattgagagtttgaatgtcaatggttacctaccagtgaatgcacaacaacttgtgaactggtcaaattagttactcaattgatcgagccctggttatggcttctaaggtccccaaattggaaaactatacattgaagagttttagagtatttattgataagagaataaatgtattcaattgaaaaattatgttttctcttattcaaagcttttccaaaagtgcactcatttcttaagttgtgaattcttctgtgcatcttcaagtccatcctaattctttcttatattgagaatctaacttgctattaggtttggtgttcataaattcattcttataacttacctattgtgagagaagttacttaagtaggttgattacttaaagaagttgtaaatgtccattagaacattggaatccaagtgtagacattgaaggcttatagttcaagtcttgacgatagtggaaaccctcacttagttgggaacttaaggagagtggacataaatggcttattgaactattataattgcaatcttcttctcctaatttcttattgtttctctttatttattcattattatctccatatcctatttatatataattattttcgaaaaagttttaacattcaatttgttaggattaagcccctaaaggcaagacataatgtaacaaggttagacttgaccatcccctagttattccttttatgcactgacattgatttgagcatttagctcatatcttttacattgtatatgacttaggtgtgcattaagagttgcacaaatgatacaagtcatgtattctttataagtagataagttatccacagttaatttatggatttggataattcagtaaagactgtagtgcaccatctcctaattagtaggatgacttatcttaactgtcgtaataggtttcccatggtaagtgcactagtgtatatgatgcacactaaataagacctacagtgaatcattatgtaacactatcgattgtcatgattcaccaagttacttactacatggactctcaaccttgaaagaatattaagtttgtgtcaaaatcaataggagactttgacctatgagtgagatcgtggtcaatacccctacggattaggtcactattgatggaggctagtggcaataggtattttcaatagagacactatgatatttcatgggattacgacagagtgtccccttgggtaatttaaaggatatgtgatcatgaaaattgtgatcgtagtagttcttataatgaaatttgacatatactctttagatctaaagtatatcagttgatcacataataagtgagatttacaacttaaggatttgagagataatattgataggtgataacaccatcttattaaattacaaacaccagttcatggaaagtctacatgtaatgaattgtaggttacggacttgagctatgtttattgtaatttcataggacattggaatgcaattgactatttttagtggaatgttgagtgaacttcagaattggattatgaaagaactagtgttttcctatgggtcccaatggtctctagtcgagtttttatttcatgatggcaaatgctttgagggtattttgggtatataattcataagtgtgcaataatggcattttagtaaatttgcaaagttgcattagattttatgactaaactaattaattaatttgagctcattagagttaattaattaattaggacccaagtgggttggattaagtggctcaaacctaatttgggttcaagtcatttaaacctacatgaaaacctatataaaccccttaaaaaggggctagagcttcattcttcctctcatatttttttaaattccaaagaaaggaactctagtcactctttagagagaaagaaaagtccatatttttctcccgccaagacccataaagggaaagatcaggtaaaagattgttgggtagacgagttctacggtgaccactacgatttcaaagtgtttatgaaacaaaaattgatctaggaaaatctaaatcatagtttcgattctaactctaaatctacatgaataatggattttaatgttatttatttttgttgtgttagatctataaaaagtctaggatagatgcatcacccctacatgatccgaggttagggaatagagaaatctgaattatcctagcacaattcacattccccttcctttcttaggtgattatctaaattaaaataacattacccctacatgacccgaggttaggaaatagagaaatccgaattatcctagcaaaattcactttcccatccctttcttaggtgattatctaaattaaaataacattttttcacattttatttaataaaatggtttcaagtaattttttaaaaatagttttaagtttattgaaaaaaaaaatgctaatgctgaaacatgaaatccaatagaccgtaggataaataaattcaaacaaaagaataagtaataaatgaaagaaaaagttagtacatgatatctacaaaacaaagaaaagaataaatacatcataagccgaatcatcaaattaaattagtttactaattcaacttatgcaaatctcatccgcaatataccattgtatttacaaaactattatttgcagaaatgacaatgaaggaaaggaatgaatatagagaggggaagtataccttatacagaattgaatcaatgcaactccaacaactcaatcctagtgcccacggatacaatctcttaataacttcagaaatttttttataaagaaaaaaaaaaataatctcttctcaccacacacacacacacgatggttgaaaacaaggggagagaagagccattagagaaccccttgaatcagtgattcttttttcaagccctagaagccttcttttatccagctttcctactcgccctacttcctcttcattggctatcccttttgtcattcctttttttctttcagctttgattgtttaactagtatttaactatcttccttgatgagtgccatgggtccctcacttctccttttattctctacctctcgccttctcattacagtgtagtgccaaacaaaaccaaaattgagacatctagcccaattcaagtcgtgcacccaatgatgaaaggtgatgaggtagccggacaatattgttgctccaacaccttctcttacataatttatgaggaaaagaatggaccatatacattaatataactgcagagcttgctagtggatttccacaatgaaattttatctgtactatattcagagccaccactcatttgtgagttggaagtatgaacagaaattcctccaaatttccgcaagggaaaaaccttctttggaatactgtcttcacctcttatttaaattctcctacagaagaggaaagattggtcttccttaaatagtggaattgaggtatttgaggatgccattgtggcatttattagattatctcagatgactcaatttaaagaagcataaaaatttaaagttgactactttctatatcatacttacaaaactcttattgcccattgaatttttggtggggccttaagccaaggagtcaacattcatcgatgacctacattattttatttggcctttttgttcattcccttaaaataaattcttaagaggggatcatccactacaaaacccctaatccccctcttcgctctcagctttttgatacttttattctattttattttttattttctcatcaaagatcgataacacagggaaagaaggagaagaggaaagaggcttgggaaacttgggaagcaaatgaggcgtcagccacccatttcctgatgaaatcatgaatttatttacagaacttgtatttcttttctcctatgtaatctccatcctaagaatctccacggcagttgacagcattactgcaaatcaacatattaaagatggggagaccatcatttcagctggtgggaacttcgaattaggttttgtccacctgggtacttcaaagaatcaatacttggggat

SEQ ID NO: 11151 - DNA, 3652 bp, Vitis vinifera
  Intron number 6 from transcript GSVIVT01031470001 (locus G SVIVG01031470001) derived from phytozome v7.0 (chr-ID chr6 ; pos 18209583 to 18213234 reverse strand)
ttgttgttgcagtttcaaggtaaaatttccttgtgattaatattctccgtaatgtatcggtcgttgagaattttggtatttagcttgtatgtttggaacacgtaccatgttataaacttttatgggtaggtcctgtgtttgctagtgtattggagagatctaagtataaaattcaactggtttacctgaatggcttattagatcctttactctactactacattatatgagttgctgtgttaaacattttatgccatgtagtggggcagaattttgaatggtggttaattggtgagagttgttaatttgaactacctgcatttatttgttaggtggtgtttgattggtgttcaaaagacattttaacattaaatacaaaactggctataactgatgctgtctggtttcatgtagttttagttgattttatttttgggcttttgggggagtgttgttgagtggagagtaacccttttttttttttattattttaattttttttttacttttcattttttcctttttaggtcatagccacttttgttttttgtctttcttttcatttttcttaccctttccttttctttaaattcaagaaaggtgggaaacatgagttcctatcttttagagcctgagaatgatttttctttagtgatgtattaatttattattgttgttgttttttcaaatatgtagatttgaaaagtgttcaagaagaattcgggtttcatattaacaattcttgtaaagaaagatttttgagaacgacttttgaaatattttcacttgacaccttttcgttagctaacttagcttcagataattagtgttctagtggaagtgagatagctttatttgagtttacaagctgaagttgaataggcatgttatttaatttcgagtaatgaatatgtacaatcttataggtctaagaactatctttctaaagtatctgtgctaaaatttaggaatcaaggaaactattattacatggaaaaataagtaatttcctaaatttgaaaatcatctaataatcagtctttgacttccctattctatagggattctgaattgattcatcaacactttggctcaagttggtgaatagatattgtctattcttaacttgctcataattatctagaatgcttgacttggaagtcttttagttaaggtatctcctatacctccttccattgaaacatagggagtgcaaattaagtcactctccaacttctctttgatgtgacgtatctgtcaatttccacatactttgaacatcatgttggataggattgtgagcaatattaatagcttacttcttgtcacaataaaacttggctgttccttcctgtttcactttaagattgtcaagaataatcttcaactgaagaagctcatgtattccctattccatggccccgaattccagaatggtgccctcttagattggttctagctaatggaaaaatagtggatctggctggggttgagttttctggtgttgttggtgctgtgatgtcagagaatgggagagagataaggggacgagggactaagaggatgctctttgtgaaggggcggttttgtaggatgattggaccaatagttctttagctgctttcagcaagtttttggggatgcctactgcaggttttgaagaggagatcttggcgcttctgattaagatgagatgcagaagtgaagtttaaacatggggagtttacaaaggggaagagattggcaacctcttcaaagtttgatagggagctcaaaaggttggagacctccatacttcatactcttcaaagctatttcaaagctattctttacttggaacagcttccttatttttctaatcactttctactgtcaaactccatactcttccattctttcaccagaatatcacccgccctcaccaaatttatttcatgtaacctgcctccaagacgtgtccctacatagaacaaatttctagctccacttatccatttgtgccttggtgagaataaaaagacttctaatgcataggtcaccttttgtcttatctaaacgcatcataaccagttaagtgaggtttcttcaatctaggcagttcttatctatttattttttttatttgagcaataaaacagctgaatgttgtaatgctgggtctgttcttgttattggtttatattagccttctgctctttcttcactttgaaaacatatgatgattttcagaattggaaaatagacttttttatgctataatgctctagaattccaactctaattaggggcaaataaagtagctgatgtaggaccatccctaaagtagttttctaccatcaaataaaatcaactatggtttcactctattaggatttaagaaaggggacaaggatttaatattatggcagcagaaaaagaaaataggtgaaagtgagaaagaaaataagatagaagagggaagagaaaatttttttttagtctcatgaaccccttaataagagtctcacaaggccttataagagactcatctaggagagaaacaattgactctcactattgcaagttgcaaaatatggggagaaaaaccatttattcattgttggttacatcaagtagtcttatttatgggctttagaaaacccaaaagattcaataaactatagaaaaaggaacctaatttatatgttaagttatcatgatttttaacccttacctgaaactattatgccttccatttaaaagaaaatatctgttttatagaatagaaaattcttataaactagaagtttctagaaaatgaaaacttttaaaaagtaaagactttaagaaaataaaaagattttagtacattaggaaattttaaaaaacaaagatttttgaaaaataaaaatatttaggaaatagaatatttttagaaaaaaagactaggaattagagttcttaaaaatagaaacatttattagaagctgtttagaaaatagatgcttttaaaaggtagaaacattttaggtaataaacactttttagaagtcagaaactttttaaaaataagagttctttagaaactgaaaatgttaaaatctgtgaaattacttatatccttgatagcgaaatttttgttttttgttttttattgtttgcttccgttcctttcttgagtagaccttagaggggctcatccttatcagtagctctaatctcaatttgtagtcatttacgcttgggaaatgctggatgccattgctttttttttccctgatttttccaatacaatgattgataatttatgggaagtcatgcatatcaaataataaataaagatgcatgaataaagtttgtatgaaataataaggtaagattaagttgaaaagtaaaatttggaaaaagggaggcctaattagctccccaataacagtaaactatactcctgctagtattctgtgcttattaagaaaaagaagctgttttatggaagtaaaacctttgaagaattttgttccctgtatctgttgttttgcatgttgatgtggtgtaaactggtttgcttctattaaaagtctgaaatgaaataattgttgtcagcatagttatcgctaatgtctactgtcagattgcagattaaagaagtcatctgtgagttcatttgttttgg

SEQ ID NO: 11152 - DNA, 9455 bp, Vitis vinifera
  Intron number 14 from transcript GSVIVT01036642001 (locus GSVIVG01036642001) derived from phytozome v7.0 (chr-ID chr 13; pos 19616266 to 19625720)
gactcgtcacacaatctggtttagatctacaacaggtgacatcctggtatccttttctgtcctattattgttatatattggaaacttacgttgtatatcctttttttttttcaatggtaataattgtgaatgtacaaaatcttttgtcttacaaatatgccgattaatgaaattaattatgcctcttggtaatttacctagaggctattttggccaaataaaggagttcatagagaaagctgagtgatccttcgtaattaacgtagctttagccaaagcaatataaagtgaaagggggtagacaaattccaaatcgaacccatccagaagtttagtgatctgtgtatccttggctttctgaatcaaattggctggatgaaaagtgttttttgattgctatacttggataggagttgggaaaagacatggaaagagataaacctcaaacattttctttttgataggcagaagagaggatatattaacagttcctgaaagagggtgcatcaaagtacacaatgtatacaagaaacgccatcaggtcaacaaaaaagaggagagggaccaaataccaacctccttctacctactttgagttcagccaatctatagagtgtatcatggtcatgaaatagtaacctatgtacaatccaacccaatccaaacaaatacacataaaggaagatttaattgcatgatccaattgttttgtgtcttcagatgaccttctgtttctttccatccttagcatccaaaatatacacaaaggagcggcccaccaagcttttttccactttttcccactccttccccaagaaccatgcaaactcaaaagggtccctcttactgaatcattacccaggtaactccaaaaagagaaaaaactagctgccacaaaattcttgcttgggagtagtgcataagcatatgatcaattatcttctcttcccttttacacatgtagcacctgttcggcaaattccataccctccttttgagttggatgagcactaaatccttacccatatagcttcccaatcaaagaagctctcctttgtaggaacctaaggattctacactattcttgaagggaaaacctctcttcttcccttcgataataaagagtagtatgattaagcaaagaatttatcacactttgtttcctcttagcccaatctatcctcctcatctcttctagttgagaccaattgcaatcttctctaaaaaatgcctccactctttaaattcacaatcatgtaactgtctgtaaaactggattccactgaagcccttctccaacttgctcgcacatttctaccatccaagtgtctttttcaatggctatagagaaaaacattggaaaggaaactttcaaagaactttcccctaccaaccatctttcaagaattttccctccttccattacccactatgaaatgagatctacttttaaaaatctcccacccatttctgatagctttccacaaccctacccatagttgttcatcatagctctcgagcaacaccactcgcattgttcaaacatgaagtgatcaatgtctttcaaccatgacatctatgagacaaacatataagggcaggaggaagggaacattgttattagccctttatcatttaagtcttagtaatggaagttttattcctttgggaaattaaaaagcccctgatttttgagcagctgatcttcccaccatatttactctaatgatgaaatttagaaccattagctacaagaaacttgagttcaggacatcctctatccccctacttgtttgtgttggttttgaatgccttcactaagatgttaaatagctcttctatttcattaaaactctttatttattttttattttttaaaatttttatttattttttaatattttcctgttatattaagtaaaatgtctacataaaatttcaagatagctctatttattcatcttttttattgagttattgtttgatgaaaaataatttttttgaataattgaaatttgcaattgaggctaaatctcgtagttatgatatgaattatgtttatggtgagtttggacaatgtttttagaataggatggatcattgaaccaaaaaagttgctgagtcagaattcaatggttggacttgtggttgaatcatgatgtaagcatgacattataaatacaatttatatattattaaagtattaaaatgatgagagagagtgagtgagagtgagggtgatgagagagaaagttgagcagagaatcggagaaaacggaaggggagtagctttagggtggagtcgaaggtgttcgaaattggaattgaggagagaaaaggcaaaccccaagttatcatcgtggaaagcaagagaggggtctcgtcatgggtccgtatggggccgacgagtgtagggttttttctggagggtctgaaccaatgcatcaaggatgggaaagaaggaaaatgggaaaggggggatggaaggaaaaggggagatggaaggaaaaggggagaagttacttcctggtgcaagacgccaacagtgcgggatgctttctccggttaagggttgtcgacctggagaagaagagatacaacatatgcattctgaaaggtagaggggaaagggggggatggatctctatggcagagatgttacgaaagctgggtgtaaatttcggcaaaaaagagaaaaaacaggaagaaagggtcacgggaaggtcatatgcagaaatggcgaaaaggccgaggagcaggaacagtaaaacagtcagaatttgagcagattggaacattgtctgatcggaagctgaaaccctagttcagcaagaggagaggacttggagaggttggggtgcttaatggcaagttcttgggggttaaaaggaaagctagggttggcaaggttggaaaagggaagggttcttttggagtttgaatttgtggaagaagccatacgtgtcttaacctctgggaaaagatcggtgggagggcttcacgcttggagcactggagtccaaggactaggtgtttggaagaaagtgaaacaagaaacaaagcctgggtaaagattctaggactctcaatttcattgtgggtcccgtccattttgagaagagtgggggaagtgcgtgggggtttcattgccattgacccacatacggagagaatggaggaacttcagtgggctcggatattagttaaatcgaacggcgaagacttgccgagcacgttgaagatcagggttggggaggcgatttattccctctccctttggtgggagatcaggccgtcgccgaggaaggcctcggtggacaattgagccttgaatggtcgaacgagtggagaggttaggggtgacgatgctgcacgcgctggcccgcgagtggaagagctggaaaacgcgaggctcaaggcgccgctccggtcaacagatgggaccaatgggcaggtgagcggggcgggttgtgaagtgattgaaaatcgggctcaagttgggttggtgacctggctttttattgacccatcggaggttgggccttcctcgtcagcccttgccgtgggtattttgggttcgaagaggctggtgggtcttcttcgcaaggcccatcaatgagagaaaagttaaagggggctgcggctgttggcgttgggccaacgattgggccgtcgctttctaaggataaggggtgggctgccgttgaggggttttcttcacctattgggccatctgtcttgataggggacagttctggcccgtcccagaccctgcttcttgacagtgggctctcggggaaggtttgtttctcagtttgccttggtacctgcagcgggtgcaacttggagattgagtttcttaagccccggtagaaggaaacctggaggaagcagtaattgcaaacccaacattcaacgatagaccatgcactagtggaagaagcttcgaggtatgggactgttttaaattcgtggggcttaagggtctcggaatcttctccttctaattctttttctcttggttggactccaaagggggagtattacgaccagtctggggtgctaagggaggatatccatgagggaagtacgttgagaatgttagatgcagatgggtctgccaagaatggcaatggatgttgggacttggttgaggttaattgtgtcgataacaaggcaaggaatacggagtggggttcagctcagtctgtgccccaagaagtcaggggcgagaaggagattagatgggaggaaagtagtctggccaaattcaatcattttttgggattctcgatagaaggcctggaaaaggaaatcttgagtttcttagtcaaaatcagaaaaaggcgggagaggatacatagcaaaggtctattggagaaatcaaaattcgagagggagctaaagaggcttgagtgttcaattgactatgagggggaaaaaaaaaaagaaatgttctcttcagggcagagggtgccagctagcggaagtccaatgaatctcaaattattgagttggaatgtgaggggagcgaatgacaactctaaaaggaaaataatcaagtctttcgtaacaagtcaaaaggtggatttgctgtgtatccaggagacaaaaatctaatcaatgtctaaaggggtggtcagaagtttaggttcggggagattcttagactggagggctttggatgttattggatcggcaggaggtattttgatttgctgggactaaaggtccctagaaattttggattgggaggagggccagttctcaatttcctgtaggttcaggaatgtggaaaatggtgttgtctgggtgtttacgggagtgttcgtgggaagagattggggcgattagaggaatttgggaagagccctggtgtttagggggtggctttaatattattctctcccaaacggaaaggagtagacaagggagaataacctcaacaatgagaagatttgctcagataattgatgacttagggcttgttgatcttccgttgcaagggggattatttaccttgagtgggggtctgaataatcagtcctgggctagactggacagatttcttgcggctcttagttggcttgatcagttcagtagtgttctctagaggaggttgcctcggcctaccttggatcatttcctcattttactagagggtggtggcctaagaagaggaccctttccttttaggttcgaaaatatgtgacttaaagttgaggggtttaaagatcttattcgtagttggtggcaggggatagaggtcataggcagtgctagctatagattggctgtaaagatgaaggagcttaaacaaaatttaaaagtttggaatagggatgtgttcgggggactggagtgcaataaagcttcagctctccaacaagtggaatactgggatctggtggaaagtgagagaagtttgacagaggaggaaacaatttctaaaaaggaagccaaggagtggtaagctaagtgggtgttcttggaagaaatccattggagatagttatcaagggagttatggttaagggaaggggatagaaatacgggctacttccatcgtatggcaactgtccatcgaagaagtaattccttggatagaataaagataaatgggacgtggttgtcagaggagcaagaagtaagggagggggtagtgaatgcctttcaacagttgctctcagaaaattcagagtggaaggcggatatagggagattgcagttaaagtagatcagtcagcaagaagcggagtgtctggagctccctttttctgagggtgagatccattctgctttgatggatatgaatggagacaaagccctaggatcggatggtttcactgtggctttttggcaaagctgctgagattttgtaaaagatgagatattggaaatgtttaaggagttccatgagcaaaattctttcctcaagagccttaacaacacatttctggtcttgttacctaagagagggggggctgaggaccttggggattttagacctattagtctcttgggggggctgtataaattgttggctaaagtgctggctaatagactcaagaaagtgatagaaaaagcggtctcccctgatcagaatgcttttgtcatgggtaggcagattctagatgcctctttaattgcaaatgaggtgattgactgatggcaaaaaaggggagagaaaggcctaatatgcaagttggatatcaagaaggcgtatgacaacattaactagcagtttttgctgaaggttttgcaaaaaatggggtttgggccaaagtggttgggttggatgtggagttgtatttctatagccaagttttcagttttggtgaatggagtgtcaaccggtttttcccaagttctaaggggctgcgctaaggagaccctctttccccctacctctttgtcatgggaatggaagtgccgagtgttctaattaggagggctgttgaagggggttttctttctgggtgtagcatccgagggggtagaagaccggctgtcaacatctcacacttactctttgcagatgatacagtcgttttttgtgaggcaaagaaggagcacttaaggcatttgagctggattcttttttggtttgaagctgcttcagggttaaggattaatttggccaaaagtgaaattatcccagttggtgaggtggaagaggttgacgagatggcagtggagctaggatgcagggtggggcttttgccttcagtctatttggggctgcccttaggggcgcctgataaggcttcttccgtgtgggctgggtggaagagagagtgaggaggagacttgcgctttggaaacgttaatatatttccaaaggagggagaatcacttcttataaagagcatgatggctagtatgccattgtatcaaatgtcccttttccgtatgcccaagacgtggcaaggaggttagaaaagttgcaaagagattttctgtagggagggggaaatctggaaaggaaagcccattttgttaattgggaggtggttggtgcggataaggaaaatggggggcttggcttaaggaagctagcccttttgaacaaagccttgcttggcaaatggatatggagatttgcttgtgtgaaggatgatctttggaagcaggtgcttggggcgaagtatgggcaagaggattttgattggaggacaaataaggcaaatgaggcgtttggagtagggctttggaaggagatcttgaaggaatcagattggtgttgggaaaatatggcgtttaatgtgggaaaaggcaccaaaatcagattttggactgatctttggtgcaggtgtacaatgttgtcccaaatattccctcacctttatgccatggttgttcataggaatgtcacagtggaagagatgtgggaccagaattttggccatggaggctggaatttaaagtttcttagggactttaatgattgggaattggatatggtaggtaatttgcttcatgttttgaggggtcataggattagtttggaggaagactcggtctgttggaagggaggaagaaacgggcagttcaaagtcaagaaagcgtacagcttgttggtcagccccattgtctccatttttccgaaaagttgcatttgggtggatagagttccaaccaaaattgtgttctttgcgtgggaggccacttgggggaaggtgcttaccctagataggctccagaaaagagggtgacagctccctaattgttgttttttgtgtggttgtgaagaggaaactgtaaatcatattctcatacactatacagtggccagaatgctgtgggatattgttcttggtttgtttggtgttcagtgggtctttccagaaactgtaaaggaggttttatttagctggaggggcccttttatgggaaaaaaagtaaaaagatttggaaatccattccgctgtacattttttggacggtttggaaaggagaggaatagactagcctttagggagagggagggtgttagcaattcagaacttcaaaaattaatttgtttgtaatttatggggttgggctaaattgtatattggagagaagttgctctcccttataggcttcttggagtggttagccatccagttaagggttggtgagttttttttgtttttcttttttggttgtgaggccttagctgcctagtataccccctgtatgctttgtggcttttttgccttttgttatacaatccgtgcttatttatcaaaattttttttatatattattaaaattaaaaataattataagaagttaaaattgtatagtaaatagtttaaaaccttaaactatttcaaccttttatatttaatattaacatagtaaattatgataagaataaaatgtgaatgcattcctataaaaaaaaatatataaaaaaatgtgaatgcattaatatttttattatacattttatcaaattgaaaagttatgatatttaattgttaagaagatatatcatatatcaaagagtaaaataaaattttattatttattttattcatattttatgaattttatatattgtcatcctttagtcatattttattagttttatattttataacttttatatcttaatacttacaaatgcaggtggaagttaattctaaatattcaatatatttattacaagcactaatataacaaaagtggcctttggcctggtggtaacatccacactttttcaaagaaagcttaggtttgaggcaccacacccccaccccacatctccgtttagagattaaaaaaataaaaataaaaatgttaagctaatggtccaaccaacaggttctctggtccaattggctggtccatcagtttagtgccagttcaatgtgaaaaacagctcaagaactgaactgatctggagacatggtctttggcagttcaaccggtctggctcagtttcataaacattgagtatggttgtcctaactgacagatgtaaaaatccagttttcttttcccattctttaatttatctgtccactcagtacaacctgccagctgatttctgcattctgttcttaacctccaataaaggagttgaaggttgagcatgcatcacatctactcaaaatattttagtagaaggaattgagtggttttgaattttcgaatcaaatggaacactcatgcaatcttgattgccccatttttattcacgtctaccgtttttattagaactggtgtagaaatttcatattctctgaaagttcaaccttttacccttctagatattagtgccatgtatgtcaactgatttatgtgaagttaaagattttttcttcttctagatagcaggaatgcttgaaatactagaaaatatctaataaagttgtagattcaattttcttcttgtaggaaagttcattggttcttggaatttctcattaatgttttacatttggctttggtagcgtgcaggc

SEQ ID NO: 11153 - DNA, 3070 bp, Vitis vinifera
  Intron number 1 from transcript GSVIVT01001413001 (locus G SVIVG01001413001) derived from phytozome v7.0 (chr-ID chr1 8; pos 18860691 to 18863760 reverse strand)
ttgacgggtaagtgtctctctgtctgtttcttaagtttttactacatgtgtttttgtttttcttccttgatatcataagattaccaaaaaaaaaaaaaaggctaaaatcaaggaaattcattcttgctaatgaaagtttgatccctttttcaagagaatctgagggacccaagatatacaagtagaagaaaataccattggtttgtgattaatcattctgttatggaatatagaattttatatgattttatctttttgattttctttggagagggatgggatggtacgatccaagaaggttgagatgagattttctatctatagatttgtgtggcatcgtagcctacaaagaaaactatctccactgtagggcccaaaggataaggagaaaatgataagaccagaggttaatttctcatggtaagacgggttaatttctcgactagaaagataatcttggttgtgaaaaatccagtgggcgaatgctgttcttcggcagcagacaacacacctctactgtttttgttttttccaaggcatgacaattagccaacatcttccgtagaaaaaagaagtaaaggaacttattttaaaatgtggtaaaaaaaaatatatatttaaaaaaactactgaaaatatttttaaaaaaattgacttatattcaaaacaagttatgaaaaagttattttcatttaaaatttgtcaaatatttttaaaaattaaaattattttatcattttggaaaacaatatccaaggagtgctttacactcttttattttaaaaataaaatataatacaaattatataaaaatattagaaatatatgtgtgttaaagttctttattctccacgtgaagagaattctattttttttaagttctttattcgagaattccattagaaaaatgttataaaacattatttagtttaaacttcctgttgtttatttgtttttccattttttattttcttccattttccttcaatttttattggtctcttacttgcacatgtacttctatgagactcattttagataataaaaaagtattagaaaaagtctattttccaaaatttaaaatcataacgatatttatgattattgaaaacaaaaccaatatgatcagttttgattgatttgaatcaaatttttttattgtatttatgttgctactagatgctctcattatccactcttaacttagtaattgtagctttgttaacatcttgtccatcctaattcctaagtctccttcaaattaggcctacaaacatctttttaagctaccaagggaaatctcgttaaattcattagattctacatttggcaatcaaaagaaatttctattgattctatccaaatctttagtattataactacttttacaattttaaaacaattcatacatgaagagagaaataattcataaatgagaaggtagttagctaaattaaccttgattagaactatttttcctactcttgatagaaaacaagctttccaaaaagctgtttttttttttaccttaagatttaagaataattttaaaaaattaatttttatcctaccttgcacaatggagcagccaagatattgttttattccattggaaaggggaatacctagtacttcccttaatttcttcttcatgaccctttaaatattttaaaattttgaactaaaaacttatagaaattcataagttaacccaacatgacacaacagttggttgaatcctattaatattaaaaaaataaaaaaataaaataaaataaaataaaataacaaattagaaccccatttgagctagaggccttagtaaatatgatatagtcatttgcaaatatgagaaagaattttgggtcgattttggtgagttggaattcttggcctactttaccatccctttacctaaatattctatacatagaataaaaatatatagtaataaaggatctctttgcctaatacttctcaatggttgaatttttccttttaaaatacaatttattgagatggaatagaacattatgaaaatgttttccataacccatgtaatccacttgagtgaaaacctattttgaataaaaccattaggtataggaaaatatttaagtgaggattcaaactcaataataagagctcttaaatacatggttgttagttgtaatgactttgataccatctctcgctatgacatatataatgaattcaagcacaaaaggatatgaggttttagaatggttagattaactatgcttatatataggactggaaacaatctattgtatcatagaaaattatttcccacaccactgagaattatagagaaattaaaaagaacacaaacacaatgatcaagcctttgaaatagtatcatgttttcttgctcaaccccaatattcctacttcactaggtattttttgctctttgttggatctcttcttatgcaatataatttttaagagcttatttcactttcaccttttcttttattattattatttattatacttatagagatatttctaatatattttcttatgcagaatatatatgaaaattattataaaaaagtatttttattttataatactcttttaccatcaaaatgattatcttatttctctaacccaacacttttaattctaaaacaaaaaagcataacaatttacttcatgaaaattttaaggtattgaattggcatctgtcaaactttaaatccaaaccgcataagatgaaatatggatatttgaacaaaagtacaaatatatgagaccaacatatgaataaggtgcgaccaagatacaaaataataagagctcatatgtgatataaatggatgagactcgagtacaaagttacagtaaccggattatatacatggcaacacctcattgaggatactttttgagtaactaaagcaggactcttaatctcatattgctctctccattttttttccactgcttttctttcaatcagtagtgctaatgtatcactatatgtttactcattatttttgaactgtgtagaggggatcccctattcttagagcccttctgg

SEQ ID NO: 11154 - DNA, 1423 bp, Vitis vinifera
  Intron number 8 from transcript GSVIVT01015328001 (locus G SVIVG01015328001) derived from phytozome v7.0 (chr-ID chr1 1; pos 2738004 to 2739426 reverse strand)
acagcaagattcctggaactacttcgagagataaggtgccaatttaatttggtatccattttcccatgttaaatttaaccgtggaattttattttgttagttatggtgatgatagtgttttatctttaggattcccttgctacatatcaagttcataaagccttctcttaagtagaacctagattgggtcattcttggattttttttctggaagtgtatatctctgagataagtttaggctggatcttactgagatatcataaggtaataattctgtcttttcctttttctttctttctttctttcttcttcttcttcttttttggttccttgtataagattgtgagaagcttgtctatgattttattggatggcatgtctaacatggtcctgcaaaaaaattcatgttaagagaaacctaggatgtctgtctgaggcaatattacatgaaaaggatctccacacccacactcttgtcatattgtgttgacactggtatgtcagtgaagttgaagagtaccacaggtttgaggtagaaaaaaacagaagacaacactctaccagcttctactctgactttgttgtacttaatgattgaaacaatgacgagcccttttgggattgattttgagagggctagaagcgctttctgatgcttgcaagcacttccttatagaaattaggtgtttggcaaacatttgaaaatcacttttaaaaatctggagaatcacttgaagtgattcctagacaatcatttggtagatgcttcttccaagaatcactttttaatcgtattacacattgctaaagacacaattacttggcagatgcttcttccaaaactcacctttttatcatataacacattgccaaaagcactatgaaaaacacttatttttgaaaatttagagtgcgttggtagtgattttggaaagtgtttttggtatttctaacacttgaaaatttttatttttcaagtattaaaaatgctagaaatacttatgaaaatctttgccaaacgcactcttatatccaagccctatgcaattctttgtaaaagcttttgcagtggaagctctactcaaaaaagtgttatggaccaaaagtgcttttactataattactcccaaacagactttaaatctcttgcatggaggctatgtctgtgttgccctttcctagatgtcttgattaaaacagaacagttggattggattggatcttagttattattatgaaaattcattatgatgtcatatcaaattccttctatttcattgataacttgcttacttaaatgtgtatgcttgaatggtcactagatctgtttttcaccattgaaattatcctctgttctttaccttgttgaccatttgtttataagtttaatcacctgcactttgtgttgttttgctctttagga

SEQ ID NO: 11155 - DNA, 6673 bp, Vitis vinifera
  Intron number 6 from transcript GSVIVT01025735001 (locus G SVIVG01025735001) derived from phytozome v7.0 (chr-ID chr8 ; pos 12434410 to 12441082 reverse strand)
acttgtttggaaaagtttgtgtcatcatagacaaggttagttttttaaagttgcaggctttgacatgcagttaaattttgtttctgttcttctaaatcatggcttctcatatttttcgtaaactaatgcatctaattcttttaaagatgctccagtccttgataattcttttaaaaatgcatttgaaaagaatactgaaatggactctattttgtataggttaccatcttgaaaacctgaattaaagtggacatcagattccaaatagggattcaaacttaatctgacatccatgaactaatctcaatttgggagaaaatacttgatagctaaaatctcttatgcttactgtaaacactttgccaattgcctttttaacttttcattagatttcatctgttaattcttttattgtatggagttaaaaaattccagatggcactgaattttattgactataatgatggactctctccctccaaaatatgcctcagttgatcatagaattgtcgctaaacatgttctatagatttccacaatatgttggaggaaattaatgaagaaaatgaagaagaaagaaacatcaattttgtggagcaatctcaaattcttctctctttcttcttcatctttttatttatttatttggatagtgaatggaaatgctaaagggtgggtcaaggcttctagaggattaaggcaaggtgaccctttatccccatttctgttcactattgtcgcagatgtgttgagtagaatgatgttgagagctgaggaaagaagtttgttggagggtttcagggtaggtaggaatagaactagggtgtcccatttgcaatttgcagatgacaccatcttcttttctaactcttgcgcagaagaattgcaaactcttaagagtttattgttagtgtttaggcaaatttctgggcttaaggtcaatcttgacaagagcaatctctttgggatcaaccttgatcagaatcatctctctaggctagccttgttgcttgattgcaaggcttctgattggcccatactctacccgggtcttcctttgggagggaattcaattgcttgtagattttgggatccagtgattgagagaatctcaagaagattagacgggtggcaaaaggcttacttatctttcggaggtcggataactcttatccactcttgtctttctcacattcctagctactttctctctctatttaagattcccaattcagtggttgcaaaaattgagagattgcaaagggatttcctttggtcaggggttggggaaggtaaaagagattatcttgttagttgggatatagtgtgtaagtcgagggtaaaagggggtttggggtttgggaagatttctttaaggaatctcgctcttttagggaagtggttgtggagatatcctaggaagagtacaactctgtggcatcaggtcattctaagcatttatgggacacatacaaatggttgggatgccaacattttagtcagatggtcacatcgttgtccttggaaggctattgcacaagtctttcaggatttttttaagcatactcggtttgtggtaggagatggggaaagaattcgcttttgggaagatttgtggtggggggaccagcctttgaaatcccaatatccaagactatttagagtagtcacggataaaaatagtcctattttttcgattctcggttctgctcgccctttctcttggaactttaattttcgtcataatctttccgattctgagatagaagatctagaatgccttatgcaatctcttgattgtatgcatttatccacctcggcttcaaatgcgagatcctggtctttatcttctccaggattgtttacagtaaagtctttctttatagccttgtcccaagtgctcgatttatctccttgttttcctactaagtttgtatgcaattctcaagtccctttcaaagtcaagtcctttgtctggttagtggcacacaagaaggtaaacactaatgacttgatacaattgagaagaccctacaaagcttttagtcctgacatttgtaagttgtgcatgaagcaaggagaatcagcagatcatcttttcctacattgttccttgtccatggggttgtggcacagattatttcagctagccaagatggattgggttcctctgagaagcatttcagacatgatgtttatcaattataaaggttttgacacttccaaaagagagatagttttgtggcaaaatgcgtgcattgctttaatttgggttgtatggtgggaaagaaatgttaggatatttgaggacaaagttaggaattcagagaatttatgggattccattcacttcctagcttctctttgggcttattgttcagcggtttttaagggcattccccttaacgtgttacaaatagattggctagcagtgtgtagttccaacaggatggtctagccaagagagcttgttcgtagttttcatagtatagtttcttgttcttttaatgtgttgtttagttttatctttggtgggaggattcctcatccttcttttgtacttcttattctttcaatatatatatttgttgtttcctatcaaaaaatgtatatagaagtaagttttgtataaaggcctgttagtgaattttgttaaacttgcaccaagtagaagttaaggggtggggccaaaaaaggggcaaattggtgtactcaaaagaaccaaaacaaattaaatcaagttgttttttttttttttttcaaaaatttcaattttattggctagaaattttggtttggtttgtgggttatcaatatttgaaaccaatttgaattgaattgactctaatgcacaatgcaaataattaattgttttttctaccaaatgtttagttgttgaactaacaaaggaatcgttagttgttgaatttttatttatctgtatgaggaataactcttaataagtactgttgaatataatgaatttatagtgtacaatttttcttttttaatataggtcacatgtatggtagttaggactcctagccttatatatatatattttctcaattgtaagtagacataatgaatgagaatcaaggttttcttctctctctctcttaacatggtatcagagccaagggagaaaacctaattctttccagtttccccgtgtcatcaattccaggaaaccttcttgtgaccgtgtttcattccggtcaccttccccaaaccccaaagctttccggtcggtcgaatcgtcgtcagaaactaaagcaacatctttttacccactttcagaccaaagacttggggaaactcaagtatttcttgggaattgagatagctcaattcagttccggtgtggtcctttcccaaaggaagtatgctttagacatcctggaagaaattgatatgttagactgtaaaccgatagacacacctatggatccgaatgtcaaacttgtaccaggacagggggagcctttaggagaccctgggagatatcgacgactcgtaggtaaattgaactatctcaccattactcgtccagatatttcttttcctatgagtgttgttagtcaattcctacagtcaccatgtgatagccattgggatgccgtaatccgcattcttcgatatatcaaaagtacaccagaccaaggtgtgttgtacgagaacagaggtcatactcaggttgttggttacacaaatgcagattgggctggctcacccacagatagacgttccacttcagggtgctgtgtttttattggaggtaatctaatatcttggaagagtaagaaacaagatatagtggccagatctagtgctgaaactgagtatcgagctatgactttggcaacatgtgaactcatatggttgagacatcttcttcgagagttgagatttggaaaggatgaacagatgaaactcatctgtgataactaggccgcattacatattgcatccaatccagtctttcatgaaaggaccaaacatattgaagttgactgtcacttcattagagagaagatcgcatcaggatgtgttgctacaagttttgttaattcaaatgatcaactagcagacatcttcactaaatctctcagaggtcctaggattaaatacatttgtaacaggcttggtgcatatgacgtatatgctccaggttgagggggagtgttggatataatgaatttatagtgtacaatctttcctttttaatataggtcacatgtatggtagttaggactcctaaccttgtatatatatattttctcaattgtaagtagacacaatgaatgagaatcaaggttttcttctctctctctcttaacaagtactttaatctaagcatctttttgaaatgtattatacgtccaactttctctttgtttttcttaaatgaattttctttactcaacttatcctttatagtttttaagtaaatccatgcctgccatttttccaaaaaatattggccccaaactgaataaaccaaaccaagtcaaattgaatcaatgttaaattgggttggtttcagtcgataaataaattagtcctaagcgaaaaccgattagcttggatctgttctcgcgttggttaaaagctgacctaaagtgaaccatgtgcatccctattaggagtataacttcctcttccaggagtattagttcttcgattgctaaatttgaacctatgggcaaagttttaattttctatttcaaattatctctttaatggaagttcaactgtctaaaaaatttggttattctttttctccgtctttaagactagcttttgttcttaaaaaatactaaagaaagaaaaaaaaatgctaaggaaaatgactttcttttgtttcattttactattgaaagtacaaaataaaataaaatgaaattaatattaattagaaacttatgtatcttcgaataatctaatctttatatagaagagttaaaataagtgaaatgaattcgaagtgagatgtgtatgcctatgtgtatagttcttcttgtatggtggagaagtgtagtcctactttgatcagttcttttattttgtggaaaggatctctcatcttttttttcaacttttattaatatgtatcttctgtttctattaaaaaaaagtgatatctaaaaataatttattaactttaattttttttttcattttacttttcctctctattttcttttttcgcattttccctcaaattttcggggagccaagtatagcctaagagaaaaattcgtcataatttcttattgaaaattcctatttgatacagatttaaattgaaatttttttgttagagtaccaaatatcactagatcctcctgcttttggtcaaaatgctggatgctgtgttgcaacttgatttcattctatgatagtggagcctaatagaggcttaggccaatggaagtgccttcttaggattactcaagaatgactcattgatattcaatcattcaggaatgataaatacaaccatgaatgttaaataaaattgttcacctccaattatctggggataaatggacagatagtttcttccttagcaacttcagagtctaaaaagtgaaagttcagttgttgacttttaacaaactcaaaagttttgctgatgtagagtatggccaatgagtgttatttcatggcttgtttcttatcatgttttagagatagattcttggcattggggatgtagtagaactgctctctataactggatggctatccagtttatttttatctacatacatgttgtggatttctttgtgccacttttggatttttttttttttttttttgataggaatgccacttttggattttcctttgcgctcttttcttggaaggaaattgttttgtttgccaaaatgtttttccaatagacttatagcatataaagttttctgcccttaaatcaggggaatttatacactgtttggcaaagtaaatgagtgaggttggtcaatgccttgtaggacttggtctacttcattttctgagactattcattgtggatgatttcaattccccatttttgtggcaacaagggtttgtcagcttcacagctatttttatttgcaacagtttggaggcattgagcccggattgtagtttttatagtatgtcttgattaagcttgcgtttacttcttgatttgtttaagatgcaatatttgattatcttctggtcaaaaaattcattcaatgaacccagtttgcgtttacttattgatttgtttgtgacatgaattagtagcttactcaaagtgagctttgtgcacaaatacctatatacttgtccttttgtccagttggaaggagctagttgtttttatttatttatttattttattattattattatttttttgtgaacatgcatcacttccagttcaacatttatcagattattctgagtttgtgatggggtccttgaactgtgttctttcattggatgacaatttttaattcagtttaatgatgccttccttgcaaaaggattatgccatcttatttattagtcttttgttcattgcttgtatgaatacatttgtgcatgcgcctcctgattgttgatgtttccttctctgtttttttcatcctataatttttccctttttcttcgggtggtgtgaatttggaaacag

SEQ ID NO: 11156 - DNA, 4665 bp, Vitis vinifera
  Intron number 2 from transcript GSVIVT01001347001 (locus G SVIVG01001347001) derived from phytozome v7.0 (chr-ID chr1 3; pos 23826036 to 23830700 reverse strand)
ttcaggtatcctcatttgtcctttttaatgctatttctatcattttaattgcatttgttcagttccagtatttgttttgttttgtcgtctgaaaactaatttttacagtttgaactgatgaagtgaatagtagttccgaggttgagttactgtacctgtagctcattcgagcattgtagtggctagtaaatgcctagatagctcaaaatttagaatcactcagttcctatttctcatttcctatttactggctgtgatgtttttcaattcatatggcttactaataaaatgataatctgaagcattcagaattcgtgaacaaaaatttgaggtctttccaggacattatggtgtgtgctattctgaggttgtttggaacatttctccctacactccagttgtgacagtgattgtagtcattttgtgtgggagtgtttataggtgacttaaatgtggtattcactgctttagtttcaacacaaggtgtagtataagatagaggcatttattattcatcattttagtgtggaatatttataaagtaatttctagttttcggccatgagactcaataaggcagaattttcttctccgtttttttcttcctaaaggcaagctagtgagattcagaacgccagaaaaggggtcacaactctggttacaggaagtgtgcttaaagcacttgaataaggcaaaaaaaccacacacacacacacacacacacaaacagaagggctcagcaaaagagtacctatcagaaaaaaaaaaaagggctcagcaaaagaggcttaaccatcatccttggcctcaagtaatgaaatctggaaaagaaaaactgccctgcctctaaagaatcctaaacaagagaacaaggacttccagagaaaaaaaaattgtgcttaattttttaccagttcatcccttcaaaagttttatcctccacttcccttttcttttatgatgacaaagtcttcataccaaataaggcatcacccatgaaatactaaagatagaaaacaccaagactaggggctttgaggatgggaaaatgtataagggtatgattggttgattcctttcctgacctacacagattacaacaagattcttcttttaataaactaatctaaagaaaggatcttctttttaatacaatccttatttatctatgaaaaaaaaaaaatctaaactctaaagaagggatctttttgtttacctattgaagataaataaataaagaagggatcttttccaaagcagcttcccaagaaaaaaaaaccaaccttggctgagcattagacccccactctcgtgatgttaaactggaatgtttgcctagagggaaggggctcatgatggaaagatacaactaaaatacaacattttttggtgatctttgaactcatgtttccttatcctctttgaccacatggaggtaaatgcaagccacaaatctcttaaccagctgtagcttccagtcacgagaattgctgaaaaattgttagcttcaataactacttgcaccaattggacatcaataatctgtgaccaccctttttgtcctgatgaaagagcttcaggaaacaatcaatcagtgcagcagtctcctattatcaaacatccttccaaaatttagtccttagcctacttcccaccaagacacaactaaaaccttcaaaaacatctgaaacattataatagcttttgaacaaaccacaccaataggcctgactcccctttcctccctttctagcacgccgattctctctatttccccatacttgaccaccacaacttttctcatctatatctattccctgcaaacctccatagctacttgcccctcaaaactttattgagatcaagcagccttcttgtccttaaaccaccttccttttttctctgtcgagtgagtagtctgcctccataattctgtctttccgagtgggagtctcatcagtgtgtctgatctgtcatgcacctatattggcattataaaacaagagaaaatatattggaaaactcaacttagtattttgaatgagttggtttactcataccctctcaggaagatcttttggtaaacagaagacattttatttaaaaataccaataaaaggggtaaaaccaagcatataggaggtatacaaagatcctcaaagggaagagagggaaaaagtaaacacactagagcaaccccatccaatcaacgaaatatggtgtggagcaacaccctgttcccaaacaaaatttgaaccaaagaaaagggtgtctagataaaagaatcctttagcaattgaatttgactgctccaagcctctgaaagttctttggtttctctcttgccaaatgatccaatacaaatacaagggggctaacctccaagcttggtttttcttgcccttcgttttttcctgacagaacacccatgtcatcctgacaacacatctttcaccgaaagagacagcactctaaacacatctaaaagtgagaatgataggtgccataggctaccatctgccccattttgagatatcatcttttactagatgctggccttcttttaattgttgaatcccagacagctttagacttacaacatgctctcaaagacaatctcaaataagtagtagataaatggtccattttccaacctaacatgattgttagatgcattatattctccacttacctcattggggaagtctcacccttctccaaacaattgacatttaacctagagacagttccaaactaaaggaggatacccataagccacagaagaagtgttctactttgcaccacagaaaacaaagtattaatggcaaatagaggatgtgaaatctctataccttgaccctcatccttactacctcaaaatcttgtggaaactcttttcgccattctagaatgaacagagagagagggagagagatcttgcccacaatatctgctttgaagctatttaactttgaattgatggcttcatgggtaattaggaccagaagtagggatttgcttatccttcataaaagtatcttgaacctctaaaacaatcgtcttttttttttttttttttcttgataggcaaatgaaatatatatgtaaagggccagaaaaagtgcaccaaacctcaaaaacaattgtcttagccactcatttgatcctgttggcaagggccttagctaatatgttaatttcttttggtttaactctctcatggagtttgtctaactatgcaagagcagctctcttattttgttggctaaacttgctatttttcttccattacaagaaaacttctcttttttgatggttagatttgttatttgggttaaaagacattctattcttaggaacattcatccctctttgattaaataatgcacccacttttcttatgttcaagaacttactgatcccttcctgggctcgaattgtgatcttggctgtcagtcagctttacttatgcatgtatgggggccttttgcaacttttcacaacaatatatacgttatggtttctgtatttttttccttctttcttcttttttgattggcaaacaaaattatattaaaagaagctaacaaaaagggtgcaagcaaagtatgccattattgctgtatgacatatggcagttaaccatttggccttttcaggcctttgaccaggctctttagtgaagtttggtgatttaggactgaccttgaccatacaccttttttgccttatgaaaaaaaaccaaagttttgatgataagctggtgaagatgggcccttgaggcttgactctagtagtaaagggttagggtgggtttgtgggagattataggttcaagtcccaatgaggacaaaaagagggaaaaaaatcttacctatcaaaaaatggctggtggagacagaacaaaaaattggcaatccttggatttgtaccagaaaggcatttattgtagtcttgctcttttaactcatgtagacatgttctctttggtgagaggatgggatctatcctctcttttatctactataccgattatgctttcattttctctggaattagtattggtctgcttatctattatataccattgcatggacattttattaaatttgtgtgtcaaaccttctattttcctgtcaatctttaactgcttcaaaaatttccaactattatcatttgcttagcctttttccacaataaatctgatctttccaagccaatttttccccatataaattcctatattggacttttattcagtgattataactcatgaaatcccagagaattactcatttaagtatatggccatgcttttagtaggttgtgcattaaatattgtgctaaaaaagtggaatcttctcttagaccaggcttggcaatcaatgtatactgatatgagcttctccaactcaatcttgattgtaatacgctctagtagtttgggtccccaattaagtgctgttttggtgtggttatcgtgtagctgtaaaattgcatgcaatttccttagtttcacatgatttttggatttctcacgtcatatgttttttgttctcttctccatcatgactccagcctcttgtctaagtttaatttttttttcctttttttttttttttctgatttgtgtattgtacagccagtaaaaagccctgtgaccat

SEQ ID NO: 11157 - DNA, 1143 bp, Vitis vinifera
  Intron number 4 from transcript GSVIVT01022069001 (locus G SVIVG01022069001) derived from phytozome v7.0 (chr-ID chr7 ; pos 16335196 to 16336338 reverse strand)
aagcaatcgatgtgagtctttcactttactttgttttcgtggaactctttccgatagctccttattaggcccttgttaccttgtagatgaaaattttgtagttagggcatttgccacatgatattttctgtttggatcagggtgtttgggaaaacttgatacttaatcgtttcatgaattaagtttattttaagttcaattattgtcactttattgacttgaaacttattacttgatattttaagtgcttaggttgtttggtacagctaacttaaaattttttctacattatcaaattgacatatttattcttactaattttaataaatatttactaaaatatttgatataaaaaatgatggtggatgtggagttatggatgtaaaagaggctctcacgagatatgggtaaatatggtaaaagagatttgagattcaaaataagttatttagtctgaagatgtttggtaagtcattttaatgacttaatttaagttattaaacatgttaagtatatttgataaagtaatttaatattacaccttaaagttaaaaatgacttcagtaaatcaacttaatgacttgaaataatttaataacttaagtataatagaacttaaagtcatcttaagttattaagctttgatattaagttttaccaaacaccttctttgacttattacttcaatttattttttactttaagttatgacattaggttattttaccaaatatgtttaatctacttaataacttaaattaagttattgagttatattaagtcattaatttgatttaccaaacaccttttaagactcttactttattccacattttggagaagcttttcatttggcaagagtattttatggatggttgtcactaattctgtcgcgttcatccttgttaaatatgtatcaagagttactctaaaccatgataactagtgaatttcttgtatatatggagtagttcgaaacaatgaacaaatgccacacaacctgggtttgaatccatattatgtgctttgatgttatttttcatacttatttgctgaattatgggacatgatgtgataaacaagggttatcttcttcttttatcctcttttcgttaatgcgttctttaacagtgctatagagaa

SEQ ID NO: 11158 - DNA, 21717 bp, Vitis vinifera
  Intron number 8 from transcript GSVIVT01021635001 (locus G SVIVG01021635001) derived from phytozome v7.0 (chr-ID chr1 0; pos 8477460 to 8499176)
gctttagctttggcatgtacagctgattcacctgaggagaggatcaacatgaaagatgtggtagtaactcaagaagatcaaaatcaaactgttgatgtaaggattacttcaaaagatgggatggaatttaagaacatcaaagtgttacacaatacttcatgtcaatagttcaaaggaagtcggaagtcggagctggttaagagtacacaaaacaacacccttggcactattaggtatatgtatgtcatgggtatatatgtttgattttctttggtattttccataagacaaccaattatgagaaaataattttccatactatttttttttctttccttaatacttcccgagacccaaacataaactaaaggaatcatggtaatagattatctcaacataactaccagtcgatcaaatgaccatgaaaatcaaggtatcattcttaagtatatcttcaatagaaacatagtttccaaatatatgcagttttaatgagcaatatgtgttaaagcttgttgtgtcctcaagtaatttagcatctggatttctttttcttgccttgatagtctatagtacaattttagttgacatacatttaatttgtaagtgggattaattttctctaaatataaaatgaaaacataattgcttgttgacttgagtaaattcttcacaatttcattaaatttttagaaacaattgagacatttgaaaaaagaaaaaaaaatactaaaatccaaccattcaaacaaattcatattcaaaatagtcctctaagttgttaatgattctactacttgaaaaacgtactacccaaataaaaatatgaatagtaattacaaattatgtacaaacccagactaaacttgtaggtagaattgtatgctatggagatgaatttggagcaagaaaactggattatgaaaaatgatttttatcattactcaaatttcagatgagcaaatcaaatccttgaaaatatggttgcaatcataatccttccataatttaaaaaatggatgaaaaaaagggaaaataagatacaatcaacaaaaaatttcttttgtaaaattttacattttattatatcgagagttggattttagggatatattgaaaaatattaaaaaaaattattgattttcataggtatattgatagttgaggtgtggactcgcatttttcacgtgtgtccccactcaatcaacgagactcgcttttttatttggaaaaaattaatttttagaaagaaaattcggagtcaccacttattttatttttattttaaagggaaaataaaacaagaaataaaaccctaaaaaatgactccattatttttggaaaaacgtgtctttgaaaaacccaagtctaggtccggggatcaggttatttattgggatggtacttctaggaggtagcacccctctaagccctaaaaaggtctctactgactaaattaggggaaatgtgacaattaattgattaattagggatacctagatagactaaggtgattttaaaaaataacatgccaaataggatcaaattacaataaaggctaggagagttagggtgcatacctggactgcttctcaaacgctatcataaaacataaaagttagtatagagatacatcacacaacatgtgtatttgtcaaagataatcaaacaagcatcaaatatctatcaaggcaatcaaacagaatagcaagcatgggcatagtacgcagtgacaatcatgttcacggggtgggtttagaaagtgggtattaggaaacgtacctggatagcatatataactcatagcgtgcttccgcaggacatgggggttagataataaatagtaaaataagaaaccctaagatgcttaactaattggcatagcaaaaatgatcaaagaatacaaaatcatcgattattacacacatcttatgtacaattccaaaaaaaatagatatgattgtaacaaccaacaaatgtggtagcaaaaataagttttgaaaagatttttttttttttttttatgtaggggtttcaccaattccccaattgatatatacaaatctaacctggaatcatcccatttatgtgggaccataagcttggattcgtgtctggttttaaaccaaaatcttcattaaaaaaaccgagaaagatgcaaaccgatcaaaaaatggttgcatattattttaagaaaatggggttttttttattctaaggactctaaatgattttttttttttttaaaaaaaagaatttcttaaaggggtcttcggagaaaaaggttttgattttaaaataaaaggaattaatttttaaaataataaaacatagaaaacaaaataccaatcaaaacaaaagaaagcaaaaatcacaaaataaagatttagaaaatcatgtcaattaaagtggtgagggtaagaccaaccttcatgagtttccagtggccttcaaaaaataagaatttaactaacaatcactaaggcatcaaatttatgacttcctaatcaaacaaactaacaaaatattacccaagactaacatttagatttcaagaaacgcatgaattaaaataaaaataaccaatcaaatattaaagccaacaaacttagcatatggagataataatatggaatcaattaaggtaaattagcattttaacaaaatatgatgaatcaaagaccaaagttcaacaatcttgaaggtatgaaaacaatgacatgcaattaactggattgattatctaaaattcctaaagctcatactaaatgtcaatagatcaaagccaaaattaccatacttaaaacatgaaaataattacacgtgattgacttaattaattaaaaaaaattataatcaactgcaaaattggatataaacggattaaatacaaagttaatgaaataaaaaacacacaaacacattcaatactaaaaataattaatactagattaaattaagaacatcatcatcatctaataagattggctaaactatcaaattgaaatcacaaatatatttaaactaaagcaaataaataaattaacaaaataaaattaaactaaggtcgaaatttaaaatatggaatttgtctaagagggttaatcaaacaattgaattaaaatcatgaacgcatttagattataaaataaattaaaatcaaactaaattgaaattaaattctacttaataaaattattggaatattaaaaactcaaactttatttgatacaatcatttaaactaaagaattaagatccacgaatgcctttaagttaaaaaacgaattaaaatcaaactaattaggatcactaacacattcaaattaaatcataaactaaaacttagttaatccgaaattaaaaaaaataaaccttatctcacaacttatttaaactagggaattgaaatcattaacgcattcaaattaaattataaactaaaactaaattaatccgaaaaaaataaactttatctcttaaattttttaaactaaggaattaaaatcacaaacatatttaaactaatagctaaattaaaatttaaactaatttgggattttaaaaatatgaactttatctatcaggaatacttaaactaatgaattaacatctcaaacacatctaaacatataggatagattaaaattgaattaaattgaaatgaaaaataagaacttttctaatatgaataattaaactaacgaattaaaatcacaaacatatgggatagattaaaattgaactaaattgaaattaaaaataagaacttttctaatatgaacaattaaactaacgaattaaaatcacaaacatatgggatagattaaaattgaactaaattgaaattaaaaataagaacttttctaatatgaacaattaaactaatgaattaaaacgacaaacactaaacataaaaggtagattaacagtgaactaaatcaaaattaaaaataaggacttttataatagaaacaattaaattaaagaaaactacaaacacatctaaacataaaagataaattaaaactaaattgaattggaataaaaaaaaaaagggaactttatctaatgggataaattaaactaaagaattaaaaccatgaacatatccaaactaaaaaaagaaaaaaattaaaactcaatcgaaattaaaacaagaaatttattatataggattaattaaatcaaagaactaaaatcattaaaacactcaagactaaaaagatgaatcaaaacgaaatccaaataaatttgaaagcgtacacttacctataaaccgttatttgtggagattttgtgggctgctcttctcttttttatggttatgtgtcggctcctcaaagttcttcgcgcgtcctctcaaaagaattgctctcgtgtcctgtttgcctgaagtcccttgctctcctccaaagttctgcttgaaaattctttctgcctattcccctccgaaaaaaagttcctccatgcttggattctcccctttatttataaggcagcccactccttatgcaatatcttatttccattttttcctatgtgcgcgtggatatgggaagcccattatgtgtggctcacttggagatttccctaagaatgtagccgtatcttgtttggtaagtgatcagatcccctttaatcttctttccatatgctcctggatgtgtctcaaccgtgatctgcccactttctatatgcagccctgattccttccaagtttccctagttggtcgtgatctcctctccttgatggctccaagtctcatgcaaagtaaaaataaagttgaaataagaaatcatgtaattggaaatagaataaaataaaatagaaaatcaaatcacatagccacaaaaatctaaaatgtcaattcatggaattaaagaataaatgaataagtgagtaaataaacaaataaattgataagggtataaaaataaatatcagacgtatgcaattagaaaaaatcaagaaattaaagtaatgcaatggattataataatttaaatgtcaaactcaaaccctcaaaaataaaaaataaaaattcatttcatgcaataaatagtcaagccaatactcatcctatctcggaaaaagaagtaaccaaaatcaagaacacacccaagtgggctatgccaaaagaagtgtccaagtgacctattctgaaagattgtctaagtaacctagggtgaatgtgtgcaaactagaaggtgccaagtgcatctaaatgggcctaaggtgatgcctaatgggcctaagtctaaattagggctgccaagagtcacaagggggttagataaatccctcaaccaaagtgtccgaggtggctcaaaaaaggtaagtagtgtgagtagctatgggccaccaaggaactactataaagtattgaacaagtatctaataggacatgtgctaggataacaaaattgggggtctacatgaggtcattagtggctttaacgtacaagtgagaccttaagatggttatatattccctatgggttgagttactattgattaagataagtgacaataggtattttcaagacatacaccatgatatctcataggtttgagataatgggtcctcttaggttatccttgattcatgcccgattggtgtctcagctgatttgtgtccaactggtgctccttggatgaggaagtgatcaacaaaatttatacctataacaccatacactagggtagcaaataaaaagctactatagtatagtggctctaggatcgttcactgggaatgattaacaagcaatcaaggataccaattccaagtgaattggtcttgtttcatttcacggttagcttaagaaataaaacataaactttgattggtaaaggttgagacttaaactaactaacttaacagaagtttggaataatttaggaagaaaaacattccttggagatttaggttcactgaggtggttcctcatgcaaaagacatagctccggtcagatggttcatttcctcgcattagagattcaacatatagtcaattctctaaccggtgatgtacaaagactccttcaattagatttcactttaattctctcactgatgcaacttgcaatggtttaagcctctcactaagccttaaccattcaaggtgatctttaaccttggattacccgtcaaaagctcgcaagagataactaatggatgtctcctaggagtccaaaagcttatcaagtgttggctattctagaaaatcctaccctgaagtcacctcccagaggctcgcaaggggtaaactagtgcatttccatggttggaaatcacttgccttaccaagtgttggcccaggtgactccaaggtgttttaagttaactaaaaacattgaaatcattaaaggatttcactttctcttcattactagctaaaaccacagagctttgcattcttgcacttggaaccttccccggcaaccttagctccaaggaattggaggtttagttactcattctctggggaaaactcctcagagaattcataacttagaaataaaatgaaaatacaaagtgaaaaggtaaggcagtagaaagaaaagacctttacttgcttaccaaactttttcagaaggaactcctctctggaacaggctcccgagaggcatatatatgaacataatataaaactaattgttacaaagatatttagtctttttactaacttaaaaactaaggaaatcatgtaattggtcgtttacaaggagtattttgggatttagacaacaaaaatctaatggaaaatatctcccaatgtcggtagcaagcttcgggaggcttcaggaaccatttcgcaggagtaaaatggtgtctgcgaaatttcgtagacacccaagagggctgcgaaattatttcgcaacaccgagctatcttcactaggctgcgaagttggcttccactttgaggttcccagctcccttctcgcggcatggttcgtgcatcgtcagaaggagaaacaccttactctacaaaagtgctgcgaaattctcgcaacaaatggctgattccgcaacactttagtgtgattaacttgcagtggctgtaacttcttcgtttcaactccgaatcacgtaccgtttgaagcattggattgttgacttcctgagctttgaaatggtatatagcatgcatcatttggacttcagaaagtgctccaaaagtggctgctacgactgtcatcaagaataggcttcatggcagattctctttgctttttctccttgcaatccaaattcactcttggcaattgaattctaagctttacccacgattcctcatagctctcctcagtcttgacttgctttggtgatcaaaatactaacaaaaacaccaaaacttacacaaagtgatcaaaattgctttaaaggatccttaacatgccaattgagttaaaaggcctaaactactactcaaaagtgtttaaaaggattaattataggctaatcaaatagcactttttgagtagtaatcaatcctaaggatttgtgatcatgaaatctatggtcataataattcctttggtggaatttgacataagctcttatgagctagaatgtctcagttgattacataataagaggatttaagactcaaggatagtagagtgatcttaagaggatgatgactatgcctcactagattacaaacactagttcatgaagagcttacatacaatgcttactaagtcacaaacacgaaagattgattaaattggatttaatcaattttttctctatctaatatcatagggtacaagaatattctagttaactctctaaaatgctaagttaacttcaaaattggattctaagggagctagtatttccttagggtcctagtggtccttatttgagctcacactccttggtaacatattattttcagtgatttatgagtttttattcatatgtgtttggtaaatatgcaaggttgcacaagagtttatgaatgattttttttttggattgggctacttaaaattaattggagattaataggactaactaactaattaagaccaagtggattagattaagtgatccaagcttaagatgggcttaattcacctataagaaagtttatataaacccctcaggcatttagggttggatactcttagccattgtcttctaaagagagagcctcaaccgtcatccttgatgagagttaactccatcatttagcttgaataattcatgggtttgtatgcgtttatttcatcttttataatcagcgtagtgttaggagaaggtacttgaggagtaatttctagaagaatattttgtgtttttcttttcaagatttgtcaaagatgggattgatatgccttccagacctagataaagtttactacaataaagttacggtaataaagagccaatgacacacaacatgcatcaaccatgaataactttgtagacatattttagttattgtcttacgagttgaaattacttcaatagaaaaatacaagttcaaagggagaaaaagttttactaattgagctaggaaacaagattagtttagtttttcctaattaacaagcttgacaaaaagaaaggtccatagcagaattaaaattaatataaaagtcttctatgtcacaaataaaacattttgcctttattgttattttgacacgaactagtggcagaagtgtaggtagaactaacaagaaattgacttgaatcaagaaaacatgaggacgatttgcatcttattgatgacaaatattgtagtgctaatgtcttgctacagaccatctttaagtctctcatgaagtaagatactcgtattcttgtccttgacaagacaaaaataaggatgaaactcaacaatcacattattatctttggtcaattatgatatactcaataggtttttggtagtgtgaggaatgtgtaaaatgttgttgagatgaagaggtttagattgtgcatttaagtcaataacctatatgagacataaataagttttgaccattacctattattaatttgcctttgcctttgtagtcgttcttgagagacaagacattgagatatgaagtaacatgaattgtaggaccactgcccatgtaccaagaaggatcattcacagtttttggactaacgaagtatgcttgagaattttgatttgggttgttaacctaacgagttgtataattgttgttctgactaatgtttgtaccagtgatgttaagatcaaatttgtgataacatttgattgctatgtgacctagtttgcttggtggtaacatttttaatcttgaaattcatgcttttgtgtgttttggttgtaatttctttggaaattacctttgttttaactgatattgtaggtgtagtcttcctttgctacataatttgcagaaattgtcatatcgatggaaataacagtatttaactactctaaacacagttcttggctctagaggaggaatttcacttcttagaaggaggtgttgtcactccttaagttgatcttcactactacataatcatattctaatccaagaccttcaagaacatagagagccaaattatcatctaaaataatttttccaaaagctgagaaagtatcaaatatgttttatatcttaagaacatagtcattgatgttaaggaaaccttttcttgcaagattgcaacatataatagagttgcatggttcttactttggattttaagatgaaaagcctttctagggtagaccaaatatcaatagagttgatgcaacaaaaacatgtctaacattgattcagagatggatggcagtaaccaactcatgataaattgataaagacacaatccaattttcatatattcaaggtttggaattacctgaattgaatcttcaatcttaacttcgatggatcatagtggacaaattttggttctaatgagaaaaccatcaagtttgtgggctcttactactggaagaatttgagatctctaaaagccatagttgttcctatcaagcttgattgaaataggattttggttagaagagaaaggaattgtagttgataccggtgcaatatcgtactagtttcaatggttgattgaggattcacaaaaggagaagttttaatggatgagattgaagtagggacaggattgagttgatcgattgccatttatgttagtcaagaaagcactgataccaagttatgatacggaaatagaatataaaatttaaaggaaataactatgaaagactctcatattgtaaatgataactttgaactttatttcatatataatactaatttagatagataacaatctttaataaaaaactaaacagtataataaacttagttactatacttaacacgtatgcatagttggatttgacttatttcaaaatcttgacatgtgagaattaaacaattagggaattgatattcaaatacatctttctttttccaaatatgttttatgtttcaaaataatttaatataaattgataacaattgattgttgaaaaaatggagtaaaaagagtgtttgctttactcaatcaaagatatgacatgatcaatatttataattgaattccagcaattttgagaaatcttacaattttaatcttttattttttatatgtgagaattaaaatctcatattgggaaaaaaaaaaaaaaaaaaacaacaacaacaacgaaccagtacaatattataaaaaaaagaaaaaaaaaagaatgaagattagcttttgagataatatttatagttgatttgtcaaggaaacaacttttcctaaaaataaaatcacaagggcaatgcaaactacggttatatttttataaacaaaaagtttccatctcatcaaattaacatatatagtaatcaacaaatttgaactcaaattgattttttaatcaaatatttgagataacttagatttcttgtgaatacttcaacttaggaatttgaaaatatgagaaataattctttcataaagtatattaaagaatttaggattggtgatactaaaaatatggaataaattaatataatttgattaagaaaaaaaatcacttattcaaacaggctcatacttgaagtgaaactccaaactattttgacagaatccatctcaattatgtgacaactctgcttccaacctaattagagtattgaagattaatattatcgagtaaagcctgctatatatatgggcttcatcctcaaattaaaagtgctcaagttgaaagaatgttgggaaaattatgagtttttgtctagaaagcacatgcaatgcatgtgaaggtgtgtatgtagatagctgatgttgatatataagattaatggaaggggataaagaatgtctagaaaggtaattagtgaatgaattattatttggtttgaattatttataaataattttacattgattaaaataatatataaaatgatgtagcatacctataatttaattaatccataaataataattatatatatatatatggaatatattattatatgtgattatagtgatagataatatatgtaatatattattttaatgtaagatgatgttttaggttgctttaaattctttatattttttataattaagtaattaagttaggtatgaaatccatcttaaaggtcatatatttgtttttaaaaatttgaatttgttgttcatcattatttgaaatatattatttaaatcgatatttattattatgattttaagacattttacttgtagaaaaatagatagaatataaaatttcaatgaacatatttgtgtcataatctatatgttttataatcaaccattgttgtgatgtatcatttgaaacaattaacttagttgtcttcttgtaaaactttggaggaatcattattataatgatcattaactacttgtttgtttttgcaatagtttgggtcatattcctttcctttttttctccttcataaaagtaaaacatagttgaaaaggtattaaataaaatagaaaaacaacattttaaaaaatatgtgcaaaacatttttatctaagttaagggtatattaccttatattgttttttgaatatatatatatatatatatatatatatatatatatatatattgttcatttttctcttaatgtttaaaaaactgcataatttgcattgaagaaataagttttattattttaaaatttaacttagaaaatggtaatattgatgaaacttaacattcatttataatgatactaacatatacttacctcactaatataaaattcttctctttcatatttttttttccctgaaatgaattggtgggaagatagattttgtttataaaatttcaatttaattatttggaaataagctatagaatatataggatattcgtgttaagaaagtcgacatcccaccgtctttttgatgagttttacctagctaagaatagtataaagattaatttgtgtaatattatcgataaagagatacgtaccatagtcaattcaaactctaaagatatagcaattgtattattgattaatgtaaaaatatgaaattagagttattataaatacatgataaaaatgaattagtttttataagttaagaaaataaaccattgtttcttctattttgtcaaaatattttttaccatcatccatagaatttggcggattaactttgtatgtagcactccattatggactataaagttgtagcttcaactaagattattttggttaaattagtaattgtagtacacatttaaaacttaatattttgaatattatatttaagatgtaataccttattagtggtcattgaggataaatgtccttttattgcatggaaaccaatatggaaattggaaatgttagagtgaagtataaatatatagaaagatgtttgtcatttattatgttgaacatagatgacatggcgagagcattaagtagataaactcacaactaacaatataatgagaattcaaacattatttattatcaaatattttataaggagaaaaaatgacactataaaaatgaaacttcttctattattaagattattatttttataatataaagaatcttatacatatatattacaaaattaaaaatgaagaaaaagacctcccaaaaaaatagacttggtaaagcttgttgaaatagactttttttaattttttttttttaaatacacaaagggaagatgagattttggatgggagaggtggttttagataatggtgttcaataaacggaccacattcctctaccaatttcgagtttttccaataggttagataatggtgtttagattcttaattttaatttaaatatatatatatgcacactccggtataggagaggagatgtatatggttttttattcggggtagagtcctcaacatgattttcttgcggctcttgcaatgatttctcagcttctatttataaaagtgatgattttggagttcaccgtacttcctacttagcaaataacttccaccgatatagagcacaacaaatttttagaatattgaaaaaaaaaaaaaaaatttcttatatacaccgtacttcactatctatggtggtccaagagtgcagcttgtttgtgatttttgggatgaatgcagttgacataagagtccagctttaatgtagctgagacatcctagtgtggaggctagataacagaaggttgcacttctgcatggctgcatggccatcttcttagagattcttcaggacaacatggctccagaacaagctgcatttgcagtttcccaaaagaatgcatggccattaatttcagtgcgtgctaagaacttgtatgagggacccttagatgatatctacattgaagtgtaggaacttcagtttggtttgtagattggaatgcactatctaatgcccgtgttcttgaatttctaccactattggagaaatgttttgctgatgtcaacataagtgatgatgttaacttgaaacagaagtgggttcttgttatccagaagctgttgataaactggtctaaagatgcgtgcaaaaggattggagcaaatgcttaagtggtcgcaagagataaaagagcattatggctactctcaatatgaggctcaaaagttcccaaagctggagtgttgttactttcctcttgttggaagcattatgccatgcagctgcacttggaggataaaaacttttcccagcaatacaaagacttgttggaccacggatagcagaattggagagctcacactcttccctgaagctgcaatcaacaacaccttggcatcctgggacccactcttgcatggtttacatggccacttttggtgtgccattttcaagcacacgtgtgcctttgccaattgtgcagattcttggttttatactgcaccttctttcatgctttaaaattgattttacaccctattttcaataaatttatctccacataactttttcttttaaaattcttctttaatatttcttttagaataataaaatcccgattttaataaattatttgttgccaaatttccttctggcatgcattcttttatttttcttgatttttaaataatttcttaattttatgattttctcaatttttaataaacataaataaattctataattctacggtaattgaattttctccaaattcctatgatccttctcctcatcaacaaaatgaaatttatagaattaattcatacaaaaataaataaggcattagtggagcccaacatctctaatttttttttttattggatatcgattgattttgctcggttctatgacatgcatgagatattttatgcttgctattatacactaacctaatttctcatgaagcacttagttagctgctcaagtacgccttctattcattctcatatgtttgattatatgtctatccatatcttgattattgtacattgtatttattactcgatatccatagattaaccatttccttaacttattattagtgacctgattttagggtttaaaggggtgttacgacttaccaccgtatctttcctatatataacatgatccccgaatctatactttgcttttcatagacctgtttttcctttctaagagtcatacttagagttttctttcttattttgttttttctataaaaaataaaacaaaaataagtggttactccaaatcttttctaaaaattatttttttcacaataaaaaactagtctcgctatcaaatggaacacacgtgaaaaatgtcagtccacaaataattattctctataattaattattataattaaaataaatgataattatgataatcaataagataattatctctagaaaatcaagagataatatcaaaataaaaatttcaaggagacaatttgaagatcaaagaaaatttagagagttcttgaagaaatttttggaaaacttaagatttcttgtatacttcaagaaaatttgaagatttcttcaagaatcaaagatgattcagatttttctttaagaatcgaagaagaattgaatatttttttaggaaaagaagatttgaagattactttttatcagaaaactttgtatatgatgaaatcctttttgatccaaaatcaagtagtaaattattaaaatggtgtttttgtcattgttattggaaattatttccctcaaattataaaattactatttttccatagtttctttatttgggaacatttgggtgtacaattgtcattatgttgtaattatgaaattgcctaacaacaatttattaacttaggtcaaaattgggaacctaaatccaatcttttaaatcatgaagttatgttaccacaattatggttcattaccccaacctataatatattcttattaatagtttaccttgattttatagtattttaatttaataaaagcacaacatcataatttccaaatttttgattatattattattattagattttgttagattttttttttaaaaaaaaaagtacgagaaaaaggaaaagaaaatgtaaagaaatatttggcttcattttattttgttaacttaaaaaaataagtttaacaaacttttgatgaaaaaacaaatttatttttttagaatttgctttgaaaacaagtttttactagaataacttttaaagtgttttaagttgttggttttttttctttttttgtttatagtttttgagcaataattaaaaataaaaaatattttgaatttttttttatcatacataggtttataatatatttatagagaataagcctagaagattgtatttaatatttgtgttcaattttgacattttttttttagtatccatctaaaaatctatttttttgagaattttttaaaaaaacgtgggtggaagatgcccttaaattctcttatttgttatgggataaaaaataccataaaaatcaaatttgattatactttgtatattttaaattcttgtttcttacatgaacgagaaaataagagaaataaattttaaaaatcattttttagttctttatccttttttccttgagaagacgaagaagaggcaaaagaatagtattggatggttgatggccagtccatgtacaaaaagtagacacctctatatgcaagtggagtcaagtctcctctggagtgtggactaggccaccgtgatgggcggcactcttcactgcacaaggcttgacctgagactaggtcttttgccccttcttgactggcttaacccacttctccaaaagaggttgaggggttcttttcattgtagggaccacaacaccagggttacccaacaattactttattctttcttcattctccctacatttctccacctgcattatgacacatatgcaaatgttgttgaattgtttggtcgatggtcagtcagaaaataactctctggaattaaaatttggatgggagttaggaaagtcttgcttctttgatgagtatccaatggttcaagcatggcatccagaaaatgtaaaccttcatgcatataggtttggaacttacttcttcagaaaatgtatgattctccaacaatccctaatttcacacccataaattcgccaatccatttacaaaaggtgtctcctctatatgcaagtggagttaagtctcctgtggaacgtggactagggcaccgtaggccgcactcttctgctgcatgaggcttgacccgaggctagcctttttgccccttttggaaaactgcactgtaggtgctctctcttcaccggcctaacccacttctccgaacgaggttgagggttttcttatcattttagggagccccatattcaaaagctgttgaattgttttgagtatgtccaacggaagacagttgttgcaacagctgtggtcataatccatgtgtcaaactttgtgtttggtatagggtcatgcagaaaaagaacagttcttttttttttaaatttttttaaaaaacgggagtgattgataagatgttttaaaaaatagtttttaaaaacaaaataacaaaaaacttgtcatccttccattacttttcattctgctattagcttcaggtcctactgtggaaagtttgctcaatgtgtctcaattccgagattcttgtcccagtacccacggccttttacacctcaaacacttctttcagtgctattctgcagtcttctgcccataacctcaggtaccccaagcctgagttttcaaaaacaatagagaatcttgtttttgaaaattgtaacttaaaaacaattaccaaacatataaaaaaattttaaatttgttttctattttttaaaactaaaaactgttttaaaaaactccgttaaacaagcttaaaattttcatgtatataggattgaacttacttcttcagaaaatgtagaagtttgtttgactatgtgatttaaaaacagttttttacttttaaaaatataaaattgttttttcattgtttactagaaacaattttttaaaacaaagtaaaatagagaacaatttttagagaacaagagttgttgccactagtttttaaaaataaaaggaaaacattgacccatttgaccatattttcttaaacttgtttttaaaaactattttttattcttgaacttaaaaacagtttttaaaaagaagtttaagaaaacatgaccaaatggcttgacttgagactaggtcttttgccccttcttgaccggcttaacccacttctccaaaagaggttgagggtgttcttctcattgtagggtccacaacaccgggttacccaacaattactttgttctttcttcattcttattacatttctccaattgcattatgacacattcaaatgttgttgaattgttttgagtaaatatgtccaacgagagacagtagcagcaactctagtcatagtccatgcattcgatgatgtgtaggaagtgtcaaactttctatttggtcaatggtcatgcagaaaattattctctcgaattataatttggatgggagttagaaaagtctggcttctttgatgattatccaatggttcaatcaaggcattcaaaaaatgtaaatcttcatgtttataggtttggaacttacttctagaaaatgtaagacttcatgtatatatgattctccaataatccttaatttcacacccataaatccgttattccactgcgataattcatataatactattcttctctaataattcctaattctgctttattccactctaatatacatatatgtcttaattttactttcaatggaaaagttataaatcctttattctattaatttgtaccatgatctaattgttctatgtccttagtcacattgcttcatttttttcccaattataagatatggtggactttaggattttaattgagctaaaatatttttattagattattaaaaactggacaaacgctcaaacctaatgctcaagtgctcatacttggcacttaagcgctttgagagcactcaagaaggggaagcttgagtgtttgaagcatatttttccaaatttgaattctcgattttgttttaagaattggtttttggaaacttcaattacatatctatccactagggtttcatccctatataaatattatgcctaaaaattgtttttgttattgatgcaaatttgaaaaagagattattagcctttactacattctcacactcctaggtttttatagttctcattctttgggttcgtgagaaaaatatgtgtcctttcaggtattgagatagtctattggttgcacatgcatgttgcgttgcaaacttgaaaactagtatatgtattggtgaataaaacttagggataatatatatccactacgtaaatttgtatatttttcttttacagtctttaatcctgttatttttatatctatatgatctttgaaagacttcgtagatgcttttccacataaaaatcgttgatttctcttctttctttctaattattgacgaagaattaaaaacaaaaatttgtaccaaaaaagttattagatattcacccctctttatgtttcataatcaaaatgtataaacttttaacatgttattcaattaatttataaaacgtggataaatttttttgagtataattaagatagagaattccaagcacaattaagattgatggatttagtatgagttaaagaggaattaaaaataaaaaatttcattaaaaagaagttaatacatattcactccttttaagaagagaagataatactattgtgtagcttttctttggagatttctttaagaagagaagaagatttaaagatttcttgaggaaaagaagatttgaagattcctttttattgaaaaactttataatctatcatttgttgatgaaatcctttttgatccaaaattaagtactaaattacttaaaatggtattcttgtctttataagattaattagagggtatatcggaaattattttctgaaattattaatttacaaatttttctttcttttattcaagaacatttgggtggacaatcgtgattatgttgtaattatgaacttgcctaacaacaattatggtgaagacaaataaatccgtgacattcattttctttgtgtgatgtgggttcacctaatgaattattgtcctttaaagttagcttccttttcaccgcaagtgaaggaatgaaataaaaataaaaaatcagaagaagttaaaattaaaaagtatagacgggtctccttgttcttttctttcccaacaatttcatgtggacggatggagttttcttatgaagagaaagcaaaataaataaataaatggtaataatagaaagtgaaggatgatagaaaaaacgttttatagatatataatataatataaaaagtaaatgagggtctagtcaatgcgattattaaaagagaaagaaaccaataaaaatcaggaagcaaaaagtaatgaaaatcatgggattggtggtgattgaattagtatggctgaataacgttataaatgtataatttgtatattattaaaattaaaattaattataaaaaattaaaaatatatatgaataaattaaaaatcaataatatcattttatatttttgatattattaaattaaatcataaggataaaggtattttaatttaataaatgcacaatactagaatttccaattttcaattatattattattattattattattattattattattattattattattattatatttggtcagaatttaaaaaaaaattacaagaaaaagaaaaagaaaatgtaaagaaatcttaggctctatttggaaagtatttttaaagaaaaaacaaaattttaacttaaaaattgagtttaacaaacttttgatgaaaaaacaagtttattttttagaatttgctccgaaacaagttttttctagaataatttttaaagtgttttaagttgttgttttttatttaatagtttttgagaaataattaaaaaataaaaattattttgattttttttattatacataggtatataatatatttatagagaagattgtatttaatatttatgttcaattttgaaaaaacttcttaatacagttttaaaaatctgttttttgagaattattttttaaaacatgggtgaagaggcctttaaattctcttatttgttatgggataaaaaataccatagaaaatcaaatttgataaaaatttatatatttttttgcttctttatcctttttccttgaaaagacgaagaggcaaaataattgtattggatagtggatgaccaatccatttacaaaatgtagacagctctacatgcaagtggaattaagtctcctatggaatatggactagggcaccatgggtttagtttgagtacactcatgattgagttgtaattatataaaagttgttaaagtaatttattaaattattaaataggtttcaatcttttaaaaaatgagtggcaccgaaagtgagactaccaagccaaataaccaatgcttttaaagattgacactttagatgagactccacttaagtctttttccacctccttgatccacttcttccaagatgtttgttgcccaccacctagtctcccttctttaacatctgctcttacaaacctcatcgtctccttcaaccattatcaactatcttttcttcttactttctcatagcaaag

SEQ ID NO: 11159 - DNA, 8814 bp, Vitis vinifera
  Intron number 5 from transcript GSVIVT01035818001 (locus G SVIVG01035818001) derived from phytozome v7.0 (chr-ID chr4 ; pos 4600157 to 4608970 reverse strand)
atcctgaggtgcaaactattacatctttaatttttatactaagttatatattatctagggttgcatgaatgcagagattgaacatggatacaaaacaatgtggatgtaaaagacaaacactagatgagtacatcattataagctttgtagcattggcttaatttgaaagatggctaggcccttcactttatgatatcattctaaatatttttatcatattggtgttttaacatgtattttatattttggatgtatagccattcacatactttgaattagtttctctaactagcactcttcctcgttagatatatgctttccatctttatggactttatattactatgatatgttctatgaacaagaatggagtcttgcttcttccgcattgattccaaatcctttgaggtgaggattgtctggtcaaagggtaggggtgaggtgcagatagtggagaaaggtaaaggcttccgaagatggatcaaggcaagtagaggggtagtggtgtggtttctgaagtcgattgaagcatgctgcaagtggagagggaagaaactattcaagggagacgtgaatgatcgaggtaggaggtttagaatagaaatgcaccaaaatgatgttggacgttacctcttgttttcagtcctttcagaagatgataggagatatttcattattatactagagggatttgacctcttgggttgggacttattcagaagcaagctgaaggagttagccaaagttggtgatggctctaagcatggagcagaggactctggcacctatggtggagggaatgaaacttctcttgtaagacccggtttaagctatgtagatgcattcaagaggaaggctaaaggaagaagtgaggaagtttgggttgaagtagggaacgaggcttagacttccaaattgaaagatctcagacgatgtttggtgggaagatggaatgccgagaatgaggcagctcccgacttaagggtggtggagatttgggcaaacacccattggagttttagtggtcaagtgagtgtagcttccttaagtgattccttgtttctttttgaattttctaaagtgggagatgctcaaaaagtgttggaggaggggagccgatgcctcaatggtgtccgattatctttagactggtgggctccaactatggggtgctctaggagggaattccagagggatgtatcttgggtgagaatcccagggttgccgcttcagttctggagtatggagttctttaaaagggtgggggattcttgtgggggatttgtagatatggatgaggagaccaaaaaatctatttacaggaagggggttagaatccttgttaagaacaatggaaaggaggtgcctggaagtttagaggtaatagcggggtttgcttcgttctctatcccgttatggtgggaggactcggtgtggttctcgtctcttcaggtggcgaatagtttaaagattcaaagggaaggtgaaccagagagcagggcctcccttcagtaggaggaaggggggtgtgagtcacgcaagatgatgcgcgtgaaagggatgtgctatggagaaggaaactctgatgcagtcgtaggtgatggagtctctagataggggctccggattcccgaggaaaaggctaggatagtaggttgtgaagaccttgtttctatgcaagagggtgctgggttggtagatgagacgagtgacacgacagggagtgggtcggctgcagtagacaggagagacagaaagctgatttttggcggtggaaggagatctgtggatgggttgggcgaggaaatctctaagtgggccaagctgggagggccatctggcagtgggaagcccagtctccatcgggccaagcttccttttaaaagaccgggcttgggcttatataagaagaaagggaaatgggttgtgattgtcaggcctaataacttaaaagggcttaaaaaggggctagcccaagaatcaatccaagattcaatcctagggctccttgcctctaagtcaggggagctcaagacgaagcttcagaggcctagctttgttggggagagtttagagaagaaggcgacccgctggaccaaggcagcagggagttgcctctgaaaagtcattcgccaggtatgttccctagatcgactacctttggaggggtgtttggggagttttctggctttttttctccttctacttcgggaatgggggactctgtggagtatccgttggcatggcagtttgaggtgacgtgtgacaatcctttggaggctgaggtgccgttaagggtgatcctcaaggatggtcgttccttcaccctgccagaaagggtaacccctaagtctcggggtaaagagcttcagacgccacctcttcacataactgtagcaggagaaggggaaaatatcaaatccccttgggtaaagaagaaatttctgggattttgtaagacggtgggggtctcgattgaaggctttgaagatgacattttgagaatccttaaggagattgataatagaaggggtgttatcaggaagcctaatgatagcaagagaggaacattgtcagcttcaagggagaaaaaggagctgaagaagctggtcagtactattaactatgatgggctggctggaagagaggcagaggaaggggagttgggaaggcaaattactgtggttccttatgaagcttaaaataatgtcctggaacattagagggttgtatgaccctaataaaagaatggttattaagtcgatggtgagaaaacacaaactatatttggtgtgttttcaagagacaaaaatgaaggagatgtctgatagaattgtaagaagcttggggattggtagaaatttgggttgggtttccttagatgcaaggggctcggcaggtggggtgctagtgatatgggataagagagtcttggaagggttggaggctgaagtgggctctttttctatttcttgcagttttaaaaactacgaggagggttttgtgggtcttctctggtttatatggaccgtgtaatggtaaggagaggagggagctatgggaggagctagccgctacaaggggctttggggtgatccgtggtgtatagcagaggatttcaatgtagtgaggttcccagttgaaaagagtaatggcagacagatgtcaaccatgatgagggatttttcaggctttatagaggagtttgaattagttgatcctcccctgggaggtggaactttcacttggagtggaggggaaggaggatccctaaaggctcggttagatcgctttctgttttcaggagattgggaggaacagatgtcgggggcaatgcaagtttttctttcaagacctgtttctgaccactggccgatcttgttagactgtggagggatgagaacaggtaaaagcccgtttaggtttgaaaatatgtggctaagggtggaaggtttcatggacaagtttaaagattggtggcagtcctacagttgtaggggggaacctagctttgtgcttgcaaagaagcttcaggctttgaaatatgatttgaagaggtggaataaagaggcccttggcaatgtgacagttaggaaggatgctgccttggaggagttaaaattttgggacagtttagaaaggtgtggtcctctttttaaggaagataggaatagccagcggatagctagagatgaattcagccactgtgccatccttgaagaaatttcttggaggcagaagtcaagggctctttggctaaaggagggagatagcaatactaagttttttcactgcatgaccaattcaaggaggagggaaaattttattagcagcctgacaaataagggtgttcggttgagtaaagaggaggagcttaaagggattgggtcttattttaaatccttgtttgaggaacctcgggtgagaagaccagatgtggagtcaagtccatttaaaacgcttgttgctttggataatgagactttggaggggcatttttcggaagaggaggtttacaaagctatctcagagttgggaggagataaggctccagggctggatggttttacgttagcattctggaagttttgttggcctatcgttgggggggaagtgatgcaggtctttgaggagttctatgtgaagaatactgtttttcgtagccataatgcaacttttttagtgcttatcccgaagaaagagggagctagtgatgtgcaggattttagacccatcagcctattagggagtctttataaaattattgtcaaagtcttagcaaataggatgaaaagagtgatgggaaaactagtctcgtacagtcagaacgcttttatggaagggaggcagatattagatgcggttttggtagctaatgaggcgatagactcaaggaagcgaagcgccggtgcaggtttagtgtgcaaattggacattgaaaaggcttatgatcacgttagttggaagttccttctttcagtcttggagaaaatggggtttgggcccaagtggcgtagttggatatttttctgcatatcaactgtgagaatgacagttttggtgaatggaacttccacagagtttttttcaacatgtagaggcctaaggcagggagacccactctcaccttatctatttgtgctaatcatggaagcttttagtagcttaatctcaaaagttgaggagaaaggtttcattagaggattcagggtaatagggagaaatggagaaggggcttcggtttcccatctcttgttcgtcaacgacactcattttttttgcggggataataggaaccagttggtttttggaagtgggttgttatttgttttgaagtggtttcaggcctaaaaataaatttgaaaaaaagtgaaattatcccaattggggtagtggaggatgtggacagagccgctgcggtttttgggtgtaaagtagggaatttccctactacttatctaggcttacctcttggagcccctcataattcttgtagagtgtgggatgtggtagaggaaagattcaagagaaaattggctacatggaaaaaacaatacctttctaagggaggtcgtcttaccctcatcaagagcactctctcaaatctccccatctattttatgtcactttttgtaatctcaaggaaagtgagaattagattggagaaaattcaaagggagttcttgtggggagacgtggaggagagaagaaggatccacttggtaagatggacggctatttgcaaagataagaggtatgggggtttggggttaaggcacttgaaggaatttaatcatgttttgcttggaaaaaagctctggagattttctttagaaatggagagtttttggaggaaagtcattgtggtaaatttggagaggggaaagggggttggaccactagagaggtaaggaagtcctatgggatgagcctttggaaagacattagaaagggatgggaggagttcttccttagaactagtattcgtattggaaatggtagacgtaccagattttggtgggactattgggttagagattctaagctgaaggagctctttcctttgctcttcagaattgcaacccataattctactgtagtggctgatctttgggggagacaaggaggtggtggcgggggatgggaggtgcactttagaagaccctttcatgattgggaattggaggaggtgaatctttttcaatttacatctctacagtaaatgtccaaaaatgggaggattctctaatttggaagattgagagaaaaggaaagttcagtgttaaatcttattatcagtctttaaaagtggagaacagccccttattttcagcaaaggaggtatggggttcgtgtgcccctttaagaactcgtttttttgcttgggaagctgtttggggtaaaatttctactgttgatatgttaatgagggaggggttggtctatggttaatagatgcaatctttgtaaagagaatgaggaatcggcggatcatattctaattcattgcggtaagacaagggagctttggactgtggtgctctcttcttttggggtggtgtgagtgttcccgaactcagtgagaaatttgcttcttgaatggaaaattaagggcctagaaaaaaagaggagtgtagtttggaaaatggcgcctatttatttgttttggtatatttggggagagcggaatagaagaatgttccaagaagaagagaagtcagatacgagcttgaagaatctcttccttcgggctcttcttgaatggtctcaacagttcatggacgtggactatctctcttttatgaatatgttgggtggttgattttgttggtcatctgtggcatttctaggtttttgtttctcctttgttgccttgggtgaggccttctttgtatactgccggtgtacttagggagcgccccctgttttggcgtgttctaatatgatttcttctcttggtttatcaaaaaaaaaaaaattactatgatctgttctcactcacttgtatgtagaaaggtatgataaagcactttctttgagagataatgtgatgcattttttagtgatagtgtgtaggaagaacatctactatatgcataaatgaagcacataataaaatagagggtgaaggtcttgtatggattggcttttgagaagccaaaagctcttttcaagctcaattagagttttgtggctacgtgggtgattttttttttttttttttcaatgtgattatgacttaaaatagatcttaacatgcagtcaggaaaatattacttctccctagaaaatctattttgacttatgtaagaagctattcatgtttaatacaacttatacatatcatatcaatgttaccgttagacaatgatgcctttggtttcgacctcaacttctagaatagaaagccatcccaaacaggcctgaagagtgggatgaacatgtcaatattggtcccatctttgacaattggctgctaatgagcttgccttttgttttcttgttgcaccatttagttttcttgcctatttctcatataaatgctagaacagagtgtttttgcataggaaaagaaacaagtttagagggctctcagggaatatatataatcatttagagggtaatatatggatttaagaagttcaatccttcaggatgcattagacagtagagaagtgacagagaggttaaaatcttgtttaaagagagattctgcagctcttagtcaaattgtttgtgtttaaaatagcttggatgaaattatggacaaatttctcctttcctttgatattagttttcaagaaagcattcatggagtgtgtctaaatagctaaactagagtatagtgaaagaaatagtgttatgcatgttaatttggtgtgcaaccattctttctggaggacctactggatcatcttttatagacaaagacaagttgtgttggtcaggaataaaacaagttctggatagagcacgtacattttctgtgcaaccattcttcctctatttggttatgagtgcaaacagcatgctttgtttgaagttactgagggagtccgcacttcaaatggcagtatccctttttttttctcttttttgataggcgaaggtcagtattattttcttacacagtttgttaacaaaacactagtggttgataacttgatatatccaaaatttggatggttcccaattgtcatgatcttggtaaaacatggtcaatatcttttattcctaagtgacttcattgttcattctcaggccatatgggaaatttcgcttataacacgctcagaaactttagtcttatgcaactttatttttcattctttttggccatatgggtgtgtttcattcataaatatggctcttacatgatgcctatttctttaagagaccttcttgatggaaagtaatgtcaggcgtggagcattagaacctttgtgatgtggataatgattcctttaagattctatgattaatatgggaaaaaagaaatgggaaagctttgaaaggaagggaaaagccaatattttagtgacagcacggaaaacgtgaactcctttgtttgatagtattcactatacttcattttgccttaacaaacccattaaggctttgttaatttagcaagaggttacagagaaaatggaaattttatttcctgttaaagtttcctatcgagtttctgggaaataaattgagataatgctggaaaatgaggcctaactgtcctgtttttggatggaatgtgcaacttcaatgctgcatggaaagctgtcacatcagaggaaagttgcacctgcactctccaccccttgtaccaaaggctgcttaaaagcttagaaggttattggcttttcatccggaacactgcttatggatttatgagtaaaaatattgataagacggtaatcgagtaacaaagtcttaataggaatttttgaaatttcaaacaataagacaaatattgtttttaacataacaaagtatgtcccaagagacttaatggatgctcgactatagaaagacaactccatcatgaactgttacttctctgcatttattttacagtgataagtttatctagacatgtgatccttgattacaatgccactaaggccaagtggctttgtttacttgataaatgaccagaatcattctggccttttgaaatgatgccatcaaaagaagcaagcatttggatttgttttctgttttttgggttatcaaattcttttaggatttgctgtttgctgtataataattacaacattgatgtaggccagtcagcagactcagcaccaacgtggc

SEQ ID NO: 11160 - DNA, 1199 bp, Vitis vinifera
  Intron number 2 from transcript GSVIVT01019716001 (locus G SVIVG01019716001) derived from phytozome v7.0 (chr-ID chr2 ; pos 2684040 to 2685238 reverse strand)
tgcgtttcatctaaattagtcttctgccgattcaggtaacaagaaaaccctaatcttgatttcgctctcctatgaaaaatttttatgctttaaggtctggcaatcacagctgtatattctaaggattttcgcgaaccccagtgaatcaaatctgcaatatgtgaaaaatcatattcgaattgattttgttaggattttgtcttggagaagattacatttttttgtcagttcctgatctatttttgaaatgccgatgctggccgttctgctttaatcataatgaatccaattttaagtgcgtggccgatcacccaaaaatgttcactttggtattggaggcagacccacacctcggagtgccatggaaccgcgtgtccactaagtggttggtttaattcatgtagtgttattcaaataattaatgataggttcattttaggaaaagtagtagaagatgtgaaagcttcttctttgaaaatttgaacgctaaggcagtcattattactcttatcttactttctttcttctgataatttagcaattcggccatgttgtgaacaaagagaagtttgttgtttgggcgagttatgtagacagagcccttgcaatgatggtggcttaaccattgaagatatgtcatgcatccgggttatggtgcatcaatctcattttttttcttctaagattagggttcaggaaattgccaaaagggaagctttcatgatatatgggaccatgtactccaaatcctactacttgtttgtattctcttttgtattttctgaaccttctattgacctgcttttcttgctgatatgaaagttgtttctttactgtttaatcaattttgttccatatgtttgtaggttcaaaatattctctttcccgataatcttttatgaatgtccttaaaaaaatactatcattttgacttccagaatatgtgttttttgttggcatcctcagaatcacctggaggacaagttgtcactctatgatttaaatcctctggatcatttgtgcatttgaattactttgtttatgtggaattcagtatttatgtgggtttagcaagactagcgttgtaagatcatgtacctgttgaagcttaattaaatcttctgttattttgtcttttgtttgatttgtgttcttatatttcagttttggattacatcctgttgctggttttgaacaag

SEQ ID NO: 11161 - DNA, 1124 bp, Vitis vinifera
  Intron number 1 from transcript GSVIVT01012101001 (locus G SVIVG01012101001) derived from phytozome v7.0 (chr-ID chr1 ; pos 1496159 to 1497282)
gcgaccaggtgattcccttcccattctctcaattttctctctatcttattcatttttttcatgcatgcgattaaaccctaaattctaaccctaggtgtatgtttatttattagaatcctgaaatttgctaatcgataggctatgtatgccatgaaaccctaatttcaaatccaaggtgtcagttcatttgctagagttttaacatttgcaaattgatagactagatgattaaagaaaaagaaaaagaaaaaagtagtgctttgataagagccctaagatcttttgggagggtgtgttttgcttgtccttgaaagcttaaggattgaagttgtgggttacaggtttttggtaacttgtaatttgcaagtaatttcttcattatctggaaaaaccggtttggtccttccagtttttaatttcatttttgaacaatatgacgggtttaggagaaggggaaaatagtgctaagaaatccccactttgagtgcttgtgtgggtcgggggttggggttcaagcctgcatatttagaaactataatgaaaagttattttaatatttcataattttattattgaaaggacctttgtgatcgacttactaggatttgtgattgaaaattcccatcttttgattagtgatgcaagaagcaatataatgggagcaggttggagttgaatgtttattaggaactcgatatgtggcttaccagtcataatggcaattctcatggttctgtgtattaataaacttgtccatgctatattgttacgcagcatgtgatatagtttatgattggctgacatagagctaattaatacttttcttgacgattctgattaaaccattctagaattcatacttctacaaataacccaccaaaaaaaacaccattctagactatcatattgactgttgttatattggaaatcctgtaaagtgcagcatttgagatattgcaacaaataaaaaatccaagaatacattgcctagctttttttgcttttaaacactgtttatcataggatctagaataaaaaaatgtggaacattaagaccttttataataatcagcacaaactaaccctaatttggtttttgaatgtgcaggttgcagttcattact

SEQ ID NO: 11162 - DNA, 3538 bp, Vitis vinifera
  Intron number 5 from transcript GSVIVT01034468001 (locus G SVIVG01034468001) derived from phytozome v7.0 (chr-ID chr1 8; pos 20847072 to 20850609 reverse strand)
ccatcttgagtgtaagtacaaaaagtaaaacaattaccattttttttctaatgaaaaaatgcaacattgcttattcctagttataatatttatttgggaaaagtagcaaaaccccattaaagagagaatcttcaatttaagaaacctgcaaatgcaatgttttagtgggagacctataattcacacccacacatatatcccatcaaataatatttgtgaactgccattgagtaacctttcctttcttatttttcttcttcttcttgtgaagaaaatgcttcttcctttgagctttatttgaggaatggaaaatatggactaacttcttcttcttcttcttcttttttctttttgatgagaaacaactatatcatatatcaaatttaaaggttacaatagaaggatgacaaatcctcccaaaaataaattagaacctccaaaatactaagggcttgtttggtaattgttttcgaaaaaagttttctgttctcctgaacaaaaaaacaggaaaacatgtttggtaactagaaaatagaaatagttttctgttcttaaaaatataaaacaaggtgttttcaaagaatatctttaatttgttttcacttgttttctgacggttgttttaaaaaataattatagaactatagagaatgattaaaaagaaaactctacatataaaaattatttttaaaatatataaaaacatagaaaacaagttaaaaatatttcaagttcctaaaacaggttcaaaacatttcaagttcgcaaataggtatttattctacaaaacattggagaatagttttcaaaaactattatcaaaaactgtttttaaaaacagttaccaaatagggtctaaataaacctaaacacatatggcataccaaaaaccatgtggataataaaattgcgacctctcctagctagccccataactttggacctacacatcgaaaaccaatcaagttgaaccacattaagggaaatgcccttaaaagttgaagtgcaagaggcccaaaacgaagcgagaaaatagatggtatcccaaatatcctctgaagtcctcaccttgtaaaacattcaaacatttctttccccatgcaacccaaatcaaagtaggacaagcaaaataccatggtaccaaacctctattagagcttcgcaaacccttaaatgagatggttaccatgtgacaaatactcctaggaggaacctagtccaacttagccaatctaaataatttgtgccacaaccccaaagtcaatgaacaatgtaaaaaaagatgatctaccaattctctatgcttcatacataacatacaaacatcaggattgagggctttataggatcttaattgtagtatgtcattggtatttaccttcttgtgtgccactaactaagcaaaggatttgacctaaaaagggacttgagatttctaaacaaaattggtagggaagaatggaaccggaacaaaaagattggacaaggctaaaaagaaagattttactataaatatgcctaaagaggataaagactaagctctcgcatctggattggaaggagataagtgtaagcgtgtaagagacgacattagtctcttttgatcttctatctcaaaatcaaaaaggtttacaacaaaagttaaagctccaagagaaagaagtagacctaagcattgaggaaataaaaaggtttttagttgtgacaattttgaatagacttgggagttgagaactcaaaggttgatcccctcaccacaagtcttcctaaaattggattggcttcccatctcccaccacaatccaagtatacctagtaaaatcctaaaagacagtgtgatggtcttccatgggtaacgatgtggccatctgtttatagtgttggcatcccacccattagtatgtgtcctataaatacttagaataaccttatgccacatggcaaaactttcccttggaaacctctatagccatcttcctaatagagcacgattccttagagaaaatgcttcttcctttgagctataattgaagactataaaatatagaccaacaaatagaagctatggtattgtcctttttgtcttttaggtaactgaaacatagaggatatttttaatgaaatgggcctctggtttgatgatccctatagattggataatcccaaaactatgatattttccatttttgtttttccattgatgttatattcaagtagcaagaatataaaaaattttagaagggaggtaatgatttattctttatactttcatgatgccccagtctcaaggggttaaacaaactaaaatcgtagttattattcatagatgcagattaccatgagcttctgagattaggttatgtggtgtggaaatgattttaagttattgattctgggttcaaatcagcgggaagaatatatatatatgtccaaactccaggaggaattgatagatgcaaggaaaatacatatagcacgagtaaacatggaaaacactgagaaaatactttcacataaaggagcaaaaagtcaataaccctgatcacctgacttcaatcttcaactctcagtcaactttggtcacaatcccaaagatattgtaaatcatatccatggtgcacacgaaccaactccattagcaactaaacattcttcaaaagttggaattctttcaaattttaacaccgagtccttaagtaggcaatcaaattcatgagcataaacaagatatgtgggttaatagcacaatgtgtctcatgaaatttagctgggatacaatgaacttgggctttatgactttttattaattgagcagcaatttctcaaacatgttgctgagctcatgtgaaatccaagcctctatattaattaaggtactaatagaacttggtggactgttactaaactgcccattccatttgattgctggatcactaagcctgccagaaattatatgtcgagaacgcctgaaaaagttgatagaaaaatgcatgcaaggcttgtcttcatagcatgaactgatcaaattaacctattatgatgcaattttaaccaactttttaatggaatatgccaactctaaatcctaacagtgcctattcttggagataaacctaagagattgcaaaagatgtaggaggccctatttggctgcctttcttgaatcatcacctttacagttgggacatgtgctggtgttgctactcatcagctggacaaacatggaaggaaatatgtgagagaatgttgttgacgtgctggtgttaaaaagtcattattttctaccactttttctttcttatgaaaccctgttgcagttggcaaatgcggtttttaggattgaaaatgtcattttatggttgttctggagaaacaaatatattttctgaatttttttatgaagagctttttgaggggtttttgataattatctctaccttttctcctccaagattcaacttacaaatgtgatagaaagaaaattttcagtttaaatgatgattaattattataacatatgctgttattgtctcaggct

SEQ ID NO: 11163 - DNA, 5307 bp, Vitis vinifera
  Intron number 12 from transcript GSVIVT01032335001 (locus GSVIVG01032335001) derived from phytozome v7.0 (chr-ID chr 11; pos 15167540 to 15172846)
atattccctcaaactccaaggtcaggcttgcttctttttagtttctgaattcggggatggatctggtatattggacctgggcccttacctgttttggggcttaccatattgtttcccttatttaccttgatgtgtgctgaaggaacctctaatgtgtgtcttttttttttttttagtaataataataataataaaaaatcaatccaaagtggtatatctttggtttgacaaccatgcctatcttcatagatgagaagaggattccactacaaaacaatgcctactttcattgatgagataggagtccactacaagatgtagaaaattaatgcaaaactttggaagtctcactcctcttatctttgccacattcggagccatgaataaactcatgcttatcatcctctgcaagggccatgagatggacaaatttttttatagtacataggagccatgaaacaaacttgtgctttcaatgttttgtgagttatctttctacagatctctctctctctttctctctctctctctcatctcatgtttatatcatcttggaaggtttcacttgaaaaacttatgtatagagagaatgaaaagaatgagctgtataagaaaactccagcataagttctgctctacaccaaaccctagactcagatttctaacaaaatagaaaccctgcagagataggaacttgagataaattccaacattttctgccttggctcaaattgtgaagtcaattttctagtctgtacatacttccaaagtatgcctctttaataccctgatcaatgcagtcagtgccataccttcaactaggaaacttgtcaaacttaggaagaatcacatgcaaatgttttgccatttagacattttaatatttccactgcatgataacatgcacacacctattctaggttaattgactaaatactccatgtattttcaatgacaaaggaattgactccaccttgaatcaaaatttcttttacaatcctcttggattccaaatctctttttaccgcttcagtgtccaaacacacaatcaactcaaaattagataattcttgtgttggaatctccaaaattcccgtttcttgttgactgcactttggatttgaattctctagatcttggttcttgatcttcgccaacatttgctttagacttctccaactagctttcgtcatttgctatgcgccaattgaagctttccacttgttatacaatcatagtcaataatcaacatatgaaggaaacaatacttccattgcactgtaaaactatgtttaccttcacaaatgagattaagattctactacaaattatttgaaaaatgatgaaagacagagaatactgatacaaaactcctaaggcttgctcctagtattttttttttttgataggtaaacaaaacaaatatactaaaagcatttggaaaaggtgcacaaagtacacatgaagtatacaagtagcagctgaatacaagcaaaagaaaaggaagaagaaacaacaaaccagacccaaaacatcaaacaaggacaatgacccttcacttaagtacacgctaacccaacttgaaagattggacattctaaaaagctcttcctttaagcaaaccacgtccactcattgcaatctgatcagggacttaaatactcttcttttctctttgtcattggttcctcacattctaggaaagtgttcacagcttcattgattaactgaaaccaaccccacgaaccttaaataaatccatatatcttgctcaatctgagccatgaaaagaacctatattttttatgctctactttgtgtttcctttctcttcctcaaatctccatctcatctcatcaagtcattttatgagttttctcttaaagacttaaaatatatatagagatcatgaacctaattccttgttggttaatgaatcctatccctataaagaattctatctttataatgaccaatgttttgaaagatggtattgaggcgtgctatagtgtgaggcatcttgaaaaagcccaaaggtgttgggaaaaaggcggagaacacaaaagacatttgcctttttgcttgaggtgcttatgaggtgcaccttgcatatgcctttgacgccccgctcattgaagtgtgagccttttgtttgctgaggtggctaataaaaaaaatttgtagaaaaaccattgttccctaaaaactcactaaagagtgaatagagagattttgagagagaaatctaaccctagcactctctaccgttgatggcttgaagatcgacctcttctacgacaatagcctcactaagacggaagtgctgctttgtgctcactttgacaacatcatcttgatggtattattctcactacgaagcctcctcttcatcttgatgggtaggattcgtcttcttcatctcctcttctttcttagtgttgcactttctctcctcacttatttgtcttcttcatctcctcttctctcttagtctctcacttctctctcacctcattgaccccacaactctacttcttttcttgttttatatatttttgtttttatttttctcatgacttctctttgttttttcaatagtgagcaatgagcaccactattcttttacctaattttctcacctcacctcaccacggtctacatccatagtttgcattttttttaattttctattttctatttctattttttaattgttcgttttattttttttttcttaaaaaaatacactaaaacttgattgaaaaaaaaatctattttcttcaattttgagaacattttatttgtattgttttttttgcttttttaaatgacaaattgtaaaattatataaaattaattaatgtgattttaattgttaattatatcaataggatttcaagtcaattatgtcattatttttcgtaagtcaattacatatagaaaattgttcattattattattttttactatgaattcctccaattcagaagattcacgaaaagattttgtatgaaaatatgctattgaatttctggggagaagtatataagatgtaagttttgcaattaaggatgtactggaggggtgaatagactgaaggatcacttagctggaactcatcatcagatgaaaccatgtaacaaggtcagtgaagatgttagattagaatgcaaagagacattgctcaattatagggaacaaaaataaaaaagaaatgcattgctcgaagaaattggtatgggtctaactccatgaatgggagttcctcttctaaacaatgaggacattgggagtgaaagagggggtggggaacccacacctaggggacccatggataaattcacatttcattacctagatgaagtactttgaattccaagtggaaccaagaataaatgaagtatgtagaaaaattgatcattttatgtacttaaatggtcccctattcaatatagtaagtgatccttatcgggggttccaatgattgatgctattgcaaattttaggcttgggtttaagtcttcatctatgtatgatttgaagacatggattcttaaagataaggtgaatgacataaatatcatgatgaaagagcataaaaaaacttggaagcaatatggacgcttaattttgtcagatggttgaatagatgaaaagaatgggcatcttataaatttttggtgaatagtcttgttgacacatggtttatttaatcaattgatacatttaatacaataaaaaaaatggagaattgatgttcaaatatcttaatgaagttgttgaagaaattagagagaagcatgctatgtaagttattattgataatatttttaattttgtgaatgctggaatgaggcttatagaaaataggacaagattgtggtggactccttgtgctgcttattacactgatatgatgttagaggatgttgggaagctaaatgttcatgctaatacacttttatgagttaggcaagtggtgaagttcatatatagacttgcttaggttctcaacttgatgataacatttacgaaaattcatgaactcattcatccaaaaattacatggtttgctaccacatttcttactcttcaaaatctttataagcaaaaacaagatctatagcacttctgaaaaatggtgttcaagtacatgggccaagaacgtagaaggtgtaaaaggttgaagtatagtgttgttttattcaaatttttggcctcacattgctttttgtataaagactactattctattagttagagccttgaagaggttgatttagaggaaaggctagtcatgggttattatttatgtgttgatggactcagtcaaggagaagattgcatttaattatggggacattaagtgaaaatatgacccaatttggagaaaaatagatgcaagatggactccgcaacttcattgacttttacatgcaacaagttattatcataatccttaactacgctatgaagataagttctttaatgtggatgggtgaggaagatattacttaaatgcatgaataggatgttggattaccatgaatgtttaaaggtcgacattcaattggacttatatgaccaaggtaaaggtgaatttggaaaccgtgttgcaattgattctaaaaaattaagaagtcttacaaattggtggatgcattttgggggtttaatactagagttgcaaaagcttgttgtttgagtccttagcctcacttatagtgatttaggatgtgagagaaattataacatttttgaattggtaatacttctattttttagtacatatattcttattctaatgttaaaaaactttgatttaatcttaacatataaatttgtttcttttattatttatagattcataccaccaagagaaatacgtttgaacataaaagtttaaatgctctagtgtatgtgaggtacaatactagattgagagagcgaagtttacaaaggaaacaaaatgttgatttgatattggtagaagagattgattcagatgatgaatgaattgcagataatgaagctttccttttcccacttgatctttgttggcttgaagataatgaactatttaatgttgatgtcactaaaattgttttatccaaagaccaagagactcgagcaccatcaggcaacatggtttcatcacatttctacaaaataaaacatgatggatttgcaaataagtcctaaaagtgataaatttgattaaatttattaatgaacttgtaatattttttcttaatttatactttatgttaggtaaaagcggaggcaaagatagagaaagagttgaa

SEQ ID NO: 11164 - DNA, 5212 bp, Vitis vinifera
  Intron number 1 from transcript GSVIVT01037911001 (locus G SVIVG01037911001) derived from phytozome v7.0 (chr-ID chr3 ; pos 6400040 to 6405251 reverse strand)
cccccagccactgggtgcaacctgggcaaggtgaccgttgggaccaggactatgatgtaacagctcggtttctagacaactgcaacagccttagaaacgggtgtgtaagtggaaacagatattattatgattacctgctcagaatagtcttccttccaaaggaatcatttttcccacacatcgcccaccattgatgactcttcatatccaaatttggttgactggaaggctccggtagaaaaaccaaaacaagaaccttcaggaatgacaatgggaggaatttttcatcaaccatcccatcgtgtccttctaaatgaaatggatttggaattaaaatgaacaagcaagtggtggatttgaatttttttctttttttctaatttcgagcttggacatgggacttttctcaatagtccagtgatttaaaaaagttatgcttaaattattatagtaaaagaagttattacaaatatatggtagtttttgtcacctaggagagaggagagagggtgaacggataaatttttttaaaaaccaaaaatcatcttttcaaatttcaaaagacgacttttcaaaagacgattttaaaaaaatttggaaatcgtctcttcaagagacgagttcccatgaaaaaaaatatttaaaaaaaaaattctcaaattataaaaaaataaaaaaataaaaaaattcctcaagagaactcatctcttgaaaagacgagttccatgaatatatatatatatatatatatatatatatatatatatatatatatatatatatatatatatatatatattttaaaaattcccaaattattataaaaaaatttaaaaaaaaaaacaattcctcgataaacgagttcccatgaaaaaatatatatatttaaaaaaaattcccaaattaaaaaaaaaaaaaaaacaacaacaattcttcaaggaactcgtcttgtctcttgaagagacaagttcccttttttttcatggaaactcgtttattaaggaattgcttttttttaaattttttttataataatttgagaatttttaatatatatatatatatatatatttatggaactcatcaagagatgaattttcttttaccactcaaacgtcttcttattctctctcatgtgtaatacccatatttttccttgacttttcccccactcaaatatccttccatcctctctcttatgcatgtagccacatgttttgctcccaaacctatttaatatgtggggaccacatgttttgctctcaaatctcttaaatatatggtggtcggggtgattttcttttctttgtcatctaaccactcctaataacaaagttcccttgaggaattttttttttttttttctaatttgggaatttcttatgagaactcgtctcttgaagagacgagttcccttgttttttttttttttttttaatttgggaatttctttttttttaaaaaaaaaatatatatatatatatatatatatatatatatatatatattcatggaactcgtctcttgaagagacgagttcccttaaggatttttttttttttatataaatggggaatttttttaaaaaatatatatatatttttttttcatttaactcgtatcttgaagagacgatttcgtcttttgaaatttgaaaagatgattttggtttaaaaaaaaatttatccgttcaccctctctcctctctcctaggtggcaaaaactatcatatatttataataacttattctactacaataatttaagcataacttttttaaattatcgtactattgagaaaagtcccttggacatggttcgtcttgtcttcccctttgtatattaattttatttttttattttttatttttaatacatataaaataataaacaataatgcttaataaaatatgttataaataattaaatattttaattatttataaaatatatttatttttaatacaattaaaaattttaaaagttcatattttttaaaagattaaaaaaatattaaaaagttaaataggacatgacaaaatgatatgaaaattttacatgcctacacaatctcgtttaatttttctttataaggtttaaatgagaattattttaaataaacaaaacaaaagcaagttatcccattgtcattcttatttaggcacatggattaataactattactaaatataatgaaaccattacttgagtaatgtcaattgaattagatgtctaacaaactcttctagattgaactaagatcaatcccattattaatatattgtgaatttaattattattattattattatcattatcattattattatgtcaatgggagctttaatgcaaatctattaacgtaaaaatataaagataaaatgatacacacaaagacataagattttttaatattgtttggccaatcatacctagattcatacataagagacatcatttgactatataatagaaaatattatagagatcaaatgatacacacaaagatacatgattttttaaatattatttgaccaatcatatctacatctacatatgagagaaatcatttcactatattatagaaaatacggtagagaatcaaaccaaatatagttattggattccaaaacatctattatttcccttttcttgtatttatatcttaaatcacgagtccctttctctaagtgtttcattcttctgggtgcaaaaccttaataagttggtattattataaaggaatgtatatgttaaaatggatagatgaatctaataataacccaaaagaccatatattttgcataatgactagtaggagctaaaatgttaggaaaaaaataccctcctactcaatcaacccatactcagtactttccttttcttcatctctctcatctctctcaatggatttcactatctccttcttcagtccttctggaatccaggccgccactatctccgacccctacaagctcgaccagcaccgctgcaaatcatctcagcccacctgtgggtggtctccaatctctggctggtcttcgattccgcactttggtctccaagataattgtccttactataatatcaaatgtagatctatcatctatcctatttattgcacatcattcactagatgaagaggactacaaatcccttaggaaggccatacacagcatccaaattcaatctaaaacagaaacggaatcttcttcattattcaggaactctccagatagattacaccatatttgactcaaagcatgataagatacgaatgtattcctctcacaatttcaggcgtgatttctgggaagaaaatctaaaatagaaatcaaagcttcctttcagggatcgccttcctcttctgattttgtgttaggaataaggggtctgtcaattgcaggtgcaatttttgtgtaaggttttatttggctcattcaaaacaatctattgcacagcattggctaaatttcaagacaatagttataaggcagcttcgaaacagtatttggaatgccattttttctaaaatgttgaacttccaattctatgggactggcaatattacacagctcccaatttctcaattatacaaaagggctcgtttgggacagtttttatagatataaatgtaacaatccgtactcaattgtatatcccatggaattggagggcccaacatacatacacttctcatagaagggaataaacaaatcctcacaccggttcgagaatcaactttaataccattttataataatctgcatccatttacatatttatctcctccaggtttaaacggaccctcacaattttaaaatgcttctacaagattaagaagaactcgtgagtgtgtatatatatataagcaccaatgatgatgatcatgtaaactgattccattctcccacctcaatgtactaaaattgaattaacatatctattcattcatatctctaagaacaagttgaacaaaaaccatccatccgtcattgagaaagtcactgttatccttcatggtccaacaatctgaacccgtttatcactttttaacactgatttttcacggaactgatctcgttcatccacaaacttcaaatcatgtatcatctaatttgaaacctggaattgttttgccttcctttcctacatttgtatcagtctattaaactttcatcagctttttaagtttttgtattcaaccttactccattttttaaggggaaaaaattttgaaaagacaactggagtttggctaattgcaagggctgagaattttcttgcaaattaatctgagaatcgtggccggctaataccatgtatcatgtctgtcacgattaaatcaccagaccccacctcatgattcctagctaatgatccaaccatatcgtttgagcaagtcattttccatctacagtcgctgcaaatttctattctcccattctctacgtgagcactaggcacctatcgaagctgaacaaacagaagacttaaaaattgatgaggccaagggctacagtccatgggtaatgcccaagagaaccgacagtagcattgattcctcgggacattgagaccaaaataaaggaagaagcatatgtgttgaatgcaaagaaggcctttctctgtataaatctattgtgctctttcccttaacctaaaataaaggggagggggaggggaaagcagcataaagctatggcttataaccatatgttccttctctcttccttggtagttttagcagccctgcatggaatccatgcagttgaatatgttgtcaccaacaatgcggaaaacagcacaggcggtgtccgattcaacaatgatattggaattgaatacagcaggcagacactagtatctgccactgagttcatatggaggctcttccaacagaacactcctgcagacagaaaagatgtgcagagagtaactctgataattgaaaacacggatggaatcgcatatgctgaaaacgatgagattcacgtcaatgccaactacatcaaagaatactcaggtgatctgaagggggagttcactggagtgctttaccatgagatgacacacatttggcagtggaatggtaatggacagactcctggaggactaatagaaggaattgcagattttgtgaggttaaaggctaactacatccccagccactgggtgcaacctgggcaaggtgaccgctgggaccagggct

SEQ ID NO: 11165 - DNA, 2785 bp, Vitis vinifera
  Intron number 2 from transcript GSVIVT01017116001 (locus G SVIVG01017116001) derived from phytozome v7.0 (chr-ID chr9 ; pos 4305609 to 4308393)
actgctagaaattcctataacacgataccgttcaagtaagtgtaccatttctctttgaatattcttttaatgttaggatgactgcctaaatgagctctatgtttaaatttggttaattaattttttgctattttgggaagtggattcatggctcattaggcaatagtggttgcatgaatagtgtgttcaggaagcattgctgttttctctatgttctgcttaatgttggtcaagtatttctctgttttttctatctatggtgttttccactggtttgcatgttggcttgtatattctgttatctgatgttggtattttaatgtttttatttagtggtagaattcctttgtgctgattcatagtagaattctctattcctttttggggaggatcatgtacttttatttcttctttttatgcactcacttagattcaattgctccccttcatttttctgccaccttttgttttatgtgcatatccagaagctggttagatggataaatatctcttgacattgagtaggattgtttttccaatctaagttgggtaactctttgcctcactcaaccttagacgagcaagaagccaaccatatctaacttcataaagcttatataactgtttacaaatttctccatttctctccaacatatcagcttcttttagttgggtaaagccctctcccaccgattgacctctgcttcattagaattatgtctagcttctaagcttacttctctcctactaggatacactgacatagtgcttggggaagcaaactaagaccaacttactgtaggattatctcattttcttgctgcctgaccaactccttcattcactttttatcagtttcatggggtggttaacaagccttttgtcatttagctgattataaggcttctttgtcaagcattattgttgtatgataaaataatgagcagcatactgcacatacattaaccaaggctcaatttgatgagtcatgggtaaacgtcatcagtggcctttattatgatgataaaagcctcctatcctgtgagaatgggcattgtgttatacacttatacttgcttcctccttgataattaattttaatcagtcactttcatcatttgggcatgattctcaacagaaaaaagaaaaaaaaaaacatttgggcatattgatagaggaagttggtcctgccccttctgcatgaagatgaatatcattgttattggtaatcatcttggtgaaatattattctccaaccacctttatgtcataaatttgaaatgacagatctggggctcttttgctactttcttggagtaaaattcttcgaaaatagttttccaatacatcaactcatagagatgttctgttgatcactttacgacatttgggatgcaacattgcaaaatggttgcaacggcctgttttgtgaaaaagagaaatctgcaataggatggtctgatattccttagttttgtactatgtttggaggtttggaggcttgcagttttctgcattctctttcagatgcaacttttgatgtcaacccactgtgtcgattttttgcacaatctacaaaattatgatctttaggtggctgaagggttacatgttcaaattataatggatgggttattctaattctaatatctaaaaggtagggatattggaatgacaacctaatgttgaccacataggtgtttatgaagttatggcattctttaatgtgaggccataacatccaatattgaacacacatttcaatactactctggtggacatctcttgggtttgtcttgtttcattgggattagaaatgaatgttaacttattctctatgttgatttcttttcctcttgctcttattttaggtgcatgtgcttcctttgcccttcatttggggtatatgttgtttccctctgttgagggcaaaagtgtcatagacatttactttgaatgctcacacacaactcaggcttgcaaaatcttaccaaactcaccaactagggcaaatcatgcttacattaactgagtgtgagtttggttcctgatttttctcacttttataacaataaaatatactctcagttaacatattaagttgagctacagtttaatgaaaatggtataccatattgtgaatggtttacgatacctgattgtttacttccaatgagcaacctattgatggtggtgtcatgaatttcacattcgattgacactacaatgtcgctgaacttgtccatgttgcatagtgttatgtgtgaagattttagtttttattgaagtgattactgcaatgactgtctcttcttgctccagctttccattctttgttcttttccatgttctcattatgtacatgaaatgaaaaatattaatactggataaaaactttttggtttatagttttatctaactgttacacttttgatataattgttacattattgttcaataagtgtttgagttttgtattcatgcattttttcggtgttattgaggatagtttgaatcatgtcttttgaatatcaattttgtttcagtatggttgttatccaaaatggggaaaaatgggttattagatattcacttataatgatgtgcttattttgtttgccttcaaattgctgcataaattctgtaagacttggaggttcttatgcataattttaatatgtcatgtttcttgctctagatttcattgggtgcaacaaccacatgagctcttagtttcattagctaaattataagcaccattaatttgtagacattttctctgcag

SEQ ID NO: 11166 - DNA, 7854 bp, Vitis vinifera
  Intron number 1 from transcript GSVIVT01036491001 (locus G SVIVG01036491001) derived from phytozome v7.0 (chr-ID chr1 4; pos 22629125 to 22636978 reverse strand)
gcttaactgtaggagttccaagctcttggaaattggtaatgtctcgctcatgttttctttttctttttccttttcctttttttttttttttctaattttcccgtagtttggctgttgttgctgaagaaactgaatcctgagtttcgttggtttttttagtcatttgtttgattgattttagctaactatgatgattaaaattgcctttcaatgcttatggcgtcttttgttttcctgcgttttctaagataccaaatagagcagtggtaatctgaatgccgattttaagcattaaggcgaaggtgccattggccattagtaaaattattggggtcggatttattgttgttattgttgctggatgataaggagtttgaaaactggaaactggaaactaatgctgagttatgcatccatatgtacaatgttctcaagaaaagaatggcccatgcttctagaagtcaacctagttgtagatgtctaagcaatcatatgttgtctccttatgatgtgctatagaatctttaaaatattgtatgatggcagggtaagaaaacattttgtgtgctttaccaaatctgatgattgattaagaagcaaaaacatatggtgtacaccctaatgattaaatctttggctggatgatagaaattcttcttaagttgaacattagctgcaaaggagacattagtgaaatatggctagacagtagctgcagaaaggccacccattttttggagcttcttcacccattaaaagtgcaagaaggagaggacgctttaacttggaaagattataaaaggggaaatttcagtgttaagtcatattacatttccctaaggtcagagaataatttagtttttccaggcaaagaaatctagggatcctgtgctcctcttagaacttgttttttatttttttacttgggaaattgtatgggggaggatcttaactgtagatactttaatgaagagggggtgaaaaatggtcaataaatgtagcttttgtaaagatactgaagaatttgccaatcatattctgattcattgtgacaagacaagaaatctatgaacctttttgttagcagtctttggattggtttgggtgcttccagccttagtgagaaatcttctcctacaatggaaaattaagaaagttaaggggttacataagaagaaaacagcagtttggtgcttggctcaaatttgcttattttggtgtatttggaaagagcacaattgaagggttttcgaagatgaagaactttcacatcaaagagtaaaggatttcttcatttggttgcttttagagtggtcccaagattctttggaattagagaaccctctatgttgaatttcctagatgctctttattgtggttagctttgccatgttcttttgggctatctttgtttgttgcttgctttgggttgctcctgtgtatactgcctctatatgtagggcacaaccactctttttaggtgcttcataatacatgatcttgttgtctattaaaaaaaagtagctgtagaaagaccttctgccaggaaaattctttaagatacataagaaatataatgtccatagctattagagattaatgctttaacggtggcttagctgttagattgcatgtgttctgaaactgataggatcagtggctgacatagattttgatgacattctttcatggttaaagctatgctggtataaacatgaaaaagctgctgatatcctctaattccttttttttttttttcgatagataaaaaggaagatatattaaaaagggctgccaaaaagcaccccaaggtatacaaaaagtatacagctaccaccagcctccaccataaaaacaccaagatacaaaaaaagaaatacaaccagcccgccctcaccaataacccaaccaatttagaaatctaaaaagagttagaggaacatcatctaagtaccccttcgcttccgaccaaagataagaaacaaacgaactttttggcctttggatagataactcttacccctcaaaggcaattctatttctcaccttccacactatccaaaataagcataaaggtccggttttccacaccttcctatgcctcttgtcctcaaacagcccatgtcaccctagaagagtttctctaactaacatagataacacccaagacaccctaaaaagagcaaacaacagctcccacaagattcttgtctttacacaatggacaaggagatggtctatggattcttcttcagtatgacagaaaaacatctattcgccaaagaccaccccttttctggatttgattcaaagttaaggtttttccccaagtcgtctcccaaacgaagaagctaactctgggatacacccacgttctccaaatattgcttcaaggaaaagaaatcgaagcctccggttccaaagccatatagagcgacttcacaataaacttcccattcttagtcaattgggaggtggtgtgtgtggataaagaaaagggagggctgggattaaggaagcttgcttgtttgaacaaagccttgctagacaaatggatttggaggtttgctcgtgctaaggaggatctttggaagaaggtgcttgaggcaaagtatgggcaagaggaatttggatggaggacaaggaaggcaaatggggtgtttggagtaggggtttggaaggagattttgaaggaatctgattggtgttgggaaaatatggtgttcaaggtgagaaaaggcaataaaatcagactttggacagatccttggtgcggaaattatgtgttgttccaaagcttcccgaatctctttgccatggctgcccaaaggaatgtcatggtggaggaattgtgggaccagaattttggccaaggtgggtggaatttaaggtttttaagggactttaatgactgggagttggatatggtgggcaacttgttggatgtgttgagggagcatagggttacgttggaggaagattcggtgatttggaaggaaggaagagacgggctgtttagagtcaagagagcgtacagcgtgttggcaagtcccattgtcgtcgagttcccgaatagcaatatatgggtggatagagttccaaccaaaattgctttttttgcatgggaagccgcttgggggaaggttctcactctggataggcttcagagaagagggtggcagttctctaattgttgtttcttgtgtggttgtgaagaggaaacgataaatcatattttaattcattgcacaattgtcagagtattgtgggatgtcattcttgggttgtttggtgttcagtggacctttccagaatctgtaaaggaggttttatttagctggaatggctcttttgtgggaaaaaaaaggaaaaaactatggaagtccatcccgctatacattttttggacgatttggtaggagatgaataaattagcttttagggaggggagggggggggggtgttagcagtttagaagttaaaaacttcttttgtgtgtaatgtttggggttgggttaaattgtacattggtgtggagccgatctcccttataggcttcttggagtggttagcctccacttaggggttggggtgttttgttcttttttggttgggaggccttagtcgcctcgtatactccctgtatgctttgcagctttttgcctcctgttaatatattctttgcttacttatcaaaaaataaacttcccattcttagtctttgtccaacacaccctatcttgtccttgttcaccgtcatcccatctaagcaagaaagagacctccctgcacttcccacttcccaatcattgaggggtctagaaaaaagggggctccaacccccttccctagggatagaaaaatcccaaacatcctccacccatgtatccttagaacatgctaaggaaaataaagacggaaaagagtctcacaacggattaatcccacaccacttgtccttccagaatttgaccccttgtccattacgtacatcgaaggaggtttactactcacaagcccccgctccttccttatagctttccaaactcctacaccaaacccctccttaacctccctagaacaccaccccctttttcttcaccatacttccaactgataacacgcttccaaagggcctctttttcagtagcattgctccaactccacttgatcaaaagatctttattgagaatggaaagacttttcactcccaagtcttgtgaaggcaaattgtatcccatcacactagatgtgtttttcgcttaagagtccttccacctcaaagaaagttcctctgaatctactccaatctaaacctaaccggccttggaattcacaacaaggacataaagtgaatggaaaaactagatagggtgcttcgaacaagagtaatcctccctccgttggatatgtattgcctcttccacaaggctaattttcttcgaaacctctcttccacaccatcccaaaccgctacagacttataggaggcaccaagtgggagtccaagataagattatggaagtctgcccaccttacaacccatctcaagagccaactcctcaatatcattcacctctcccattggaattaactcactcttctccaaatttttttttttagtccggaaatagcctcaaaccatatcagcaaccagcttagatgtgtcatctgctcctcagaggcttcacaaaaaactaaggtgtcatctacaaacaataaatgggaaatattcaccccttctccacccttacccctcacttggcagccctttaagaagcccccattgactgctctttttatcaaacagctgagagcctccatagccacaacaaataagtagggtgataggggatccccttgtcttaagcctctagagctttgaaacaaaccatctggagtgtcgttgaccaaaacagagaagcttgctgtagagatgcaccatttcattcatccaatccacctttcaccaaaacccagcttatgcaaaaccaaaagtagaaaagttcagtccacatgatcataaactttctctatatcaagcttacacaaaatgccacaacagttcttttttaaaatggagtcgatgacctcattagcaataagagaagcatccagaatttgtctaccctccacaaaaacattttgagcctttgagttcacttttccaaccaccttttttagcccattggctaacaccttagccaaccatttatacaaactgtccaccagactaattggtctaaaatcccttaaatcctctaccccctctttcttgggattaacactagaaaggttgcatttaagctcttcacaaatcttccattctcgtgaaactccctaaagaaactcatgacttctttcacaagctcccatgaaagctgccaaaaagccattggaaaaccatccggtcctggatctttctcacagctaaggtacattagagccccaaacacctcctcctctgaaaagggctcctccaaccttgttgccttttgctctcctaacctctcaaactgcatcccatctaaactgggcctccaattccccgagtcagagagcaacagtttgaaggcatggaccaccccattcttgatatcagcatcctctatgatccaagacccatttatcttgattctggccaacgaattccttttcctatgggcattagccatgctatgaaagaacgtggtatttctatccccttccttcggtcacactttccttgatttttgtctctaggaaatttcttctagcaggatccattttttaaacttctccctagcttcatttatggcattcagctcctccaaagacagagtacaagacctatccttagaatccctgtgggccaactatgccaaagccaaatcctttctgaattgaacttttccaaacacctctctattccagattttcagatccaattttaagactttcaacttttctgccaagatgaaacttgctgatctgctcaacctatacccctcccaccagcatttcaataaatccttgaacatctttcaactacatgagctcaaatctaaaaggagatggacccctcattaccccacctccatctagcagaatgagagcatgatcaaacactggtctgggaagagcacattgcacagccctactgaagtgactcccaatcctcagacacaatgaaacgacgtagcctcgacttagcttgattattcattcctccactccaagtaaaagcccccccaagcaattaccttggagaaccttctcatggctactaacagtctaccccctctactgagctcagttgggaaacggatcatattaaagtcgctagccacacaccatggatcactccaaagacctttaattgctcccaaatcttcccattagtcttccctttcccccctccttgtaggaccgtacactcttgtaaaagtccaacaaaaatcattctcacagcttttgaacctacacaatatggagaacttgcccacttccattcctaccaattggagcacctattatcccaaaaaaccataactcctcctgccgtgcccctcaaattagctgcaccccattctagacatctacccatactgaggctgcgcactatcccaacctttatctccttgatctttgtttcctgaagacacactaaatctgccctttgggacttaatcaaggctttaataatctttgtttcctgatatcccctaattcttggttagtacaaccttcaaccttcttcatgctttaaaacctatggcaccagtttgtctatacactatgggataagtaagaagaatcaagatcagcactttgaagcatacatgaagtcatgttgtctcatgtccaatgagttgaaatttaatttcactccataaaaatcttgacattttagtcttagcttgcaaaccatctatatgggttctccatacatacccatatccacaaattcacagatctctccaaccaatgtttctgtctgaacactcaatccactgctgcgtttcactttgctgtttgcacatgcatgctgattgtgctttgtatgacaaagagagaagtattttactagagactggcacattggaggtatatcttctgatgctattgatgggcaaaaatttaaactagtagagatttaaaagagggctgtttggacatggatgtatgttgagtcagctccaggactgcaggtggaagctgaccaatgaaaaaaaaaagattggatttattctcaaatgctgtctagaagaaaactacagcaaaccaagccatgaaaagatctaaaatgatggtaaacaataaaattccaatgcatgaaggtccaagttcattcttggcaaactatgtgtctcttagctgaaatcaaagaaatagtagaatcctcttgttgagccctttcatatttacatgctgcttaaaggagtgaccgatctatcaatgtgcataaggctatacatgaattctagaaaacatccaatataattgggacctctgctcttaatcaacttcctgttgcctgttgaaagtatggattacttctcccagttgaacttcaatgtcctctttcaattaggtcattgagaaaacattaatacaatgatttgatatagaaaaaaaaaacccatcctcaaagcttttgtcatctctgaaggagatgtattttgcttgttatttttatttatttattttgctgctttgtacccagctctgtatacagtgcacatacaggttgcaccagctttttgacaccatttaatgcaatttacttgttaaaaaaggacagcttcttccaaagcttgtctctagttgaaactgaattcagtgaactgaagttcttttttgtctcaggggaaa

SEQ ID NO: 11167 - DNA, 22581 bp, Vitis vinifera
  Intron number 1 from transcript GSVIVT01027698001 (locus G SVIVG01027698001) derived from phytozome v7.0 (chr-ID chr1 5; pos 14171791 to 14194371 reverse strand)
ccaaactccaatttcttgaatgttaatttgaaacatagaaaaacatcctgagagaaagaagcttagcaaaaggtactttggaagaatatggtgcataacttcgatactttaaacttaagagtgtgctctgttttgaactatgtggatcgcttttggcagttgtttgggtggttgaataacttttgaggtttgaggttctgagctttcccgacagtgttctacctataagttacatcttaatcattaggaaagcagagcaaacttaataacaacagagataaatcccaagtaataaccagtccatcatccataacaataagaatcatgaatctgggttttctttgtgttcactagtgtattggaattcatttcaatccaatctactttcataaggtccaaacatattgcttacctgtagtataaacatatcatcattggattgtgcttatatgatgtccaaatgttctgtacatgtaagggttcttcttttctcagagcaatgcgacataaattttaacaaaatctgatcaagtaattagctcctttgcatgtgaaagtgcttgttgggcgtcatatgcctagctataagatgtaggacaagaagccttgaacactttagaatactctgttggcttggaggtctcaggagtactgtaggcgccagagcagcagtactcaggcttgttgaatggcatgcatgcactgttacaagctacaacagtaccattccttagaacttgcaggtccttggggcatctctgattcaagtctgaaacacatgtgaccgccttgcactcaccagacccgctggaagggaatatcgactctagcatgttgtatctatcaactaggctaacatcataaaaatctacagggctatcaagggtaaactctgcaagtgttgctggtggtacacaacttccctatcctgagttgtcaaatgaacagctacagcggccccaaaaacggcctgaccacccttgtgtggcattgatatctactgattgacctggtcttaattcaagcctgccatccattagttgaggttttccagatccaggtgtgatcccctgccatagagttttcctgcatctattttgtaatgtgaaaatcactcaataaacacctgagaagaatcaagaacataatgcaacattactacttatatttagatgtgtagatcaaccaagtgtcacaggaaatgggaagttaattagtgtatttgctagtaccaaagacatagaaaacctagagaaggtgaatatatgatgatgccattggaaagtactgaatgtaggttgtggaaatttggtgtctcaaataaaaaaaggactagagatttgtatagagaggatcagcaagacaccacccttaaagtggggtgagctagttttctaaattaaggcgtgggggtgaatctctgttatgatatgtgttctgtttttcaaagtggctagccatgtcttgttatttagaacagcaaaagaagcctagaattttccctttagaaatagatgtttatagaagtgatctgttgccatctggcatgcctttggttgttggatatttgagggttgtcttggcttgaatccaatatttttaaccatgcacttggcagaaaatcagatgacctttttaaatttagaattgtaaccttctctaatgccggttgtttcaaagaatatgcagaagtcaaggtacttggggtacaatgtttttagaatgtttaggctttaacgataagcccatcttgatgaaatctttctggtttgtacaaagattgaatccccaactccattgaggacaaaaccttatgtggcatgcttttgtctttagaccaatagggaaataaatgttaacaaaaaatttaggtgtaatggagtcaccaattttattggaagagcttatttcaaattggtttgggttctactcttttgtaagcattgcttgttctacttaactgtaatcttagcctcaggtttagagctttacttagtgcatcatataaatcctgacaacatccttttttaaacaaaaggttgtttctaactctaggcaatgaacattaaaggtttccaaagttggtttaaattattgtcttttccctggaaccttgtgggaaatggtgaatcaatagacttctggaatgactatcggtctccaactaggtgatatggtcatggcagaggctctggactcctttagtcagccttggctgatcagccaaaaacatacgataagaaactatgtcttgttatattataattcattcttagacatggaataactgttaagatatagctggagagcattgaaggacctgggacatagataataatagcatccattatagaatcaaatgcctcaacttatatccctcaaaagggttaaagttaacttcgggatgacagatgaatgagtgaaccatgctcaaggacatgcctggctagattgcatatcaacttagccccatgtccatctgcaccagccttccagccttccaatcaaagcattgaacagcatcaagataccaacaacatccctgggcagcctctgcttacaccgccaaacaagacaaaattgatgtttttttccttagtttgttcaaaatcctcttgttctttcgagcaaaccaagaatccttctattggaactcattaagatcatcccatttctcatggtctttcatgccagatgtcacaggtcatggaaggtacagtctgagtgtttctttcacaactgcttacgagtaggggaggtttgggatatctgattctggtggcaagtttgttaagattaccattcatttaggaagtcaaatcaattttattacatgctgatatgtaatttatgtattttaggaaggttcatatattcttttctgttttaaatttattttttgacattttttactgatcttcaggacagattttagggaatcagttcccattttccatctaccttaactgtacatatctttgtagagactcatctttcaaatcaatatacaaaattcattttcaccatagatttgtcaacaagtctagttcctccaactactaagtttacttcttctctgaccatgaatgcatcaggatagttaatgaacttggctattgcccattgcatgcttcctgctgaggtatcagtgcctgcattacatagatcctggcacaatgatagtatatatgagagatgacgcagatcaagcaagtgtaactcagtagtgtctaacttggaaaatatggggaacaatgagggtctattttcgttcctctttgctcaagagatacttcccagagctgaatatgctctgtttaaaaatgccagactccaatttcttgaatgttgttttgagtaaaatcatacgaaaccgtactgagagaaagaagcttagaaaaaagggtcctttggaagaatatggtgcaaacttcaatacttcaacttgaaagcttgctctattttaagttgtgtagatcactttcagtggttaaataacttttgaagtttgaagtttgagattctgagctttccaacaatattttgacaataagttacatcttaatccttaggaaagcagagcaaaattagtaacaaaagataagaagtctgcatgtatgaacggtggtgtcccaaacttcgtaggtgctaggttccattgtgatgatggtacaaatcccttgtacttcgcaagtgttgaaacatttcaaaattttaaaataaaatataataataatctaacgctaaattgataaaaaataaattaatataaacatgtgttatagatttgttatttaattaaaattttaaaataataataataataattcgacattaaattaatgaaaaataaattaagataatagttgtaacttgaaaaaataaaattaatattaaatgaatattagtaaaaaaattaaatagttgaatatgctttacctcctcaacctttccacgtgttttacgctttgttccttcctatttaaaacctaacattttgcaccccaaattgttaaagacgacattttgtccaattcaaagccttcataaaattataaaaatgattactttttttcatgctttggtttgaacactaatctgaaattgagtatgttttcaaaatataataactatcaattttgatttttgattttaaaaagttgtttggacgactatttgtgattttttacatatgttatgatatatgacaattttgaacttggatagaaggtgtttttctttatatttcaattttgctttttcacttaatgaattattgattgactttttaataaatttgggggtgaaatgttgctttttaataaatttggatggtagtgtattgagttttaaatgaaaaataaattaaaacaatagttgcaacttggaaaaaataaaaattatttgactattaaattgattttaaggaagattttatttattatttattttaatttttagagcaatatttaaaaatatgacaatttaataaatatttataagtttacatactttgaaagaatctaattaaaagttatcttgagaactttttatcataaatttggaagtgatttcaaaattgagatattttaataaatattttacaaggaaacggtgtttctatcaaaaatccccgttaatccacagtggtgggacgtcaacaatggtggctggcgacaagaaaaatatgaaccctacgaaatcccatcctcgatccaacggtggaaacaattgaaggcgttaccatgtggcaagtgggaagcttaccccacaatataagaagtttgctgcatcttccgaagcaactaatgctctattaatttagtctagaagtatatatttcaaggccaaataactattataattaataagacaagacattccatcatcaaccttaactgatataatatttaaaagtaaaagaatgaaatatataattaaatctaatgctacatctggttcctgaaaagtgacaaatgaaagaagtttagaaaaaattatttttttatgtttagttttaccataaaaaatacctaatataattataattaattaaaattttatgtattttaaaattatttaatatttacaaaaaaaatagttaaaataaataaaataactttaaatataaaaaaattattaactttagattatttttttttacttttttttaatgttttttcctcataatttttctaaaatttgtcaggaatcaagaaaaatttaaaccaaaaatcatttaaccaaaaattaaaccaagtgcaccaaaagtaaatctaaaagtgggatagctggctagggataataatttaaacaagtaggcttatcaattgttgaatctatagaatctgtaatctccctaggcattatgaattatagtcaataatttgaatttcttatactgttgggaaagttgatttttctatatgacatcaaccaaaagggattacaagacatgtactagctttttaaaagacaaaaatcttaagaaacataacctattaagaaaatttaaaaataagtaatttaaaaaaatattatgaacaatatgagaaatatttttaaaaacttttgtaatacatgtaaataaataaaagataagatgagaaaattattttcatattctgagctgttaaataattttattcctaaaaataattgaaaagcatttttaaaatctgctataaaaaaaactattagaggtgtttttcaaaatattattagacaagcctagtattgtccttagtatttttcacttatataaaaaattaatttttagtggttggaaattattataagtttaaaatgtgtgtatattttctttttacttaatttaaaagaatttatcccacatcaatgtggacaaaatatttttccatttaatattttatctcacggtgtgatgtgtttttacttttcttaagcattacaaaattgtagtgggcctaaatctcatttcccactataccttaaagaatcaagtgggccagtgttagtaacttcatccaccatggttatattattgatatcttgatgggaaaagctattaatgttagtaacttcatccaccatggttatattattgatatcttgatgggagaagctatttttaatgttgttttgatagtaaaatattgtattttattattttgtaaattttatcatcactcatatatttattttttatttgaaattaaataaaaaattaaaattcttagaaaatacaaaaagaaagtatatcacaacttatattaattaagcgtctttattttctattctaaaatgaaaaaacaaaattaaagttattaagaaaaaagtgcattccaacttacattaattaagggatgatatactatgcaaataaaaaataggaaaaataattaaaggttaaataaatcacttaataaggaggatgggttgatggtttcattattagactataataaggattttcattttctttttctttttaaatgcatttcatggtggggtagattttttttgtataagggtttttaaattgtaatatatatatgttttatcctaaattccgattcccaagttccccaacattatataaaaatccctaaaattacctacttcctaagtttcctaacattatataaaaagccctaaattcacctattaggaaaatgctatttggtgcactaccatcaccataacctcaacctcgtgcaaaggtgagtggttactaatagtaaaaaataaataataaaaacaaaatgtattcattattattattattattattattttatacttttaccatcccttattcatatcttagcatatggtagaaaagatgataaaatattatagtataattttaagtgaaatgatcaaaatatttaaataaaaaatcaataattgatgaagaatttttggtaaatttataaatttgtaatacatactgataaatgataaacaaagtagtttttaaagcggttatagtagttaaacattatatcttattatgattttccaccttcaaaacttaataataaaatttgataacaaatttctataaatttaaaacttttgaaatgtgaaattggacatctttatatatacatttgtgaattttatctttatttttcatttataaacttaaaggataaaattaaaacattaaaaataaaagagaagtatatcccaacttacatcaattaagagaagatatattaagcaaataaagagtaaaaaaataatgataaaataaatcacttattagttagtatttaatgatttacattatttgattgtagcaatgagttatattttatttttgtgtataggggttcttaaattgtaatatatttttttatttttgagttagttttcttttttgatatatagtttttttttttttttttgtctttgatattgtgctatctgcagttttaaaagaaatgaaaattatttccaaaactaaaaatattatatatatttattaaaactttgatacccttaaaaaatgcaagtacaaccagctagatgcattcaacacaaaagggaatgcacttgccccagacgatggcgacttagtaaggcgacttcgtaaattctgcgcggcatagggctccttccgtaaattcaacaccacgctggctccagtcggacgcctataaattcaacaccaactccttcttcccctgcatccctccatcctcttcccctgcatccctctcatcctgctccaggcgacttcgcttataaattcccttcttcccctgcatccctccatccaggcttcaaaccaacaacgccaagagcttcttcctccccatccctccatccaccaactccttcttcccctgcatccctctcatcctgctccaggcgacttcgcttataaattcccttcttcccctgcctccatccaggcttcaaaccaacaacgccaagagcttcttcctccccatccctccatccaccaactccaaattggcttcttctgaattcccctcccctctattcaggcttcaaaacattcccctcttcccaaccgcacactgcattcccctccctcccctccctcccctcccctcccctcccctcaggcttcaaagtaagagaacagcatctacaatatctgccatggccacacagccacggtatgcctgtcatgctattttatggttgcccaatcatgccatacacatgattcctgggcttttgcctcatgccctttttccattttgttactctattcatctccattctgttttcgctattctcttaccttactcaacccatttgtttaattcaataatcatttccttcaactttcatgtttcactaattttcatcacaagtattcattaattaaatttaacctatatttttgccttcatttaatatatacttatttgaaaatatgccttaacccattaaaaattctctcatatatgggtttcaataaaaataataccacctttgacatttcattcttttcccctcaatgctcttctacttgtgagcacttgatatttcaaactctagttttaggttaaattttcatctcaattatttgcctttcaaatatatatgttggatattacatgttttatccactcaaacacaaagggttcttcttcatatttcagatgtacttttaatattttaaaattataattgatttagatgatattgtataatattctctagaattagataaaaggattgatttgattatgtttatctaatttttttaattagtactactaatatcttactttcacaattatttattgttttcatgatagagcttcattagcgttcatctctttccttacaatcttgggttcaactgtccttacgaaataccaatatgataatatttccccatttgcacaacacaatatagctatgcggatctccttgtttgcaacatttatatattttatggtggttgtggtttaaaagatgatttttacttttttttttcttaatcaataaaaattataataaatttaaaattatatttttagaacggtagattaggaattagtttttttaaagtacctaacttatataaaaaaatccttctcctttctctctccatccaatgaaggtactaatgctcacgtgtctatttcaagaccaaaagagatgccatagccaaatgactatgataagataaggcgttgcatcatcaaccttaattaatataatattcaaaggtaaaagaacgaaagaggattttgaataagtcaaataataataataatgatacgagagattagttaatacttaagttaatcttaccaagaagattagaggtataaattattataaacaactaatttttctcattcttccgtttacataaagtggaatccaggaacgaggtgtatctccgaaatatatgcaagggaagaaaagaaaaaaaataagaaaaacgtcttcctttataaattgcacaattcataaatctcaattctcattttagggtttaattgtagaaaaaatagaattaaaatatttgcaactctcttttcaaatttccaatcactattcttatctttcctaattcattttctataataactcttatataaaatacaacttgtttaaaaatataattacctttaaaaattattttaagtcattaaaatatctgcacaatctcaaattttaaaaattttagaaccaatttgtaaggatataagataagaatttagtttttatataagagtgactatatttgatataaaaattactattattttttattttttaaaatagaaaacataattttagtttctttttataaaattaaaattattaaaaataaaagttaagtatatcccaacttacatcaagatatattaaacaaataaaaaataattaatgatgaaataaataacttattagttagtatttaacgatttactttattagattgtagcaaagatttttattttttattttttattttttattttttattttttattttttgtctatagggtttttaagttgtaatatgatatatattttttttttttgagttaattttcttttttgatatatagttatttattttttgcttctcatattgtgttatgtgtagttttaaaagaaataaaaattacttatcccacatcggttcaaaacaaaaaatattatatatatttattaaaacttttatttccttaaaaaatgcaaacacaatcaatatgcaagcattgagccttgcacgggaaaatttaaggaagtgaactttgttcaagcatatttattccttctgatcctgattccctcctctatgcgccgattccctctatgcactactacagacatgcgctgattccctctatgcactactacagaaatgctcaaaactaaactataaataaatatgacagtgcactaaaaaacaaccaaaactataaataaatatgatcatggtctcaaaaacggtgcactacagtgacatgctcaaaactataaatatgatcatctacaactgcgtctgaagcatctacttcaaaactataaatatgatcatctacaactgcgtctgaagcatctactttcagacttccccctctctcttcatggccagacaaccacggtatgccatcttctctcctgctattttatggttgcccaatcatgccacacacatgattgctactttcttccacacacatgatcactgctctcttagtctcttcctcatcattttgttgcatcaaaagcctcaacggcttttccctcatgctctttttccattttgttcctcgacccatctcaattttgtttttaatgctctctaacttacctgacccatttgttgaattcaatcactctttttaaatcatttctttcaacttttatgtttcacatggtacctccgtttgtgccttcatttgacatatacccatttaaaagtatatcttaatcaattaaaattgtctttcatgtatggtatggtttcaatgaaaataataccactgacattgcactcttttccctcaatgcttttctatttatcagtactcaaattttcaaactttagttttaaattaaatctcaaaataaaattgagttattatttcaatcatttgcttctcaaatataatgttaggtcttttgtccattaaaacacaaaggactactctttatatttctaatgtgcttttaatattctaaaactataattgatttacataaaattgtatagtattttttaaaattagataaaaagattaatttaatcttatttacttaattttttgaattgatgttactagtgccttattttcgtaaatttaattgaatttcttattttcttatttattgttttcatgatagagctttatcgattttcatctttttcctcatgaatctaggttcaaatgtccttataaagtatgaacatgagaatgttcctccgtttgcccatacgaatctttttatttgcaatatttatatattttatagtagttgtttatgaaatcctcaaatacgatgaaaccctcaaaattgaagacaaaagacatttccttatgttgggtcatattaggtacctgagtggaattgtagctgcaactttgttattattgatcctgatcctatattttgaatggctactccttgtcatatggatcaagaatcaatacaacacgagagatagggaagaagagtaaaaggggcagttaggtttagagtttgttgagttgttctgggccttttggcccattggagtaataaatattttgttcttgtagtttttaaagtggtgtcatcctatactctcgttaaaagtgttgctttaatattagtaaattattttaacaaaaggtggtatctttgttttttctctatacattggtaattactcttccccttgtccatatttaaagatcaaatgcccatgagtttatgacaggtttcattgcaaccatggttttatatagaattatgaaattaattaataaaatatattttctgcatactgtttagataggcctcccaactacctctccataatatcatctaaatgtaggaagtaaaaactaatgacagctgctaatctttctcattcaaacacaaaatagaacaaaggaaaaggcatatttagaagttgtattttatgtgttcccaaacaatagaaagtcccatatatggcatttcactttctatttttcttcctcacattttctcataatccagatttctatctatcaaaaacttttgaactgtggaaccttatagatgataaatggatttagggaaaatttagggaaggaccctaattcatttaactatgacacaacactggattcaggtaattatttccaccatcacatacttcacaaatataggtattaattaattaaatttagcattgtatttgtgccttcattataatgaaggctttgtgtattttcttggtttattatgaatttcattaataacttgttaattaaacactcatttcattaaatgtgattatgaatcaaagtaatttcattttcttggcatcacagagcaagatcaagtttccgcattggatttgaagcttatgtattcttccttacaatgttgggtgtcctcgtccaaatgaaatttcaaggcaacagtgtttccccaattgaagatgccataatatcttcttttgttgttgttatttccatctatgttggaacaattattgttggcaagaagtttaagtttattgagcccattcaactcctctctggcgcacttgccccaatcttattgttgttgattttagttccaatatatggattgttgctgctttttttatgggtcttccttgcagtaaagatggcatgggactgcttacaccaactttgtctccatttactttaccagataagtcgtctggcaccctacttatctgttgtgttcatgactcgtaatcccatatttgtagagggattacaaaggcttccagtttagactccatttctcccaggtatgatgctcaaaacacttcaaccacttcagttttaaattttttttcatatttgtttggcacttttagtcttgcaatgcggattttcaagttgtatgaataagatagaattgaactcatatttattgatattcaagaatgtgtaattcacataaatgttttagttagaatatatacatcaccctatatgatgtatacaacaaaaatttagtcctgaacaagtgtatgttgggtttagattgataatactattaccagtatgaatatgaattatttattcatgttaaccatgtactcacttccattatctatccaatcttctatgtacatgtaagctacttgaataaaccattttatcactttgatatgttcaggactcaaaacaacaccagcaatagaggcacagaggacaagaggagcagttacccctataggccattaccaaaggaagattatgtaatttgtcttttgtactatcttatagaaataatgtgcttctatatttaaagggttaccctaaatgttctctatacataagatcaaattccgatatgtttcgttgcaaatatggttttatataataaatttatgattgaactaataaaacatattttttacgttttgtttagcaaggcctcccaactacctctctgtaatatcctttgaacataggacgtataaactaatagcagttgctaatcttttccattcttacacaaaacagaacacaggaaaaggtatatttaaaagtagcattttctgttcccaaacaatagaaattagaaaatcccatatatggtatttcacaatccacttttcttccccgcattttctcataaaccaaatatgtaaacctctcatcccaagatccaaccaaaattgaaaaaagcttgcaacaatcctagtaaaagagacactttcttacaacaaaatgaagtgcttaaggtttatcaattaactgaaacaaataaaaaccaacctccagaaaagacctgcttaatggaatacttgcagagacgcttaagttcctccagactccaagagacactcatcaacagcgttgaggaaatcttgtgtaatacacattttaatttctactggtttagcgtatttaaatccattaaaagaaaaccgaagatcagtaaataagacagatttgcacatcaacattaacccctataagctcacaacattccattggaacaacaacacaacaaatgtgtctccaaattaacaactaagctgcagaaattttggagccactaaaaagcacatcatcagcctaaaaactcctgacaaaccattgcaatattccaaataaatttattttcgctttcttccctaaactttgaagacagccaaacaaagatccccaatttcttcagcaatcaaaacaaaaaaactcaacatactgttacccaatttcgaaaacgctacaaaaaatgaaattgactgaccagagattatgggagatcgccgccggcgagatctggagagaaagatcgagatgggcactttgaaagggtgttgaccacactcttgagtctctttcagttcggcttctctcgggtccccgtccctcagcttcaaaataaggtcaaccaggctgcctttattattgtattattattttctttgccatattttctcaatccgaatcttttaaagtagtaatatttattatagtaggtaataactttattttacatatgtctcattacaaaatctgtcaaattatttctgccttgcaatcctttttcaaaatgctgaaaatatctcacagacgcgtaaacttgtaggacacgtttcttatccatttctatcaccatttttcaaactttcaaagcctccaagaagttctcaaattgtaggtgagtgtacagttgtcaaaagtgtggggagtgtagatagttcctttgctattaagtattaatgtctccatttattgttacatgctaaaaaactcacttacttttttatttaatttaaaaaataataattttcaaatatctcaaaatatcaaattttgttataataattaattatgtaattagtagaaaattaaatatttagataataatttggatagcaactcttatataaaatataataatttttttttgacttatttgtatttcattattgagattaattcattaatttttatttaatttatgaaagagtttcaaatcctattttttttatttttcaaaattaattgatatagttaattacaatggaatttttttctagtgtgaattatgttttgaagttctaattaaaaaatttcattggaattggttgataatttgttttggttttattatagaataagaagctgaattttaaaaatttataataaattcacttctaatctaaattttatcattttaaggagtaacctaaagaaatttatagaatttaaatttcatgaaaattttatgcattgtacaatgaaaatagtgagtgaatggtaaaattttgattttggtcataaaagtaaaatctatttcagtcgtattagttttttgggatgacaattttactaatttatagtaaacttatttttcattttagttgtacaaaacttaggtaattttaactaatttttaattatataaaaaataagtttgtcaacgagtggaaatgcatgagctaaaatgagggatccacatatacaaatatttacataaattcttttgtatgttctaaaattgtgatacaaaaaaatcctatgtttttttttgttcaaaatccattttttttagattcatgaaatcaaataaatgagaaatgaatcaataattgatacaggacttattaccaacattgattaaaccttacatgtgagacttttttggctaaataaaaaaaatcacaatatttgattttttctattcaattaaaaatgactaattgacatcaatcaatataattaaactaaatttattgataacaagttcagtttaattatattgattaatattaatatggtacttttaattgaataaaaaaaattaaatattttgatttttttgctcagtcaaaaaacaaataccacctacctctgctaagagggcatgtggtttgaatcatttgatatttgagcgaagtttatcataacatttcaattacccatttctacaaatattttatttaaaaagtgttaaaaacatcaaaagttcttgtttcaccactaaaagtatatttaacgtgtctatagaccatttcttttatttatttattggatgggttggttcataccattttatatcttacactaaattcaacattcaacatatctcttatccttaaacttaaataatttttttgtcactctctagatcattttatttattaaatgtattgtatagttttgtctttaataaaacttacattttttatttataaattgaataaattcactttattattaataattaataaccgtataaaaaaacatgagatatgattccaagtgcaacttaatcaagttgatgcaagccatactaaccttcactcaactccacaattaattgttctaatcatattttaacatttttttttttagatttttatatataattttttttatataagctaaatttgtgtttgatagaaatcctcacatgcaaatgtaacacatttggatggtctttgatgcatttggataaaataattttgaagattcattaacttcctccacaatacttatctctcctatttttttttttaatttaaaatattaatcttatatttagttttcaaaaattttaaaggaaaatgtaaagaaaataaattaaggaggaaaagtagaaagaaaaaaaaaagaaggaaaataaaaaatagatttaagatcaatatattatttttatttattatttcaaattcatttcacttatttaagtacattataaagattaaacaatatgaaaatgtacaagtttttaattagttttaattataattgattttctttgatatttttataagataattaaatatgaaaaaaatcattttttttagtatatttttttcttttctttgtatttttctagaattaaatataacctaagactattgccaaaaagtattaagaaaagaaaaaaaaaacattgaggaaaataattttttatatcgaacaattaaagtcagtgaaatgaatttgaaataacgtataaaaaataatttattaactttatatttattttttattttttttaaattttcttttctttttctcgtattttttcttaattttttttaatcaattaaacataatttaagagtgcatttgatttgaaagaataggaatgaaaatacaattaggacgtagataagtcataatatcatgtagtgaatacaaatttgtttttgttttaagttttaaattcaatatccggaaaatagcagcaatgttaaccagttgctttttaggcagttattaatgacttgccatctgttttgttgagctgtagctggccgtctctagttaagcttgggtgcagtcctgcttcactctttttgaggtcccatatcttgtgataaggaatagaacttagagctatgagctatcgagatgaggaccccattgtacctgcaacttttttccaaaattgtttttattgatcaatctgaatttgttgctttaagaagtcgagattttgtaccttccgcgatttaaaatcaggaagcagagactcgtatggtgctagatattgtctggtttaataaagtttattaacattatcatcattttccattttaaaattaaacctagtaaaaaatcctattggcgttacatagaagttactaggaaagaaaatatttaaataattggagataatctttatgtttttcgtacttttattatatttttaaagtttttaaaattttttattgcttttaattttaagatttttatttttactttaaatgacaataaaataacttattaagtcacaattaatggaatatttgaaaaaaaacacttatcaaattaaataaaaaaattgaaaggactactcatgcccttctcacatttttttatactctcaaattttatatgtttgtcttattttaattttttttttcaaaaaatactttcaatatttcaaaaaaattaataatataattttcagttaataattgattgattatcattctaatttttaataataaatacttattttaatttatctataaatgattttttttcacaagatcttagtgttataaatttatatcataaaataaaataaatagcaacttttctttcacaaaatttttatttttaaaaaaatttaaatattttacaacttttataaaataatttcttaaatgatataattggctgttgtaaaaataacttaaatgtgacgtgcgtgtgattatttcttttttaaaatacatggtaactggttggtaactcgtagaattggttctttcaatttttcagtcagtgaactttatacgtgtacttttcttattggttaaaatatggaccaataaacgcacactttctaagagagcaagaaccagaggcaagtctctctctactcgctgcctgctactcgctacaaggggaccgataaacccacacttcctaagaaggtaagaaccagaggcgagtactcaccaacagagatggaacccactatggagccgcagaatcccaggtaaggttttacaacataatgtgttcaatttctagtccatgcgtgcatatgtgcctttgatgacgcttcttttcaaagctggatttgaaaattttttatttggggaagaacataatactgttcaagtttctactctatatatgtatataactacgtctcttataaaaagctaattttcagattagagtctagtttttctggtgttgaagaagaagaagaagagaagcattttctttcacattttcttctcttaaggtaattgatgttagcttccgtgggtgtttatatatatcttgattaaaatcagctgttaatttttcttgagtggatagaataatttgttcgatgatcttgtgtgtcattctgtttctcgttattgagaacaagaagaaaaatgtcggcccatattcggggatatatccccgacataaaaagatttcgggatttttcggcttgtggctcgtatttttggaatttatcgggattttcatgtttttcggattttttttcctgaatttttcggcctgtgtggttctctcaggtgcaagagcgtaatgtcgtcaaatattatatatatattcattaaatttttttttttataaattcattaattttaattattttatttttcaaattttattaaacaaaccattacaatgtaatatatataaattattgaaatatcatttaataaaattaaatgcgtaatgtaggctaatattgaatacatatttaaaaattttataatttttattaatatactaaatattattataaaatataacaaattatatcatatatgtatattattaattcttctatatttttagagttgttccaatttttttttattaatttttgtttattgatattttttatatccataaaatcaaacccatatttctggcagttttttccgagccttgatttctagcttccaagctcaaaatgatcacagaacctggttataaaaaattattatgacaaaagcatttgtttaacattaataacttgttaatttaacactcatataattaaatgtgattatgaatcaaagtaacttcattttcttggcatcacagcgaccaggagcaaggataacttcctcaattatagttcaagcctatgtatttttatgggtcttcctcgtagcaagggtgacatgagacaacttgtggcaacaatatcaccatcttctttaccaagcaagtggtcaagtttccaatttatttggcatactcatgactggtgagtccacatctgtagaggagcctctagtttagagtcagtttctccaatttgaaaaacaaattgtgagtgtttagttaaactgacaatttcggaccaaatttccaattgtctcacaattcgaattttctaattcttccacagattacttggctaatagagatcaatttgttaaacttgtcaagaaaccaaggtttgtagttcaagttggagttggatgaaattgaatcaatcattttatttaaatattattttacttaaaatatttttaaagagttaggaatgtttggaaagtattttttttattaagtattcaaaatgttctattccaagatcgatctagcttacactttttttgatgaagtctcatctattggatcaaaggcaccttcatttaaaaacccaaaacttgtttcttattcaagagatgagagacaacaataaccatcccctttggttctctttttctttcctattttggggtgtttggttgtcaagaaaatccaactttcccattgttttataaattgttttcaatggattttcttaaggaaaaaatgggttgattcttcattcattcatctcttaatttttaatctatttgagtttgggtaaaaaaaacttattttctttttgtgtagattcaagaagaaattgaaatcgagcttggtgtggactccaagtgtacttcgaaagaagaatgtgaaaaactgaaagtggaagatattagtcaagtgatccgggaaggattggtaggcttgagttaggtaaaatcttgtatttagtttttattcttcatagcagatgttttcgatcagttgtaggcccatggttttttatctattcggaggttttccacattaaaatcttcttcgaaggttttccacgtttaaaatatggtgtcaattgtttttttctctcattttactctttgatttattttcagtttttgatatcattagttactggacatatatgttgaatgaaagaaaaatgagttgaagtaggtgtgattatccattgaatatcttgaataatttttttattcatttttgttaatgatatcttgtagtttttggcaacgagttaaggagattattgtttttatgaatcaatcttggggagtgttgaagcatttgcatgtgacttgcatttgaatttgttggaagagtattgttgcatccatttttgtatgtgatatttactttgtgttgcaaagtgtttgaagaggaaagttgagatttgtaaaagtttataaggttaggtaatttttagtgggagatttttaaaatgttcaacaacacatattcaatcctgttctcctccattattgagattcatctttcaatttgtattagaatgggtttttttttagtaatttagtttttttctttaacttttctaaggacaataaaaaaaaaaaaaatctagataaatattttatttcttgtcttgaaaattttcaatctgtttatttctttttggacttaaatttcaaagcaaattacctttttccttttttcctattttttggcctttttttttcaacttatatctcttattagatattttcatttgaatgaaaaaaaaaaatccaaaatgcccaaaatgcttagctctttttctcataaagaaagtgagaaaaaacaaatttttttcatcctaaactttcgcacaaacttattcataaagtatgtttatttttcttgaatcttttaagtatatttgggaattttcgggttcggctgataaaccccttaaacatagttgtccctttccttttcccattcaacagccagttattctgataacattaacttaaagtcctcagccttccgcaacgagaagactcacctgcaacatcccaaaaccctaaactcccacctctgtgaaaggagtacaaattgaatctatcaaagtacacatgcccaagttgctttgtgcgctcctgtagtcttccttgtgtaaaagctcacaagcaacacactggggtgtacgggcaagagctagcggacccagttcgttcccctctctcaatttgacgataatctcctcttatctggtaattttttctcccaattttgttctttattatcaaatttcaatacccatttggctattctgaaggtttgtcatgagtggattgtggtcaccattgaggaagtttactgtttttttcttttccttgaaatttcgataagtttcaccattttcaagatgttcagtaatggtgtattgtaattagcttgaggaattttgctatttgatcttcatagtacagtgttttcttttgctggtttgtccattcctttacaggtatgttttaatttaatacaattttttttatatcttttggcttctttgaaggtttttctgtgtagtattacacgatgtgtaattggcttgaggaagttgaatgttttgtcttcaaatttcaaagttcggatacaaatttagggtttcaaagttttttcatgggttgattgttaatttatgtgaagaaggttgccactttttcatatcaatgttatttaaaaaattagtagtcaaactagtttttgaactcaatgaatagtctttggcctttattttgtttttgtttttttttttttttaaataaattgagatttttttttccagttcctagcattacccttttcatatatttttgactagagataa

SEQ ID NO: 11168 - DNA, 4220 bp, Vitis vinifera
  Intron number 5 from transcript GSVIVT01016490001 (locus G SVIVG01016490001) derived from phytozome v7.0 (chr-ID chr1 3; pos 3446408 to 3450627 reverse strand)
gtgagcaacggaactaaggtggtagtgcttccatttaacacgagtgtggagttggtgctacaggatacaagtattctgggaattgaaagccaccctttgcaccttcatggcttcaatttctttgtggttggtcaaggttttgggaactttgatgctaagaaggacccttccaaattcaatctcgtagatcctgttgaaagaaacacagtaggtgtgccgtccggcggttgggtagctattcgcttcctcgctgacaatccaggtgtatggctcatgcattgccatctggaagtccacacaagctggggtttgaagatgggttggatagtaaaggatggcaaaatgcctaatcagaagctgcctcctccaccctctgaccttcccaagtgttgacctcgtcttccaaaattcttttgttcccaacctggcctcaaatgatgcctccatttttccctcttgtaatttatttattctgtttttattgttttttcccccgactgttcttttctcccaacttatgaaatggagaagtttttggaaataaaatgttggctactgttaatacttcagatgaccaaggagatcgatcactcatcgccttccttcccaaatctgccacttacatataatgtacagcaaactagcccacaaaaatttcataagatgcttccgctgatttagtcaaaacccataccagaattagtataatatatacgtttttctacttccatttggaagcaaaacttgacatgtatttcgtcaaattcaattgatagtggacacaatggagagtttttttccggaccatgctaaaaaaaatattttcaaaagcggatcatagccctttgtttgactctaaaagaaaatgactttgcatgattaatagtaggacactttgatttgtaacatgaaattctgatattttcggggtcatacctccgaaggcttataggttatttatttttttaactttttactgaaaataatttattttgatactttaaattgtttgttttcttatttttttatgatttattataaattttttatttaaaaaaaaaccaaaatatttgattttttttaaataaaaaaagtaatatgttggttttattttagtttttaatatttaatagaaataaaataagaaaaaccaaataacctattaatatttaacactattaaacattaaaattttatttaaaattaagtaaaaaaaactaacactatcttagttaaactatttttcccaaattttatgaaaagatatttatttacatcctctcattggtaagaaatattacaataatagagtctataattatttaagaacatatcttgatgagattatcgatgcaacatcatgctagaaagggcattctcaacccaactatttgctagtgtcattattcttatggttttctatgatttaggtggtgtttttttttttttaaacttaatttaactttattctaaatataatttaatagtattaaatttttgtttttattattttatttttgttaaatattaagtattaatagaataaaggtcatattgatatttgtattatgattatttcaaaaaattatttttagcattaataaaaagacaagaaatcttggacactattaaaggtttgggttagttcaagtcaagaaatctcgaacctcacccttcttacttcctttgccttttaaggaagggattctcaagtgttatcattgcctaagggtccatgtaggttcaagttgagaaatctctaaccttaccattctcacttcattcacattctaagacaacgaatcctcaaagacaatcatcctataagggttcatgtaggctcaagtttaaaattccctaaccctatcccccatccttctcatcttgtttgcctcttaaagcagaggaccctcaagggcagtcattgactaaaggttcaaatgggctcaagttaagaatttcttaatccaatcattcatgcctcttatatgtctcatgggaaatcaatgcctacgggtgttacgacattgcaactaggaaggcgttaattagatgaagatgcacgatacaatagtgttcccaaagcataagctttcctacccatatatacataggaacattggggatgactcttataattaaggatatttagtgaaaaaattatcaaatcacctacaacaccatacctctattgggggcttccctccacgttgggaacgacaccaacatctatgctggccctataaaagcaacatcttatctgtacaaccatacgacatttgaagctaccaaacctatgcatggctaccgcaaagcaatataaaacccccttttccataaaaggaggaactttatctaacaataagagtttttctacttaattctaaatagaatcttaatacttaatagtgttaaatattaagttgtttgtttttgtagtattttatttctattaagtattaaaaagttaagaaaacctaatatgttattttttctatttagaaaaaactatatattttggttttttctattcagcaaaaagtctataataagttatgaaaaagtaaaaaaataaacaacctaagtttataataagtcataaaaaaaaataaaaataaacaacttaatttctaaaaacaaattgctttcagcaaaaaaccaaaaaaccaaataccacctaaaatttagacgtgaagggttgaatgcttcgaacccacctcttttatactcaggtttgttgtgcgaccttgtcaaaaattcccacaataaatgtaattattaatattttttagaatgataactaatgcatttaagatggtgaatttgatactctttaaactagtcattgacaataattcataatttttgaaacataaattggcattttgatataagccaagttctttattctattttgattcccaaaaaataaaggaaaataagaaggaaaaaatatagaagagaaaaataaaaatcaatttaaagtttataaattattttgacatgttttttcttgttcatttaattttttttctctataaaaacattaaacattaaatttaatatatatactttttaattacatttaattatatttttcatattttctatagtaaacaaaacataataaaaaaaattcttaaaattttaccttttttttaaataatttcttagaactaaacataataaatgttttactaatatctatgagaattaatatgagaaatattgaaacttaatttttaaggtgaaaatcagcatactttaagatgataatcaatatcttcaatacctttttgttttatattaacgtcctttttataatattaaagtctttgagaattcaaatatttttaataaatattttattctttttcttgcaaatttaatgggacattattatgttagaggtgtgaatcagtcacttcactacttgggatcagacccctaaaactggaatacagcatccctgtcaattcatatacctaatctttcaatccacttttctaatattctttgatacaaattttgttttagtaattcaatgagagtgatcaaccccaagacagcaacaaagggtaggttcctatcggatgcgttacactcaagaccaagggattgagaatgtccacaagatcgtcacatcaatattgcgtcctgataagctaaggtggtgatacggaaatcttatggtgaaaacaattgcaggtccagtggaatgaaattctttcaccataatttcagcattttataccatgacatgaaagaatggcttcatcagccccgcacaaggctagaagtctttatgcagtaaactattgttggtgagccaaccacttctatgcattgccactacttatcaatagaaggcagttgaaattcagaaacatatggtgtataccatatgagaaagggtaaacgggaataggaagcaggtcaaataaaattcagaaatatgttgtctttgaaaacactctaaaacaaaacttgaccaacgtctggtcggatcaagattgtcgttgtaggtgtttggttctctctgttttcctttcaatttgttgtttcccctacataatttcatcacctaatcaaccaaacaggtcctactgcctctatataaaccatgccacaaccttccatgagtctcatcaaggagcgcttgagggttgtctggtacattgttgctcaactcaatcaaatagagaagattttcaggagaa

SEQ ID NO: 11169 - DNA, 6263 bp, Vitis vinifera
  Intron number 7 from transcript GSVIVT01026601001 (locus G SVIVG01026601001) derived from phytozome v7.0 (chr-ID chr4 ; pos 21166312 to 21172574)
gtcccatccaagctgctgaccgaggatctggagcggtttctcctgctgcagtggtgcatgaatagcaacaatatatcatactgatatcttttatttggaagaaattttcaagaaattcttgtatgtatatacaaaattcatttctacgcaaccaaatatcttaaaaacagtgtacccgcccgtatttttaaaagcaaatatgtcataatattcttcgatatcccaccgtaacacctcccctttcctggacatattccagtaaaatttacttgtttaccaaaaacaaattcatttattaagattatagacgttaccatacctaagaaagtaatctccattattttctgactacaactaatctactcctaattaaaccaacgtcccatgattgttcttcaacataattgctgtccatgtccacaaaacaccccaaaaatataaaagttttcaaaataggctatttggaatatcttcccaccatatttatttataggtaaatccattaaaaatatttactctaattcctcacaacatatcttatggtgaataacaatcctcttggttgaaaaatagagttcatattagaaccctcacattcttggttggactcttttagagatgctcatccacaaaatctatcataagaaaatcgtacgaattctggtggtgtacaactgctgctatgcatgagaatagctctatcttcttaccctatcttatgtgtatcgttttctatgaaattggaattccaaattatagaaaattgatacctacattggcattagaattacaaattaatataatcatcatataaactaacaatgcatgttttggtcatacatctgcggtctccatcttacatacatattttcaaacatatattgattgattaagagtcaatgtgggaatgattgttggaagttagaagtgtttggcaatagtaaaaatgatttttcttagaaagttaggaggcatgacacagtattataaatgaattttaaaagtctagctaatcacttctataagttttgaactaacattggatgctggtgtaaaaaaatgactttttatgggttagttttactatgaaaaatagtaaagaaagtcaaatatatttaaaattattaaaaatttatatattttaaaattatttaatctttatatagaagagatgaataagtgaaaaaagtttgaaatgatgcataaaaataatttattatctttaaatctattttttcattttcttatattttctctttacttctattttttctttgttccattttccttgcattttccttcaaactttccgataataaaacataaccttgaggtttgacaaatatttaaaaattatatttgtaaatcaagaaaatcacttcaagtgattcttgaattagcactttgatatgtgctacttcatctaaaaatcatttttttttattatataatacattatccaaaaatacttaattatataggaatattttcttctatatcataaaaagatttatcataaaagtgttatcaacaaaagcattataagtttcttcataaaaatatagtactaaaatatttactatggaagttatgccaataaaaacattacaaattaaaaacatttttaccaaaatcattctgaaatcatcctaaacctactcatgcttccaaatgaaatatctcatgagtttttaccatttgcatattggcatatcctctctacaaacaacttcaccatcaattaatttttgagttaatgataagaaaaaattaattttagattacatcattttatgaacatacttatacaattgaagtataatttatcacatttcttacaatttaataaaaattttaaataataataataataatactcaaagaaaataaaactatttttcatattctaaaatacataaactcttcattttaatttcctctacgaggtgcaagattaccttaacttacatgttagatagaatgataggacacaatgaaaatggtaaaagtaatgcacaaaagaaggataagaatcaacttcaaccaatatttctataaagagtaattaaatattaataatattttatgatcttaatttaggaaatgatatttattttccttaattttaagacatttattatttgtttcttttttataatttacaatacactattgtataattttttttaaaagaaataataaaattcaactctttcattgccaaaattatcaaaatttttatggtattagaggaagagaatttatactcgattcttctctaaaagtaattaaatgtcataaaagtattggtcaaaatacttgagtaggtaaaaattttcaatttgaggggaaaaagttttacccttcattcgtattacagttttcaacaaaaactaaaaaagaacatttctaagtattataatttttaacaaaaactaaaaaataaaaaataataataatttgatatttatatcatgtctttgtttgatatttttatcaatcctttggtatgccttcaccaagtttcaagataagatggatattcatatacattctcactctaacttgagaatatattaagaaaagaaatacttgaaacagcatattaagggaaagaataaataaggacaaaaaaatgacatatacacggaatgaatagtaaatcaaagtaaatattttcataaattaaaaacaatcaaatattaataatattttattatcttaattttaaaaataatatttatttttttattttaaaatattttttatttctttctttctataattctcaatacattgttttgaaaacaaataataaaattcatcaaactcttcaattagaaagcggaaaatgaagaaagaaaattcaaggtttttagtcaatgatgtctgccctcccacccatgtctcctccaagcaaagctataagcgaagaaattacccttttgagtttcctccatttgcacgtgggcatatgactagaaaacgtccaaacgaggacttcaaaaattaaggccacaatcacttgatatatactttttgaacgtcttccatattgttatattaaactattttcatcttcaatatcaaattgtactgaactttctttgtcagtatgtggggctagtaaacgtgtcttaagtgaattaaaaaatcatcaaggcaacccaagcacagccaattagggttgggtttcgagtaaaacttgtatacgtacgtcccaagcgcccttttcatcttcaatatcaaactggtgaccaaggactacactacgtctacgaaaatcatcatctcacagtatgattcctctctctagcagttgactaatcagcgataattctttatgcctataaagtactcaatgttttgaattttgcaaaaacttacaattgtattatcatacttttcatacataaaaatatattatatattatttcttatcatttctgacattaactttgatctcagagggttattaggtcaaaatttatacgtcgaagctaaatttcaaaagggaactcgaaaattaaggcaaaattcaactaatgctaactttttaaaattatattcatgatcaatatcaaattggcctgctctttctttgcgcatgttacaaagcacaaaattaagaccaaccatccactaagtcaagccatgatcaatgaaactcctgagtgattaatttgacgactccactagtatgcaggaggccaaccaatatgtaattaacaagtatatttgagaaattaagggcatttgacctaatgggctaagtttcccgcaataggattgacaactcgagcccattgaagccaaggttgccctttggaggaaacttttagacgccccaagtgcctattcagacctcaacacgtctacaagaatgttcacaaacatgctcaacttcaatggattcctcttttgtgccgtactccactactacaagctagttactcttggaaatctttgattaatttgagctgtctctgaaaccagttggccagtatcttgaatttcatggtctaaaggaaagttcaatattggacttccttgtcaatccattacaacaatgcatttgcaaatctaacaatatggctccattgtttggatagatgggtattttgagagttaaataaactgtggtgagagttttggaagggcagggtgtatggccacgtgtaaagtagaaaaaagaaaaaagaaaaaaagagagaactgatgtgagcagtaaaataagacacagaaaaagctaaagtgggaaatgagataaggctaatggaaccatgatgaaagaaatgagagagaaacaatggaaacatgagagctgactaaatacaataataataataataataaaaataataataataataatggaagagaataaaaataaaaacaaaaacaaagaaataaaatgaaagaaaagaataggaaatataataatatatataaaaaaaaatgtaaatgagtctatgctatattcattgggacagatttattaaagaaacctaaattagtctgtgatatgatacgttaaagaatgaatagttacaatatcataatgacctcttttaggccttttctcttgttgagcagctgaagaaaagtacaactcttgattagggttttgattaactaaatttagagaccccattttccaatctagaaatatctgtctagctagaaggttaaaataagaattgcaaatgaaattgaaggttgcaactcccaggttatgaatagaaagaaggccccagatggtacacaagcaggcaacacctagtacttatcccaacagccaataatataagccagaaaaaaaaaagtaagctgatcaaatcaatgcagctgtctaaagcataagcttttatcctgaaccatccaagattctttgttacgattactagaaattagctaaaatgattgatttgatttcacaaatagtttgaaagtacattaggctttttctttttcttgccttcttaattggtttgtatatcattttttgtttgctttgacaaatatgtcatccttgttgttggttctgagccaactaaagtcaggttcgtccaacttaatgaaagttagacaactttcctcccttctttgtgcctctcagagaatccacccagtagtaatgagactggatgaactcctttcctgcgcaaaaggatgtccagacgagtggtccgggctagccccttcaaagcttaagtcaagcaaagatgactcaaactgcttaatgagagagaatggataggtgaatatgcatctgcctcgtttgtgctttttaaagggtttatttgttttaccattttttttcttggttgtttaatggttgtcttacactacttgtatactttggttgagccctttttgttatgctcttttaatagagtgtttttttatcaaaaaatattttagcataccatgtttttggattaaactaaaaaattttatgacaaagtgatggacttaagaatttttgcatcatattgtctgcatcatattccttcccacatttttttattcttatttttttcttggataaatactctataaagcattttgtatgctctatctcaactctctttctcattgacttatgatagttttgtcgtgggaggaatttatattttttttttcctcaattctatgtatttacttttgatatgaatttatgtgttttttctcaactctttgaatttatatgtggttgtggtgcagatataagatgtaaattttgctatctgaggcttgaaaaaaatcacagaaggcttttgtggctgctaatttactcttgcaagaggcacaagacaaggacagtatcacttccattagtcatttaggtctcattggtagtacaaattaagtcaaccctgtatatataatgtgcacttagaagcaagaagaaaaaaaaatgaaaaagaagccaattggacctgtacttagaatccatcaaaaggactgtcattcctctttgtacatgtatgcaaaaagtgaaattgatttttgaattttgtaatgtattatttcaatgtccaacttgggcatggcatgttccccagtttccatatgggtgataaggactttctgctaatatttatttgaatttttagtgaaatagaaaatcaagttcttggggaatatttattgtatataagaacccttaactgtgttggctttccctggtttaaaaactatttgaatacatatatatctaatattttatcactgtttcgagaaagttcctctttgccctc

SEQ ID NO: 11170 - DNA, 12363 bp, Vitis vinifera
  Intron number 5 from transcript GSVIVT01012985001 (locus G SVIVG01012985001) derived from phytozome v7.0 (chr-ID chr2 ; pos 10698613 to 10710975 reverse strand)
aaggttgcagtatttggcttttgcaagttggttaggtatgtaatcttaatatgtcctttctaattttggatagtgtccttcttgtctagtatttgttttgaaatatttcctgctggtaatgattgatggaattattaatatttcatgatgaataatatggctatttgaaagccttttcaaccattgtttagtccttttttaatcttcttggcatttttttttcctgcctgttgcgtcagttgccagcaggaagtgaagtaaaaaaaaaaagagtattcttttctttttaatcaattactcaactacgacttccataggggtggagctaggaatttgtcctcttgggatcagtataattcatttataatggttatcaattttcaaatttatttgtttttttttctccatttggacatattagtttgtgttgcctaaattaagcaaatgttagcaagtagcaagttcttttccacctattaggtgtgacaaatttattgcagaaagtagtctctgaaaaatataaataaaaaattgggaaggatactgaaatagttttaaggggattgaaagagtctttagcatgttagaggtgggtctccattggtgaaaattttaagggatgaccttatgtgaacagaagtattaaaagattgaaatctttgtgggagccaagtataagaataaaagagagaaaaagagaaagatgaaggagaacagaaaaatagagacctgttagcttctttctttcacttattacatatgctagtttgattagaagtgtgaaatttccttacttgattaagaatgcttatggaaaaaatcatatacatggtccaacattcctcttcaagttggagcagagattccttaaaattgtgtgaaaaattgttcttgtcactccttatgtttgtttatctgttgactgataatttgattaaaaatataaggagctctgcttcccttcttttaaagtttcatcaacttcaggttcaacaagattatgcatagtgttaattaatggctaattatgacaatagaatctcgtaggcttgctgaagtcaaacatgagttctttcaacaatgccatcaactagagtaactagcagatcctaccaagcttgaacattgctcctgcatccattgaatgcttcttactgtgccctgtgaccatgttgcctcctaccaagatacagttgtgaactaggtccccaatctattattgatctccactatagtactttgacttgactagtaaatgaccatgaggaccatgagttatatgaggagttgacttcaaatacccaatatttttttgcacactgcttccatatgtgactcttgaagtgcatgtatgaacttgcttacaacaagtaacatgagctacatctaggctagtttgattcatgaaacttagcttgtttattgttgaatataatgtatttatagtatataatctttccttgttaatataggtcacatgtatggtcgttaggactcctagccttgtatatatatatttctcaattgtaagtagatacatatgaatgagaattaaggtttttcttctttctctctctctcaacatggtatcaaagtcaagggagaaaacctaattctttcctgtttcctgtgtcatcaactccgggaaaccttctggtgaccgtgtttcattccggtcaccttccccatctcccaatacttttcggtcagtcggattgtcatcagaaaacactcaccgccggcgaacttttccggcgacgtctttctccgacaccgaccacaccaagaggagcgcctggaggagatctccaacttttcccaaagcattggagctagaaaaccgtccacgcgccggccatgcacacttttacggctggcgactgaatctcacgcgccggcgcatgaggccttttccggcgacgcgcctcctcctctagcctcgcctgacgccaaccagcatccttacctccttggttctcccatccgagtcctgcacgtacctcttttggggatttttgtctctgtcagcctccaaacaatctttccggcgaagttccagctcctttttctcctccccaatccctgcacgtgccttgggaagtgttcttctacctttctggtggtaccacgctgcgatctgaggccgtctccctttttttcggtggtgccacgccgcaattttaagccgtattagggctctcttcgatccaaacataagataagtggatatggctactaaaacttccattttttcctctatcatatctggatctcctatgattacttcggagaaattggttggcagtgaaaattatctttcctagtctgcctctgttgaactttggtttatgggtcaaggatatgaggatcacttggttacccaggaggcagatatccctgaggttgaccgcgtacagtggaggaagatagatgcacaattatgtagtgtattatggcaatcggttgatcccaggattcttcttcatcttcgggcctacaaaacttgttttaaattttggactcaggccaaaggattatacacgaatgatatccagcgtctttataaggtggcttctgctattgtccatatcagccaacaagacttggatctatctacttatattggtcagattgcctctcgtaaggaggagttcttgactgtgatgcctcttactcctgatgttggggctcaacaaacagagcttgacaagttcttcatggtccttactcttattggcctctgtccagatcttgagcctatccgtgattagattcttggtagttcatcagttccgtccttggatgatgtgtttgctcgcctcctccgtatctcgtccactcagactttgccatctgatagcacttcagattcttctgtgttagtttctcaaactacctctcgaggaggacgcagtagtacccgaggtagaggccaacgtcctcattgcacctattgcaataaacttggccacactcgcgatcgttgctatcagttacatggaaggcctcctcgcactgcccatatggcccagtcctctgattctccgctgcctcagcctccgagctcttccgcatctcagacatctcaagcttctattgcctctgttgcccagcctggtaatgcctctgcctgccttacccacacatcttctcttggaccctggattctagattctggagcttctgatcacctatctggtaataaggatcttttctcctctgttactactacctctgctttacctactgttaccttagctaatggttctcaaactgtggctaaaggtattggtttggcccttcctctgctttctctacctctcacttttgtcctttatactcctgaatgtccttttaatcttatttccatcagcaaaatcactcgtactcttaattgctctattaccttttccgataaatttgtgaccttgcaggatcggagtacggggaagacgattggcataggacgtgagtctcaaggcctctatcacctcacctcggattcatctcctgcagtttgcatttccactaatgctcctcttattcacaatcgtttgggccaccctagtctctccaagttctagaagatggtccctcgtttttccactttgtcgtcgcttccgtgtgagtcatgtcaacttgggaaacatactcgtgtctcgttccaaaagcatttgaataatcgggcaaagtctccttttgagcttgtccacactgatgtttggggtccttgtcggactgcgtctactttcggatttcagtattttgtcactttcattgatgactattctcgatgtacttgattatttttaatgaaaaatcgagctgagttattctctattttccagaaattttatgttgaaatccaaacccagttcaatatttctattcgtgtgttacgcagtgacaatgccagggaatatttttcagtcccatttacttcatttatgtctcatcatgggattcttcatcagtcttcttgtgttcatactcctcaacaaaatgaggtagctgaacgcaagaatcgacatcttgttgagacagctcgtactatcctcctccatagtaatgttccttttcgtttttagggggacactgttcttaccgtttgttatttgattaatcgtatgcccttctatgtcttacacgatcagattcctcactcccttctctttcctgaccaaccactttatttccttcctcctcgtgtctttggttgtacttgctttgttcatattctcactcctggacaggacaagctttccgccaaagccatgaagtgcctcttcttgggatattccagacttcagaaaggttatcgttgttattcccttgagactcatcgatactttatctccgctgatgttaccttctttgaggactcaccattcttttccaccacttctgagtctcttcctgtttctgaagtcttgcccattcccattgtctccccacttgatgctatgcctcctcgaccacttcaagtttatcatcgtcgccctcgtgtcgttgctcctctcccttttgctgaggcacctgctgactcacttcctatcccttcggcttcacttgccccggctctgccttctcctaatgacttacccattgctgttcggaaaggtacttgctctactcgtaatcctcatcctatttataattttttgagttatcatcgattatcttcaccctattctgcttttgtttctgctatatcctttgtttctcttccaaagagcacacatgaagctctttcccatccaggctgacgacaggcaatggtggatgaaatggttgctctgcactctaatggcacttgggatcttgttgttttaccctctggtaaatctaccgttggttgttgttgggtctacgcagttaaggttggtcctgatggtcaggttgatcaccttaaggcccgcttagttgttaaaggctatactcaggtttatggttctgattatagtgagacattctctcctgttgccaagattgcttttgtccgtctgcttctctccatggctgctatgtgttcttggcctctttatcagttggatattaaaaatgccttccttcatggtgatcttgccgaggaagtttatatggagcaacctcctggttttgttgctcagggggagtctggtttagtgtgcaagttacgccgttctctatatggcttgaaacaatctcctcgagcattgtttgaccgttttagctctgttattcaagagtttggcatgcttcgcagtacaacagaccattcagttttctatcatcataactccttagggcagtgtatttatctggttgtttatgtggacaacatcgtcattacaggcagtgatctggatggtattcagaaactaaaacaacatctttttacccactttcagaccaaagacttggggaaactcaagtatttcttgggaattgagatagctcaatccagttctggtgtggtcctttcccaaaggaagtatgctttagatatcctggaagaaaccggtatgttagactgtaaaccggtagacacacctatggatccgaatgtcaaacttgtaccaggatagggggagcctttaggagaccccgggagatatcgacgactcataggtaaattgaactatctcaccattactcgtctagacatttcttttcctgtgagtgttgttagtcaattcctacagtcaccatgtgatagccattgggatgccataatccgcattcttcgatatatcaaaagtacaccaggccaaggtgtgttgtacgagaacagaggtcatactcaggttgttggttacacagatgcagattgggctggctcacccatagatagacgttccacttcaggatactatgtttttattagaggtaatctaatatcttggaagagtaagaaacaagatgtagtggtcagatctagcactgaagccgagtatcgagctatggctttggcaacatgtgaactcatatggttgagacatcttcttcgagagttgagatttggaaaggatgaacagatgaaactcatctgtgataaccaagccgcattacatattgcatccaatccagtctttcatgaaaggaccaagcatattgaagttgactgtcatttcattagagagaagatcacatcaggatgtgttgctacaagttttgttaattcaaatgatcaactagcagacatcttcactaaatctctcagaggtcctaggattaaatatatttgtaacaagcttggtgcatatgatgtatatgctctagcttgagggggagtgttgaatataatgtatttatagtatataatctttccttgttaatataggtcacatgtatggtagttaggactcctagccttgtacatatatatttctcaattgtaagtagatacatatgaatgagaattaaggtttttcttctttctctctctctcaacatttattaaggctttttattttttaaatttttatcatattttattttttttaaatctatctacaccaatcaaagcaccttcactaggctatcatgcttatgtttttacttgattgtcgtatcaataggtccttgactctttaactaggttgcaatatacctaaagcaatcaagatggctcacttggaactcgcaatctcaatgcccaaaatgaactttagaatccccaaatcctttagcttcaacttttgactagatgtagtttgaggtctgcatcttcctttgtgacatcacaatttcatccacatatataattagagttggtaaaatctgtttgtgatattgttgactgtttataaccccaattctgcatagcttcacttaagatctcaaaccaaactgtcagagatttctttaacccataaccctgttaagttggcatgactccgttgtaggaggaaaaggaagaaggtgtggagagtcgcttctcttagtattgtttggacaatttggagggaacaaagttgaagaacatttgaaaacaaggaacaaactgatcaaaagttgaaacattcaatcctttgtaatgtatataagagaagactcgatacctttgatttattttgtagattggttgggttcttgttgaaagagagggtggttttttgtggcatcgattttgaggcctatccttttggtgctcaatgtagatgtcctatatactttggtgtaatatttttttgctatttatatagacaatatctttctttgccttttaaaaaaggaaatttctttaatccatgtagtgcctcctccatcttgcacatgatatttggagaggatgtccatgttaatttgctccttttaattcttcatttcaaaaggtatctttgacttcaaaatgatgaagaggccaattcaatttcacctctagaaaaagaaaagcatagatcaaatttatctttgttactacaacaaatatctcttggaaatcaattccttaagtttgtgtagaatcgctagccaatagtccaactttgtatctttcctcataactgtctggtttctacttcattatgaacacccatctccatctaaccacattcttcttcctttggataactcatctaatttttagttattattcttctgaagagttttcacatggattttttccactttagatctttaaggtcatgcttagttggttagatatagtattggataggatgagagatgggataacatgccttatctcttgtttggttggcgatgagatataacaagttatcctattatttatcttatcccatgttcaggaagttgagtccatattgagaaaactgaaagccagaaagggttgtagagcagaatgtggacaaggttaagtcatttgggagccctttgtttctattatccatagggcattggtttggttctggctgtggtttgttgtttttattttcctttcacctctttggcgctctttgtatactttgcatgtatgtggtgaatcctaagttaagatatgagagatacatatcccatggattataaatttatttttctgattcattttctttaatttttaattttttatattagtcattttgccaaaccaaaatttggataaaaaaaattaaatttgtggtttgaaaaaaagaactaaaaaatttgtaatatatcataaaaccaatatatataattttttttttgtatgtttgacaacatgatgtaatattttttatttataaattttagatattttagtcatgaatattattaacaaagaaataaaaaattacttactaaaatataaactaaaaacaaattctaaataatgctaaacatgagaaatttcaatttttttaataacaaatattgtgttgcaatatatatatatatattgataactaaataaaaatagtattgaaagcgccaaaaaggtgtgcaccaaagtacacacgatatacacaatggtcaccaataagagccaaaaaaggaaagagaaaacaaaaactactttctttctcaaaccgaacccatttaatcaataaaatcaactgaggatattgaagttttgcctataaacaaattggtccaagatgacaagttgcacaaaaacaagaattttagcctttgaacagagagatccacgttctcaaaagatcttctatttctctcttttcatattgttcaaaaaaggcataaatactgtgttgcaatataatttttattttataaaaatatcgaactttgaaatgcaatttgctttccattttactttttatttatttattatttttatgaatccaacataaacatgatataatatcatattatatcttttccatcggaaataatatctaaagatatcatattccataggaaatgatatctaaagatatcatattccataggaaatgatatcataggatatacatatcctatttagtgggatatgatatctaagaatatacttattttatcctatcctatcctatctagttaaccaaaaatagtctaagtggatattgcaagttccaaataataggtcaatccaattggatgcaaaatgattaatggatggtgataataaataaaactagggattggttgatctaacgcctttacaaagagtaaagagaagtcgtaatcatccataaaaagatggaggattcttagtatgaagttagagaagtgcttttatccttatgttttacataatgtgttctactgtactacatttaccacttttatttatatattatatttttctatcacacacaaaaaaaaagaaggaaagttctacataatgtacctacaattctttgtctaagtgttgctcttagtttttcatgtcaccaaaattgaagagacaagctaagtatgaaaactctcttttgcatctttccttttcgcttcttaatgaacttgccatattagttattcaagactttctttaatgaccttcgatcacctaaagacttcataaatgagcttggtattacccatgtcaccctaaaaaggattttttttttttgatagattaaaagataaatatattaaaaagggttgccaaaagagcaacccaaggtatacaaaacatgtcaccctaaaaaggatggacaccgaagatctaagatttcaagcgatgtgataataaatcaagagataattagtagtcgaatccttccttgaattggttgttttagagaaggtgatccaaaggccatctcttcttcctactatagactagatggaaagagtaattttaggaagagcataaaaattctaaacaattgtttttgataggagaaaaggaaaaaatgtgcattaaaggcacatgaaaggaggtatagcaaagtacacacaaagtatacaaaaaacacctattagagttcgggaaaaggaccacaaagacacctttccttactttaagctcaaccaatctatgaaatctaataaagacattgtgtgatcctctatatccaccttagtccaagtctcaaaagtacacaaaaaaagaaaaaaaagaaaaaataaacatatttgattgctgggtcagattgctcaacattgttgaatgcccttctgtttctctccttccaaagaatccacatcaaacataagggagcgaccttccattcttttttccatttccccccacaaatgagccatgcaaatccaacaagtgccctttgactaaagaatgcataacctactccactttaaaaagtgagaaaattagttgccacaccattcttgctttggaacaatgaagaagcaagtgatccatcatttcctctgcatctttgcacaagtaacatctacttggtaaaactccatcccctccttttcagttggtcgatagtaagggttctaccctaagacgcttcctaggcaaaaaagctaaccttcaaaggtgcccaagacctccatataatgctagctggaaagggcaaatatggctccttgaaagagaataatagagagatctaattgaaaccttgtcgcatttggattcattccaccttagactatcctccatttcctttttaattattattgaatgtaatttccgaaagaaactctccacttcaggcagctcacaatcgttaagctgccttgagcagcgggggctccaaccactcccttctccttctagctcccaagcatccgccacccatccctctctgttagttggaaatttatatatctagaggctcaacttaagtttagtgttttaaaagactacaaaaacttattccttgtggcaagccttaaggcaagacactatgaattagcctcaatatgggataattaaggcttaagcgttaccttattgaggcatacagtcttgatggtatagcgttgagattattatggcttacaccttaaatatttaatgggttttgttgagagagagagagagaagaaaaaccttaattctcattcatgtaaattctacttacaattgagagatatatatatacaaggctaggagtcctaactaccatacatgtgacctatattaacaaggaaagataatatactataaatacattatattcaacaggtttaatgagtttgaacctttttgagctttttccatatattttataatatgcataagctttaagattcaatgagttttaatgcgtttttggttttatgggcttttgttttatactgtcacaagtcttaagtcttgggtctatggtttgggttgaaccttttacaaaataaatttgtatcatacttccattaatccttttaaagggaaaagaaaaggaaggatgatgctccccaatggtcaccagttcgagtcccctcagggccaatgaaggtttacccggtcgttaactttagggccccgtgggattagtcgaggtgcgcgtaagctggcccggacatccacggttatcaaaaaagaaaaaaaaagaaaaggaaggatgaagaagaaaaatgggtggacacatcaacattgatgggaaggatgataaagcaattagatatggtgatgattccttggaggatcctactagtgatagtgatgatgaagcataatactatttgatggagttgtgagagagttggattttggaagagaaaaaaaggaattaaattagaaattattggatattataaaaaaattagtttgcttatgatttttattggtttttttttttgtttttgttttattatttctaatcttgtgcctcacttgcccttgaggcttacactttgcctcatttgggaaaaatgccttatggtcgggtttagccttttaaaacattgcttaagtggcaagcatttgatgtagagatgtgagaggttcctagtttgattcctaacaaagaaacatgcttcttagcaaaggattcatttggaaattcaaagcttcgtctaaactcaaggcttttacatgattcatagcaaacaaaaaggtcaatttcctatcaaagaatttgtctagattgtttttctctagattttctatgttttttctaatagacttctctagattttctatgtagttccaatggtatcctatttcatgtactcactttcatttccatgccatgccattcattgctttcacttcccattatggtaaaaatgctttaaatctggtgtaaattgaaaaatttcccaattatacgcccaattattttttttttgcatacgataatcttcttacttgtggcttgaactaatatttttcctctttagcatgaatatgatttttctcaaattttgataactgagcctttttggaggtttcatttcttagaaaatttaggtagagcgttgttattttgtttcttcttaaatgtaacttttttcagttgtgtatgtgtaatgtaattaataattcttgttgtccatgcaggaatagttctttgtcttgtattcaatattatcgca

SEQ ID NO: 11171 - DNA, 5587 bp, Vitis vinifera
  Intron number 2 from transcript GSVIVT01015673001 (locus G SVIVG01015673001) derived from phytozome v7.0 (chr-ID chr3 ; pos 15347829 to 15353415)
ggtctttgggtaagaagtatctcttactttgcataattattataaaatcttctagaattttacttgtgaaaaatctgtaaggtattgtgataacatgggcaaagatacctttctcttgtcattagttaaaaacctcactatctcataagttcttgggtccactaatcctttctcttggaatataaacttccatcgcaatatttcggatcttgagatagaagatcttgaaagacttatgtcctctctttcacacttgcacttatctccatttggtcctgactcgagagctagtccctatcttcttcaggtttgttcgtagtaaagtcgttcttttcattcctatccaaccatattgatctaactccatcactccctattgattttgtttggaaaatgcaagtctcatttaaggtcaaatcctttacttggttagtagcacttgagaaggtaaacaccaatgacatgctacaattgagaagatcctacaaagcccttggttctaatgtttgtttgttgtgttggagagtggtgaaacagtagatcatatcttcttacattgttcattgagtttggggctttggcataaattattctatttgattcatatgaattgggttcctcctaggaatatatgtgacatgatgattattttatataaaggattgggaagtactagcagtagcaaggtgttgtggcagtttggttgtcttgttttgatgtggttcatgtggtgggaaagaaatgctaggattttttaggacaagacaagaacttcagagggtttttgggacataattcatttcttagcctccttttgggcctcttgtaccacaacttttcatagtgttccccttgattttatccaacttgattgggtgttggtgtgcagttccaagggtgtggcctagcaaggatagattatttttatatattcccacatgggacatagtttgtggaacctcatatttgtatagatttttgaactttgaggttttttgctttctttttgtgtactttttggaggatctctcatccttctttatacttatttttactcgctttaatatactatactgttgtttctcataaataaaaaaaaataccaaaacgagattagagttcactaatgaagctagttgttcaatgttttcagtcaatattgtcaacattcttcccaaactataactctcaaacctaggaccctactaatcattcctgttaatattatcaacatttgaaattcttctcaaatggtgggtcttaacgttcatattctgtccttctcaatccttttggagaagtccatttctgccctcttataacaagggaaccctgctaacaagcctcctataattctgtgctctttataataagggaaccctgttaacaaaaacatgattttgttagtagtgttgtcatgccttaaaccccagttctttaggattcaagggcatgactgcattttacatgtcaagcccaatctaacaaggaaactgtccaacaccaaattgccagcaatttgttactattgaaatcagttgcactatggaaatgaaacatccaaacaaagaaagaatccatgatatatcaagctagaaaaagcatcagaatataaattgataactgatgaacaacttgaatgtcttatgtactaagccaacaaaatgtaacaaccaaatgctcattttgtaagagctttaactgaaaactcccaataagcctatcaaactgccaaacaggtctaactttctttactaacttggtctttgaaatatttaagatacctgtaagccttcatgtacaatagggaaaacatacgacaataatgtagtgcaaatggctcataaattgctggttcataccatttcaaagattaaatcatatcagatatattgagagaaacaaaagattcatgtgattcaaaggtttagatgttccaaaataaattccagataaagtgaatatccaaataaactgccttaaatggttaatgtacaaatcattggttcctaggaatctgaaggctaacatctttatctcttgttggctaggatcaaaagggtggctagcctcaaaatgtatggtgagtagaatgctgcaagtcagatgtaccaaacacctttattggctaggttgcaaatcaacacatctctaccattggggagaggtttgatgacttatctcttgtcaattggagtgaaaaatgtttagatacacatgaggcaaagagttcagataaatatatttgataacaaatcatatggtttcaagttcaaatcagaatatttccaatttttccaaatggttcataatagtaatttttttaagtcaaattttgcctctcctccaggttcatgaaaaacatgggtcataagatttacttttcccaactccagaaaacataaactattaggtaaccaattggatcataaaactcaatgagtcatttgtaactttcatgatgcctatacaaagtatctttcaaaatggtgagcctggatctttcttgttcttccgaaaatcaaataatctgccagctagtttcaatcaatatctgattcacttttcctaatttttctagtacaaaagttgtatttagtggcctcaatttttcttgtttgtctcctaggtccatgtttgtttaaattacattttctcttcattgtacccaattctcatttatctgaacttctaaaggttttctacattctttaaactttagaccattccaaaagatatccaaagtcatttatttcaagcttatgtttattttttaacttagatcttccctcaaaactaacttggttgacctaatctcttgatccgttgattcagtctttggataagatcccactctaattaacatgtttcctcattgtttatggtgggaccttagtaagaggaagttggccacatgaatgatgagatgtcctgattcaagtgtagcagagtgaggtgagatggggtttgagggaatgatagactctttgtgagctttgaaatgtagaggttcgacttttggagggaaaattgtcaattccttttacatggtgactctttaagcttatactatagggggctttgtggagaaaaattgactgagtgataaattactatcaatgagatagtggcatgtgtacgtggagcaatgaaatgttgttgtatgcaactagtcaactttttttgaaaagaacgcgacaacaatgatatgtttcctctcaagagactccctagcatatcaatttgttgttctatataggtgaaatgggcttagctcatttcaattggtctcttactctagcaaccaaattaagaacctcatactattcccatatacttggagatgtaggtcgaatccatctctaagttgcactaaaagtctaaatccaattggtatccctgagaaaacatgtgtatctaggtccatcctaataggcatcttgaatgaaagagtaggaagtacctgctccattgacaatacacttctgcaaaccccctcttggaagggtgtgaagataactattgaagatactcttttagtggggtgagaagagtccaatgaaaccaaccatctagagttgggaaagtgacttctcatagcctaccttagcatgttaatatatggcctcaacttcattcaccctatagcatgaatgcccctatgttaaaatggtaggtgtcctctccatgctgttaaaaatagtaggaactgcccctgacaggctagtgccaagcggttgcaacatggggttggtgataatcatctcctgacagcattaggagtgggtggcttgaccattggctcgtcccactaatgatgtgacttctatgagttgccaaattttgtgtcatgatgaccatagctccatgtgtctgcacatagattgttatcaaaactttttaatattcttcaactgcttctagagtttattttccccaatcatagtttagattccttattctaggatttctattgcaaatagaggcctattagatcacataccatcattgttcaatccagccgaacagttctcttgtctttctaattctgctctcccttttgtcttgttcttttatctttagaactctacagatgtatggtgatttggaataaactaaaagctaatatttagtacttatgttctacttaaatgtctaatgcctatcaccaagtcatcttacttgctttatgtctgacttagcaaatatcctaaaacaccctcttctattagttagtctctttttacttaaccaaattactaagctgttgtttggatacacttcttgttttttgtttttaaaaacagaaaattctagtaattcctatatgaaatgcaagaaccttgtgagacttaccttaaaaagataacgatgtttaaaaactattttaaaatttgaggtattaaaaaatttttactaccccaaatttaaaaaaatttgaaagtaatttttaaagacacaaggtacgttcatactttcatacaagagttactatattttatacaaaaactaccactaaattctatttttaaagacaaaaaacagagtgtatccagatgagaactaaatttttctttatgtctcacataagaatttcaaaaataccatctcttattacttaagtcctcttttaacctaacttagccaaattgctaaattttttcccataacatgatttattatttaatttagatttaaacataaataatttgaaggcaaaaaactttgtaaatttcttaaagattcacttttaggtttagagtattacaactatctaaaaagaaatccttggcattatgaggtttttcccattcgccttctatatgtttctactgatagtttttctgatgtattattttgatctaataaacatgattattaatgtctaaataaccagttctttttccataaagtaaacaacctttgaatattgcactcccctgttaagtgattcttattgtttggaaaaatgttggatactttaattttaggatctaatcagtctggatcatattaatccatttatattacaaaaatatccagtgaatgcatgggttcactattttctcttaattgatacctttgacaataacatgtcagctatatatggccctaaaattggcttccccatttggcttaatgggtcttctccaggctgcaaaatgtgagaacacagatatgttaatcatcttaacaatgatgcacatgacattagctggtgaattcttgtagctgtcagaacttagaaagaagccttctcccaatgttgcttgcaatcatcccctgtttctacttcaagagaactcaagtgctgttgactatggcaatctctggactaattagatacctactttattgcgttttctataggaaaatagggattttatgaaaaggtgcctaacacatcagaaacctactctatatattcttatattggttgaattgattttcttattttatcagtaccagttatgcatgtctgtgtgaagtatgtttatttggtttcctctctgaacacatctatttatttatctgacttgctctgcatgcagagaggctcttggtatagcaagtgttgttgctgcca

SEQ ID NO: 11172 - DNA, 4053 bp, Vitis vinifera
  Intron number 1 from transcript GSVIVT01007924001 (locus G SVIVG01007924001) derived from phytozome v7.0 (chr-ID chr1 7; pos 7502180 to 7506232)
aacctgtaagtttgtgcgatacaagtcttcttatctttttcatgtgttgatttattggttatcttgagtgtttgatgtggtattcgacttcgttgagtagcaacattgatcagtaatggagtttttagactgttctgtttttgtcgggttgttggttctttgcgttgatggaaatgttttttttttttgtgaattatggattttccgttcttctttgttgtggtttgtggatcttagattaaatttgatctgtttaggttaatagtgtatggggcagtgatgacagtatatacattattatttgtcataatgggtctgagattaaatttgggctctttgtgctaaaattggggttctttcgtctgcatgggcttgttctcttttgtggccattctgtaaaactcagtcagacggatccaacatcattgaggaatcactgcaagtgaatttctgatttatggttggcattcatgaggtgaagtcttatttcaactccttgtgcactgtgaactctcatttcccatgaaaaagttaggaggcaccagggctccgttgtctttgcttgggaagtggtatggggtcagattttaaccgatggcaacttgatgagggggccctggttgttgatgaatggatatattctttgcaagcctagctatgaatcagtaaacgacattcacattcactgtaataaaaaccagctgctgtgggccttttcattggctacttttgggatgcaatgggtctctccgaagtcagttaaggagcttcttatgggatggaaagttgggggcatggataagcagagaagaaaattatggccagaccttcagggaggaggagcttttggatcaaaatttagaaaaggtctttatcaagtccctgatggagtggtcaagggtgtctttgggcataccggcctgcacattactcgattttgtgataaattgggcctaggtggtttgttgttactgtcttctgcattgttgttgtttttattgtttttttccttccttttgctcctttcatggtccatcttggataccccctatacaaggtcttttgaagacttagaatagtaagaacaaacatttaaagcctttttatgagtacttttttggaatgggtcagaatgtacatagatcatttttgacaatgataggctttgtcgattggcctagctcaaagtaaggagagggagcttttgttgttattctctcctcttcaagtgtgcctttttagtgtcaattgtatccactgtgtgtactttgtttcaccatttgtttaggtgatattaatatttataaactatttgcctatcaaaaaaaaaaaacaaaaaaatcttgtacacctccgtagataggatgcacacccttttgttacacacatttttgttgcaaatttgctttcctataacaaaggtggaaaaatggaatttccatgaaggatttggagaaagaagagtcaaatacgtcttagcagacgcatttatggagtgggaaaaacctgagagaaacaaaaggattgctggtgtgatcgaatcacaaaatccagaatttgacaaggaacctaaagccatagacatattggatacatgggctagaataggtgatcttagctatgcattctgaaggtgagggaagggtctatttaacggtcggagtagagcccattcattggggtgtctggtgtgtctatttgtatgaattgatggaatgagtgtttggttcctaagggtatcttctgaatcagttttcagttggcgctataatatccaattcctagaccatcttcttctatttgaccaaaacataaaccaccctgtcaagttattgttcatctcatcctgtggccctgtccagggagactctttagtttctttatcttatagcaatcttgctttgacttttgagtattgagaggctgttagcaaggattctacccaggatagaatgagtgaggcttttcttttctttctttctttttttaataggcaaattaggataagtgtattagaataagtgcctcaaaaaacagggtgcaatttatgtacatatgaagtatataaccagggcacaaacagaaaaggaagatagaaaacctataacactgataaacattaaccaatccccatactatcaataagatccaagaaggccaagtagctaagctcacacccatttaatccacaagaacaaaatctttaaaaccacatctttcaccatcaaacaggatgtctcctcagcattaaacattttgctattatgcttttccatgtgatatagagttggttattttaatttctctccagaattcatatatcatttccccttcctaaagcagttggaatctttgaaatagtaattatatgtcttagcagcttttaggtttgtgcaacaaacagtgtagtcaaaagcaaaaggcgatgtcaaggcaataaggactcctttgagcttaaggtgaaaggcaaaaaacaagaggatagcctaactatattaaggtgataaaaaatatagatatatttacctattggatacttaaccaatataagcgttgtcttcaacaatcaacactattaatgtttcatccctcacggtgtcttataaaattaacaaaatagtaatgattattcaaagtgttaaatattacaccacattataagacacatgatattgtttagagaaattcatcctatctatatgcatattctaatttttcaaatatttaaaaattagaataaaaaacaacataagagaatgaacattttagagaagctttgaccattatcgtcatagtcatcattgaaattaaaattatcattatttccatcaagactagattgataacccccatctcattatcaccatgtgttggaaatgggtttgtgtgtctaagtgggatgacccgacccaacccaataaataaaagaaatggggggagcagtttctaggagttctataactatccagaaactgccaccataaatatatatatatataaaagatctctctctaagaaaatttaaagagagcacgattcttctttatgtaaacaagtcctcttttgaagtttttgttttcttcatgaaaaggagggtcaaagggggtcaaggctcttatgttgtgaaaaatagagtggttctcatatttgtagttccattcacaacttagggtagtaaatttgttagtaaaacaatcaattgagattcttgggcatcgcaaaaggtaacctgaaacctttttttccttcactatgattaatgttatgctttgtttaatctaatgctagattgaattaaattacaatttaagtacctttaatcttaacacatggtcaaaggcaaccacctctatgccttgtgccttctctcaaggcaaccgcctaggtattgccttttttaagccgccttgcttggaggcgactttatcagccccacctggcctggtgccctaggcgatcacctttgatcacatttgccacaaatatcttggttgaagttgaaacaaattcttagaaatttaaagtccataacgtggaatttagatgccagaaagaaaataaattctctgaggctgaatctttgtttggaaattcatctcagtgattggggaataagattctttcaacagtttgaaaactttaccaattaaccccaagtccatcttcaaagtccttgtatttggatgctttgatgactttttgtgaatgtgtttgaatgtgatgcataaataactttgtgctgcatctgatgacctgaatggtcttttcttttccttttatcagggaccaacaagatcctttttctctgaattttccaaaaagtttcattttgtagcagcatcttaaactatacttcttgtcttgttatacatgttcatgacgttcaactgaacataatataatgcatgttctctcctattccctcgtctttattggaagacgtgtatgttttcttgcacatacacttcttaacctcattttagtatatgtctaatgtaaattttgtactgttctaagaagtgtgttgtgttttgcaggctgttaagccttcaa

SEQ ID NO: 11173 - DNA, 7093 bp, Vitis vinifera
  Intron number 4 from transcript GSVIVT01027456001 (locus G SVIVG01027456001) derived from phytozome v7.0 (chr-ID chr1 5; pos 16593627 to 16600719 reverse strand)
cacaaaaattcttttcaaaggtcaatcgataccttctaactttatgcttattgtataaatatatctttgtttcttattgcttggtaatatttctatataataaaacaaactgatgttcattctaatctgcatttctggagtatgttctgcatcactgttgatgattggattcagtttatatgttatatgctaatgtaccaacaaatttttttaagtggtaatttttatgaaatcaaagagaaaagtggaggggtgggcatggccgtgggggtggggaagaagcatgttgcaactaggagaaagagtaatatgaatgaatatccaatgtcctttctaaggatatgtttatctactagccccatctacatgtaaacagcttcacccatctatgtgtgcccaacaacttcacccgctaacatatactctaaaatcactatgcttggagagcctaatctcacactcaatgcttcatacatgaactggacaaatgtgttgctcatttccggatctcatgtccaaaactatgtttagaatatcattgaacttaaatgccaactcaatattaagagtgactttgcaacaaagggttcacaatcgaaggcacaagaagtatatacaaggcataccagtcaaaagaaaatagaaacagccctaaactggcctaaccttacatattcaagttatcaataaagtctaaataggaaaatttagggcctatttggcaacattttcacaaaattatttttgggaacagttgttaaaaatagtttttagctatttttagcaacaaaattctgtttgggaaccaagatataaaaaatagttttcttaatttattctctttgtaatggtactgtgcacttttgtatgatgaaaaagttcctaaagtattctctatattttcaattgtttctcaaaatacccaataaaaaaacacctaaaaacatcttaaaattgttttaaaaaacaacctagaacaaattctcaaaaaaagctatttttagtaaaaaaaaaattgttaaacttgttttttaagttagaaaactgttttctgttttaaagatcataaatctaggttcaaaaatagttcctaaacaaaccctcaacatccttttgcatgcttagatcacacaaacaaagctttatgcaacaactttcaaagctaattttgagtgctttaagccttgaaagaagttctattttactcgctctagatgctttaaaacaagcattaggaagcattcctctacagtgtattataacacttgcctacaaagttgccatgccaaccaagtggaatattatttctcaaatgacttctgaatgtttgacatggttagagtaggtgttttgcaatttcctcattgaaatatttgtttttatttttattttttggcttcatgtaagatcaattgaaagtagttctttatgaatctctagttgagaggtagttgttactggccatgctttatgaatctctagtgctgaggtagttgtaagtgatcatgcccaggaaactttttaccttatgatactaaatatggggcagtagtgtaattgttaaagttacaagtttggtacatctaggcccaagggatagcaattctgtagttgttgcacctttcctgcaaaggtgaccttgccttttattcttgcaatttctgaatgtatattgaaatttcacataagtgcatttgctttttgtatgatgcttctcttaaattcttgatttttttttttttttttttctttttgatgcttggaatgaagttttggataatgttcagtgatatatgatgtttgcatgtccagatctacaatatttttatcaaagtagcacattaagatttcattctgtgatgaaagttttaagttgctttatatggaggggggtggaatgaggtttcattgaagggttggaggggttaaggggacatcagaactagaaatccttactacctgaattaattataagggagacataatacaaacactattaacttcttcctttgttcacacttcaagctttgaaaatgtgggctgatttggatactatcttaaaccatggttctagaccctgaggtgtgacatggcaaggctgagatttcacacctcctatttgtcaacaacacacttttttgtgaaatagataaagagcagatatcttatgtcaaatggattatattatgtttcgagtttgaaaataaacctggagaaaagtgagttgaatgaaggatttcaattggataatgaattaggctgtaggacgggtagctttcacacaaattatttgggtacacaatttggtgctcaatctaaggctatttcaatgtgggatttagttaaggaaggttcaagaagagattagcttcttagaaatgtcagaatctctccaagagaaagagactaaccttactcagaggtattctttataaatttcaatttatttatcatcaacttttataatcccaaggaaggatcaggttggaaagaatttagagagattttctatgggaggagatcttcttgagaagaatgtccattttgttaggtggttaattatttttgccaacaaatctagttagggcttgggtattgggacccttgggactctcaaaaaagtgtgttactaggtgaatgacctttagagatttgttgctgagtaggatagcttttagtgaaaggcatagtagggaagtatgaggaaatgaatggggagcggtgctttgtagaaagttaggatgcttacaattgaagcctttggaacataatgccagtggaaacttcaatgtaaacatgttagttcaagaacacaaagataaaatatagtataccaaaagtacacgaggttttaacatggttcggccgaccatgcttacatccatggatgagagagaatcattccactatatcatagaaaatattatgaaagatagaaaccaaatacaattattaggctcccaaggatgttttaggaatctataccaattaggaatttgaggcacttcctaacatggaaagccataaaggtggaggttcttttttctggactagtaaattgtcaatggcctcaaagtcaagttttggcacacttcctagtgtgataaggatccttcaagaatcttttttgaggaatcttcaagttgacagttgaaaagaatgcttaggaggtagatttttggaatgagtattgttggaatcttatatttagaaggaaatttttggacaagaagttgataggactttgttttttggaatgatttctttgtttcatattttgatttctttatgtgtttgttgtgacttggaagataggttagtttgaatgattgatagaaagaaatcattctccattatagaatggctatatgtctagttaggggtaaggtttttttacttctttgcctagttttttaggcgttctgattgtatacttcgtgtgtactgttttcgccgcttctaggcgcttctaatacaatttctatttacctataaaaaaaaaatcattctctattagatcaataacttgtctttgaccccaaatgaaatatctaccttccttgtcaagctaatttggaaatctagagcactctcttagtttttattttttattttatttttattcaccaaaagcaacttgagagaaaactttgaccttagattgcctcatgaataggtattgaaatctggtcaataggattgtcttggctatgaagatcttaaatcaacagccaacaccttaatttgttgcaagtggacttctagactgtggtctacagtgttttctttatccaacgtttctttggtgcctttttatttggccagagatgtcctcctttgtgagcatggttcctttgttgaagctaagcccaagattgtttggatgttgtttctatcgtacattttttaaatcacttgggaagagtatataagaacatatgaagtttgaagaggtcttgcatggagctgaaagacatgctcctcaagactcttttttatgggttggggaagataaggctcttaattttttttttttcctccttttggattttaaagatagtatgggaataggttagcttagtgattttagctaatttttttagcattacttgtgtacattgtgtatacatgggttgtgttgtctttttttattaggctttccattaatacattttgtcctatttgcctatagaatatttatagaagtgacatgtactatattttgtgccttagtttccttaaacatgtgccttggattgtgtgttccacttgagccttgggagacctttgtgcccctggtgtgccttatgccttgtatagcccttgggtggtagcatcgtcaaaatgcggatgttgagatgagtgccaatgtaggaaaatattataataataaaggacatagctttgaaaattgaatagtaggtcaaggaaaactctaataagatggctatatagctatcctttaaaatgttccttgatgttggggagagaaggctttacaaatatgagatggaggcgtgtttgaaggatggtgctatcctacatctttggtgtttatggaaagggagaaatcaaagaattttctaagggtgaaaactcttaattttgaatttcagaagatattttctaaagttttgttgcttgcttacaatacctttggagaggggaacatgtttcctttgactttgtacatgtggtgggtttagggggtgagtgaattgaatggttattggattctggttgctttttccctttttcttgtctttcctcctctttttacttgtatgattctatggtactctatatattccatgtgctagaggataaactttttttggtgctttgatatgccaaaatgaggatgtctcatattcctatgactttgtacatatggtgggtttagggggtgagtgatttgaatggttattggattctgattgctctttccctttttcttgtctttcctcttctctttttacttgtatgattcaatggtactctacatattccatgtgcagtaggataaaccttttttggtgctttaatatgctgatgttgagacaatttacaaaaaaatgttagaataagaaattcatctgcttgtaaaaagttagaattagcacaaattgaggacaaaacgagggaaaatggtttaattatgtgtagcaaaaacaaattatggcaccaattagaaggcatttggtattgtaaagacgagggaaaccaaaaaggatgacttatgatctgaataaagatatagcctttgatttaataagcatgttataagagggtagtttggtcatgcacaaagaaaaagatgattatactagtcaagagtcatttagtttttgttaagaggcactagaagaaggggaaggtagaaaaaggatgcttatgatttattgggtgagatgacccatggtcatgcacaaagaaaaacatatgattatactggtcaaaagtcatttagtttttgttagaggcactagaagaagaagaggaaggtagaaaaaggatgcctatgattttatctggtgagatgaccactaatttcatagaacatgcatgttgtggtagtttggggtaggtttttttttttttttttgtttctaatactagaattcaatggtattattttgtcatttaggattcttttgctttattatatacatatgtaatgtgcctaagctagatggatggtttcacctaaggtaggttttggagtctcctatacgcatacaaaaatgactagaagccaatggtgccagttggagtgagataaagtaggaatcttttacttctccatgaagaagtggtaactgactggttcatgggagtacttgggaggccatgcctttgctcttgtatcttgcatcgtaataagacccatgcttctattgtatggagtggttagatcttgaccctatttggggcatcaggataggtttggatgatgatggatcagattttgacatctttcaagaattaaacatgggatcttgcactagaaataagttaccactcggatgcaacttgccaagtgcatgtataaggcttatttgttagaaagggctagcataaactcaagtcatttattccctaaggttcacctaaccgctttgaaaaatgaatgatttttgcaaatgctcacctaattgtagtgaaatcttattagagttcagtagatggatcttattcagccttgcatggagggttgccatttgacagaaattgatattatgcagttgacttacaaataaattacttgtcttatagagacactgctttgtttggccggtggagaagaccaaagggtaataaagtaggaattgtggtatatgaactttttgctcttacatatctgattctagaaaggaattgaaagaacttgtgaattggaagacaatgttccttgcaatataattacccttctttagaatctttgaagaaatcaagtggcagtacagggattaaataaggtattggctcactgaaggtcaggatagaattatcaagatattggctcactaaaggttttgccagaacttcatggatgtaccttatccaacaacatatccaatttgtatggaatggatagtgagtttttacgaaaattctttgggcattgatggattttctgatctatcagctctgaattctacagtgtgtttcccagatttgctcagacaacataatgaaaaagtgtccagcttacttgggaatctccaaaatgttgcaagggctttattcaagaaaaccattttgtcaatgctgatcacctaccatcttcttctgcctcgatcaggtcacaaggtgttcattccttatcattctcaccttgattacaaagttcaatatttttctggactgcttttacattagctggtacttccaaagcaaaacttagcttatgtttcagaagtaagcattctaaatcttaatgagttattgtgctctgattcatgctaagtatcttcttttagtgctttgcaagggtttcaaactgaaatattcacttgtaactgagttttgagaattaataaatattttatcttcagttggaaaaggaggctcttgttaagggagtgccaat

SEQ ID NO: 11174 - DNA, 5839 bp, Vitis vinifera
  Intron number 12 from transcript GSVIVT01018226001 (locus GSVIVG01018226001) derived from phytozome v7.0 (chr-ID chr 15; pos 12928943 to 12934781)
gcatgtgatattgtgaacaatgtgcttaattaattaccattcactttgatggatcctctcatataataaaatgtatccccaaaattacaaatacaagcctaaaatattattgatagggatgttaatgtgattgattttttcaggtacttatcccgcccactccctaatgggatgggttggaaatttaaataaacaggtttggggtgggtttgaggattttttttttcaaaacctaggacggatttgggacaggctcaagtatttgccttgtcctagagttgaccataactaggcacgacccgatgtttagcaagccaacgtgctaagctgacatgacccacttaaaaatcgtgtcagttaggtccgacccatgcaaaccaaataggtggtctgacacgatgcataagcctgtaggttaattgtgtcatgtcgtgtcgtgctgtgccgtgccatgccaatcgtactgtgctagtggtcactcactttgttaaaatttttaatttaattttttaattcattttgtgttaaacttttttttattattaaatgaaatttcttttttgttactttaaacaactctaataattctagtttttattttttatatttatatttatcaagtttgtaattgtaaagtttatagaaatgttaatttttttaatttattttgtgttaaacttttttcattattaaataaaatttctttttgttactttaaacacctctaataatcatacttttttattttttatatatatttatcgagcttgtaattgtaaaatttatagaaatgttaattttttatttttaaaatagtaaaatattatatttgaatttgttttttaaggaaataacaataaatttaaaataatggaatataaaaggaaattaaatataaaaaactaatagtgagtcatttacttatttatccctaaaattaactgttatttagttgttgagatgagtattatagatatttgacataaaaaatattaatagtgaatgatttacttatttattatttaaacgaattgttatataattgttgggaagggtaatatagacatttgacatgaaaaaagtaaaaataactattgatttacttttttacccctcaaactagttgttatatagttgttgagagagtattatagacatttgacatgtaataaaaaaaagtaaaaagtaaaaaaatgatatttgaaaagacaaggtgagttgacacgatggcacgacgagtagtctccttaagcctagcacgacccactcctttgggttgagtcaactcgacccaaccttttagtgtgtcatgccacaggccaaaatgagtagtctgactcgttggacaactctaccttgtcccacctcgtctcgattatatgtaaaattaatttaatttaatttttatttgcatatatatatatatatatatatatatatatatatatatatatataaaatttatcaataaaataagttattaaaaattataatattttaatcatttataaaatatatttattttaatgcaattaaaaaattttaaattttaaaaatagtacttttaaaaaaaataaaaaaatttcaaaaaataaaaagttaaatgagatggagataataattattttaatgagatggagataataattattttttaataaatgagacaaagttggaatgaggcggcacaaacccgtcctattgtcattcctctgtcaactacgtgaatttgaacactcataccataattttttttcctctgttttttcttattattatatttttattatttttaaaatttttaaattcaactagcagtaatcatgtaaatagatgataaaaaatggaaaaaaaatattgaaaatagtattactctttttttttatagggtacaaagttatctccaaatcaacttcattcattaacatttttaataaagtttatgatataataaaatatataaatacgaaaattaaaattaattaatcatgtagtcttttattatagttattgaaaaagtaatttaaaattttatttgaaaataatattttcttttcctttttgctcttgttaattcatgagatgaatttgtcttaaactcttcaaaataaaacattgacatctcttttttcatggcattccctttgaggatacagaatgaaattagcatcatattttattcaattaaatatcaactaataaaccctttttaatagaaaaaaaaaattactatttagccatgtgcttaatttagttgtcaccaattgtctcctactggtccttaaatattaatttccaaaatggaataatttcaggtgtttagatatcatttttttttccttacacatctggttgcatttagaaataatttgatgaacactaaaatttaagtgaatttataaataagctattaagatccatgtattgactgcttctacttccaacaaaaggaatgatattttattttctttatttttgaaaaaatgggatataataactttttgaatattccatggtatacaagagatctattcaaactattttaaatatcattaagcacattctatttgcaaataaatattattttgagaatgggatataaaaaaaaatagtttttgattaaaaaatcattttaaaattcttatatacacccaagaaatgccatggtatgaactaattaatgttgttcaacatagattttgaagattataacttattctgtcttggtataaactaagttttctctgataacataggtttaattgtacacagatgggctctcaagttgacttattattgggtagctaccaagcaaattttggcttgtaggtccactagttgaatcactaaggactggtaggcatgtgcaccatgtgtaacattggtgggtgtgtgttattttataactatatatatatatatatatatgcaacttgtgttttgacacttcatgtgcttataatcatgccttggatcaagattctattttgtcgttctatttttaatcatactaatcatattttaggtagtttttgtgacacataatatgagctaatctattccatataatgatttaatttcactactttataatggatataaattttataacttaaaaggttaaaatttcttgaagatgttataaattatgtttgattcttgaaaggcattaacaaaagaaaaaatatattaagggaaatgattttctaatatttaatttcaccatagaaaatataaaaataaataaaataaaatgtaattaaaatttatcaaagatttatatattttttaattatttaatttttatataataaagagaaataagtaaaatgagtttaaagaagaatataaaaataatttattaaatttaaatgtatttttttattttttttctttattttttgctcttgtattttttctcaatttttatgggagccaaatatacccgtaaaatatggatttgaaaattactacgaatcatcttttaatagaatttacaaatatcccatctaaataaaggggaaaaaaaaaaaactttggccattttggaaactaaacttttattttaaacatgcacgcatgccttttgtgtgtacgacttgtgagaaaagttggagtacgagtacgtagattctcattcatgtgtctttacgtctaaaattcattgcattgatggaagcatcatactgataatgccatgtggttgagaaagttggacacggtgaataagacttctgtgggttccactttttaaatggctcattgattctgattactgaaatatgaagacttaaacaaaattttatttaccacaacaagaaattaatactaatttagcatcttgtgttgtatggaaaaacgtagaaaagcaaaatattatatatataataccatgaaaatcaaataaaattatgaaaaagggatgtaagataaaagggaaaaaatatatttaaattgatataatttttacctcttttttacctttactcattatcaacctttttttaaaaaataaccctcctcacacgtcttcaattagtaacttactctttgtgttaaaagtgtcattctcgcttacctttttgacttaattttaggtagaacataaaattaaacagtatttaataagttaagtattaagttatttgtttttttaatattttctttttattaagtattaagaacttttaatattaagaaaataccaaatattttagttttttatattcaataaaaaaaatataagaaataagtaataaatcaacaaaaagtaaaaaaaaaataaacaatttgaaatctgaaaccaaattattttaagcaaaaagttaagaaataaacatcatctaaatctctctattttacaaaatacacctactttcttgctcttctttattttatgtttttatttttatcctttgtatttttcttcttttaccttttataaaaaaatatttctcaaattattagttttttaaataaatattaaaatattttttgtcaaaaaataataataatattttataagctttatcaatgaattataatattctaaatgaatattaaattatatgaatgaataattatttctaaatgaatgatataattataaatagtagtattaacaagaaaaacataaattgtgtattttttatcttttaatagaaattataaaatacggttttcataaagccataatttaaatttttaaataataataataataatattttagaaatgataataattaataataatatgttaaaatgaattataaaaacaagtgtaatttatttttgtaaatatatacataaatcaaggttttccacacatatatatttattatttaacccatgaaatactattatactagtttgatccaaaaatgacacttctaacatgagaagccaagcaagttactgtttaaagggtacctaaaaatgattactttgaaaagaaaaaaaaagtacatggacatgtgttttttttttttttcttttttctttatgacatttaaatcattttaaatgctagctgtgaatatgggagtgcatgaaatatgaacagaagtcagtggaagaatatttttttaataacaaaataaatgaagctaaatggcaggccaactcaaatcatgggagttcttagggggtagagaaagagggtcaagttttgaggactccagtctcaaaggaagggcatcatcatcttcataggggaccctacaaattgatttgaaatccatgtgaaattcatggggttgggtgaacctaaaatttgaggcctgccattaattcagccattcaaccatcagccatcagccattctttatttaagtccaaatcacatcactcaagactcatgaaacattgaaaaatagtgtggcatcaatgaatggtcatgtattgacattagaatacaccatataccctaacaaattgttatcaaacccatgcattattcttcaaatattgcccttatattgtggggccccctttgtgtctaggcccctgtcctttctttctttctttctttccatttttattttcttttctttttattgtgattgttttacgagggatcataaaaggccaacccctctatgtttttttttttgtgccaccactcagacactccctcttttaggcatacaccaacaagcctagcaatctctctatcatggaaaagctcaacatagagagtgatgctcaagacaatttcaatattctttcttcctcaacctccacttcctcttcatcttctttcccctcctcctcctcctcatcatcctcatcgtcctcttccaatgaattggttccctttccgggagggaattcagagg

SEQ ID NO: 11175 - DNA, 4758 bp, Vitis vinifera
  Intron number 2 from transcript GSVIVT01021495001 (locus G SVIVG01021495001) derived from phytozome v7.0 (chr-ID chr1 0; pos 6175950 to 6180707)
agcgtccggattaagtatccatttattatcttctggtgaaccaagctgcgaggaccagattccttattggtatccattgattcatcaacatgaagtgacgataagcccttcacagcacaaaggcttttccagggacaaaatgaggctcttctgctatggttgttccctctcttctattgatgagttactctaggttgaatgactagcaacaagctacagtcctcgctccttcgatcacaatatgctcagaacatagcgaaaagatacgaaataaaaacatgcttcccagcatgagtttcacctcaactccttcaagtgactgtaacaagtgacatagaaaccacaatcgttcatcatggcccaaatccttacacccatcacctgttcaaaactgctaatacattctcaatgccctgagcctattgaccttcagctcgtataatgggcaacatgacactatctcctaaaggtcctgatgccgagttcccttagaaacactccaattcgaatgaccagctcaaacaaaaaccccaacgctaaaaaaaaaaatgccagaaatagaagatgaaataaagaaaaaaaaaaaaaaaaaaaaaaaaaaacagagtacgtgaaagaagaagtaatgccatcaaatcccgctccatttttatgggaatcaaagagtttaagaaaactggtgggagagcttgaatggtcttaacatgtgagcaaatatcataaccaacatgcaactcaaacagggaaaaacagagaccaatccatatgggaaatgaggagcaccgggggagcgtgaggaggaaggcatgtatggaaaccggaacaaggaacatgagaatgataacggccatacatgtacagagatgggcaccaaagagaaatgaaaatgagaacagagcataatgtgcatacaaacgggttcaacccaaaaccaaacctgtggcccttgatgtccacagcaaacaataaatattatgcatatatcatcaaatggtgaagtaggcattaagaaatggagacttaccgcgcccgcggaagcttcttctgtctggttttttctccctctcgccaaatctcctctccttctgctctcgtcccctgcctcaagacaagcctcccctcctctctgcagatatctctaccttttctctttttttttttttttttctctctagcttcctctccaagccaccgcttgcctcctgccacccatcacatctggccgccccatgcagcttaatttccggggtggtcagaagaataaaataaaaaaaacaaaaaaaaacaaaaaaaccaaaagccctcaccgtatggggggtctacagtaggattaagaaagaaaaaaaatgggaagttagcgtcgggaaacacaaactattatcattataagaataataatctcggtgagaagaatctttgttttttatttttttaggttttgtgtgtgccgaaaataaggggtaatgggttggttggatattggacttgaaaattaataaaaataataatatttagttttaagttagtaaatgagatgatagtaataatagtttaatacaatcaatagaaagaacatatttttgaaggatttaattaaaaataataacaattttattattttagataagtagtcgtaattttttggaagtgttacaatttttatgaaaatttggaaacccaattattaaattgttatttattaggaagttaaaaataatataggggacaaaaatatcaatacagagaatttttattttaggattttcaaacttataattttagataaatatttaatagtaatagttcttttattttatattaggtggggagtagattcttcagtattatttttctccaagatttttgagtaattatttaaggtaaagaaaattaatttaatattataaaagaaaaataattttttttatgtgttattctgaaatatgtaaaatattgctttttttatatattataacattttttttgcttatgtcaaaaaaatgtggaaatatatgtttttataagttttgaataaataaaataaaatatttaattctaatttgtttgaccttagtcaatgagatataataatgaaattgtattgatttttttttattaggctttgaattgattcctcttcattgaccattttttaggtaccctttctttttggacattgttaaatgttagaaattaattaatgttagctattatttaattttgaagttgtttggacaaaagtatcttaattaatgcattagtttcaaagttgaaatttaaagattttttatttttgattttactattctaaactggaatttgataattagtaacttttacaaatatttaattaatatttgagtcaattcactctttgagcttttgagattaaagtgtgaaacaagcatcacaccttggaatggctcttgggatgtgacatcaaccttggcgggcgtgacatcaaccttggccttaaccaactgtttggaacttggaccaagttcaagttcaactacaggccttttaagcttctctaacaagccctgtagcatagacaaccgacttgtaagtagtacaccacttaagttactgacgctcatcctttttccagtttggcaaccaaatgggatgacacaatcatttctattttgtcttgaactcgacatcaatggaatgttgagtatcataggtaccaagtgcattcactgtttgcaattccaatcaatggaacaactagaatagaatatcttaccaaaagacaaaaggtagtggaggcaccacaagaacaaaaacaatgctgagaatttagcatcgtaggcttgcttggaatatcattagctctgctcacgtttccatggacttgctcctcctcaccatttcagcatctggacaaaggctatgcattaatacccgactcattcacagaattctactaaactcttttcgctgcatctcttgatgagtttcttctctaatagatggtagactacggagtacagagtagagagaatccccaacagcattgggaaaaagtaataaattcagttaatacaatatacaattcaagactaggatgatttgcaaagaaagacccattccatgttatgttttacttacaaattgttcaggaagaagaagtcttatctaaagttcaccttcccacatgaagcatcaaaagtctgatttaccatcttcacatttacagttagaatagtcaaggaaggatcctcaactttctttcactacagcaagtaaaaatcatataactattgaaactcagcatcgttgtacaaaggtaaaactccaacaaccctccaaggtacattgaactaaagagggtcgtgatttcgtccgggcctacagctagactgtgttggatgatcacatattcgtcatgctgaactacaagctgcaggcaatcagtgagttaaatcgatgattcaagactaatgtgctggtcaagagcctttacctcaaaaagtgtcaaaagacccatcaaatgaacaattagtccggctagctgagccttccaaggttgaatcattttgcatttgagtggtccaaaattggagcctgcctccctaattccacccattactcatttttactcgattgataatggcttgaaagtcctctttttattgtccatactattacacatttctttcttcacactttcgacatttgatatgaattttcccactagacgattccgcatgcatgcatattggtcgggtcagattgggttggttggatattcttcgaaagcacttcatcatatttaaacatagcttgatttagatactttttaatataattattattattatacatttaatgattcattaatcaaattgtggaaaattaacaaaactaaaaactcgatcaatgtgacatagttttcattgctcacatatgggttagttgagatgaccgactaacaagcatttacttaattaaaatctagtacgtaatttttttcacttttatccatctttgttaaaatttctaattattttatgtacttcccttctattttaccaactttacaaaatcattaattaagttaatttttatttatttatttataaaataaatgatgctcatcatatagtatagaatatgatgacaagaaaaaatactattgcttataggatagaggaaggagctgccccatagtcaacgttgctatgggttagtactactaccatatagtatagaatatatactcaccaaaaaacaattaaacattttgtttttattattaattactattttcatacacttccctctctttgctcattgccagtctatataaagagtggccacctccctctcttctcatcaactcctgaacctctcttcgccttcatctttcacagaaaaagttcaggttcatacttgtaaaattttctctctttttctatcaaaatgattatgtatatatattgcttctttagaattctgtgcaaaaactaactttctgggtaggtttgtttttgaattataacatgcaggcttcctttttatttttttaacctggaaaaatcagttttatcccttctccttccgtttgttcttctgcttctgcaattgtttgcatgtcttctctgtgaaattggagttggtctttttttaaatgatgggaaacaatgatctcgatatttctatgattgatagtatatggttaacggttactaatggtactgcatgagctgaagtgatgaagatgtttatatataaaaacaaatatgcagt

SEQ ID NO: 11176 - DNA, 3041 bp, Vitis vinifera
  Intron number 4 from transcript GSVIVT01028445001 (locus G SVIVG01028445001) derived from phytozome v7.0 (chr-ID chr7 ; pos 7681465 to 7684505 reverse strand)
taaatacatcaaattctaagaattgtaaagagaaggtttttcttttttaggtagagaagtggatgtaaagtagaaagaaatatttgaaatgtttattgcccttgagatctggctcaagtggtaaagggatggggtgggtttgtgggaggttctaggttcaagtcctaatggggacaaaaatttacctatatatataaaaaaaagtacttttaagaccacaatgcaataattttttttgaaaaaaataaaaatttcttaagaatgcacaacataatcttggagtgtagatatcaatattgtgtaaatattatatatcttaatgtaggatgcattgcatatgtgttatataatcagatctaagaaatataggcaacatatattgttttgtgtatacattgctactgtgattatatcgttgagagcttgtgctgtccaataattcttggcaagatggggttagggcaaaaatggataaatcggataaaatagtgtatctctttttaaccattttctctattttaattaatggcttttctacgggattttttcaaagctagaggagattgagacaaagggatcctatctccctcttcttatttgtgattgcttcggaggttcttagtagattgctcttggaagctcgggatgatggttttattttgaggttcaaggttgggggaagagggggtgggggtgaggagatctctcatctcctttttgttgatgacaccagtgtttgtgaagcctctaagaagcaagtcactttcttgtattggctactcatgtggtttgaaaccatgttggcattgaagattaacttggagaagagagagatcattctagttggagaggtggacagtttggaagatttggcttctgaaattgggtgtaaggtgggaaagttgtcttcttcttgcctagggcttcccttgggggtctcatacaagtctatggtagtttgggatggggtaaaagaacggtttcgtaagaggctctctttatggaagagacaacacctctcaaatgggagaagactcactttacttcgtagtactctagctagtttataaatttattttatgtctttgttcgccatcccaaaacttgtaagattgacattaaagaagattcaaagggattttttgcggggattagagaataaaatacacttagccaagtggtcttccgtttgtaaagcaaagttgaaaagaggactaggtgttcgttctctttctttgcttaataaggcccttttttgcaaattgtgttatggcttctctagtgaaagagatctgttgtggaagaaaatcaaaaagggaaagtttggagagaaagaagggggttggaggtcaagagtgatgagagattcctgtaggtcagggtttggaaagagattgggaagcaatgggatttttttaataaaaatattttctttgcggtgagtaataggagtagagtgaagttttgaaaagacaagtgatgcaatgaggagcccttatatgagactttctcctccttgtttgtcctttctgatttgaaggaggcatgagtaactaatttttggaagtagcgtggggaaggaggaaattgaaactttcattttttttaggaatctgaatgattgggagttaggtgtcatggagcggttcttttctaagctccaaggacagacaatgaaggaagacaaaatagtatggaaggaagataacaaaggggtattctttgtaagagggttttacttgttgttggagatagattgcaccacccttttcgctttaaagataatatggaactcatggattcctttgaaggtgagtttcttcacttaggaggcttgctgggaaatggtaccgactttggattagcttcaaaagagagggtggatgttgactaataggtatgcattgtgtaaaggggagttggagtccattgatcatatcctctttcattgtgacaaggcaagaattttatggtagttggtgttcaccatttttggtattttgtgggttttaattgagtcgattaaggagactctcttagggtggcatgactcttttgtatatagaaggcgtattgcagcttggagagccgctcctccttatattttttggatgatctagtaagaaagaaatagaagattctttgaatgtgaggaattgttagattgaaggctaaaaaatattttccttaacaatttctctatgtgggttaggggtatataggtagtggatatacgcatatggttgatttcttagattaattagggttttgatgagggagggagtatttttttgtgtatttcctctttcttatttttttgtctagtgttccttatatatgtcttgtgtacttttgtgtgctttatgcatttattaatacattctcttacttgttaagagaaaaaaaaaatcttactgcaattgtagaatcctattgatagtttgtaggatcacaggcttcaaggtacattaagcaaggggtttcagatattgcttttctttgtgaaaaattggctatagtaaatttcttgcaacctaagctggatatttggtttcaggtttaagtgtgatttttcaccatgaagatatctttgagatggtttttttaatgttgggacccattttgactgtgggtgatcattcccagcctaatggcatttttatgatttttacaagtttggacaatttggttagaaattggggttcacttcaaatagtggagagaattaaaattgggcttatatgtagtgtaacaaggttttagtatgatattaacgtaaatagccatctaaacattgcatattttgtttgagcctgcatatttttatttatagtaaactccttatttttaattatagtgttcttacttgatttcctattgtttgataatatttatttttttgacctacttcttctaccttctctgttttgggtgtggagatcttatctattaaacatttatttttaattatggattgtcttaactatagcttgtctttacttgtaggcacgtgtattggagagaactccctcactaagtga

SEQ ID NO: 11177 - DNA, 10627 bp, Vitis vinifera
  Intron number 21 from transcript GSVIVT01023143001 (locus GSVIVG01023143001) derived from phytozome v7.0 (chr-ID chr 12; pos 22040378 to 22051004 reverse strand)
atagtagctccaattcggtaaggttctcattaatgttagttctctgttagttttgtttatcatccctttgctatggtaggatacatgaaggcagtgtacaatgggcttttcttttatttgaactcattgtagcataaaatggtagaagcatataagctctttttcattcatcaaatgaatgtgaaatgttctatatactataagataatgtgtctgtgtatcattccacatacatttgtgcattgctctttatgtctttgtagttcttttgtgatcacatgcataggcaagtaaatatatatatatagattttgatagataaagaaaagaagtatataaagaaaagaggagacaccaaaagcagtgcccttagagtatatagggagtatacaagagaagccaaaaggctcaaaccattgggggagggatagaaacaaaaaacatcacttgcccttacttagagcctaactaatcaatgaaagcttacaagcgaagaagggctcaaatctatagacaccctaacccaagaccaaaagttacatacaaaatagtttttcaatctttggagtgaaagctccttattaccaaatgctaacatattcctttccttccaaactgtccaaaatatgtataagtgggctatttgccaagcctttttacaagctttactcacaaacgacccatgccacccaagaagagtttccttcaccaacaagaaagaatccaagacacaccaaagagggagaagagtagattccaaagaacccgagtctttacacaatgaagaagaaggtgatccacccatctctacttcagagatgcatagaaaacacctatttgccaaaaagtgccccctcttttgaagttggtccaaagttaagacttccccaagaagcctcccaagcaaagaaagccatcttaggaggctcactcgccctccaaatactactactagggaacaaaggagaatcttcgggctccaagatagaataaagagacttgaccaaaaaggtcccacacctcgaagttgtccaaatcactctatcttccacctccttatgcaccttaaaagcttggatcttttacagaaaacgctccaccaactctaccttccaatcattaaatgcccttaggaaaagaggggtctatccacccccatcaccattagggttccaaacatccgacacccaaacttccttaaacgaagaaatggaaaataaggaagggaaggactcacaaagtgactcatctccacaccacttgtccatccagaatctcattctctgcccattatccacttggtaggccaacctaccactcaaattaatccactccttcctaattgctttccacaatcctacaccgtacctctcactcactacacgggagcgccaccccctatcctcttcaccatacttgtgactgatgactttcttccaaaaagcctctcttccattgggaaactaccaattccacttgcttaagagagctatattcatcagagatagatttcttacacccaaaccacttttccttttttctaagcaaaccgtgttccacctaacaagatgcggtttccgcacaagagctccaccagcccaaagaaaatccttctgaatcttctccaatctcaacctcacttttcttgacatgcaaaaaagggacatgaagtagatagacatgctagataaagtgcttcgggttagagtgagtcttcttccttttgagatataccgtctcttccacattgctagccttttttgaaatctctcttcaacgccatcccacaccgacactgatttgaaaggggcccccaaaggcaaacccaaatagcaggaggggagaccacccactttacacccaactccaaggccaagtcctctatattatgcaccctgcccattagaattaattcgcttttctccagattgattcttaaacctgagcaagcctcaaaccacatgagaagctggcttagataagtcatctggccttgagacgcctcataaaacaccaaagtatcatcaacaaataacaagtgcgagattagaatctcctcaccactcctacctctcactctccaaccaaataagtagcccccaccaatagccctcctcaatagataactaaacacctccatgactatcacgaacaaataaggggagagaggatctccttgtctcaatcctcttgaactttggaaaaaaccagaaggagatccatttactaaaacagaaaatttcacagtggagatgcaccattctatccatttaatccatttctccccaaatcccatctttttaagcactgcaaataagaacttccaattcacatgatcatacaccttttctatatccaactttcacaacacatcaccttcattgcttttcaaccttgagtccatggcctcatttgtaatcaaaacttcgtctaaaatccgtctaccctccacaaaggcattttatgactccgaaatcactttgcccattacctttttaaatttattagccaacaccttggccaacaacttataaaggctgcccacaaggctaatcggcctaaaatctttcatgtcttttgcacctcccttcttagggacaagaacccagaaggtagcattcaaagactttacaaatctgcccccctcatggaagtttctaaaaaaacccaaaacccaaaccttcacaacatcccaacaaaaaagccaaaatgccatggtgaagccattaggacctagagctttgtccttgcctagatttgagagagctgcaaacacctcttcttttgagaaaggaaggtccagcctctcagcctcactgctatctagtcccataaaggtcaacccatcaatatagggatgccaccccccttcttctgaatagaggttatgaaacggcccaaccgcactatcttttaaatcattcttctcggtatgccaacaaccattcactttcaacttggacaaccaatttcttctactgtgagcattcgccatcctgtggaagaatctggtgttagtgtcctcctccttgaaccacacttccctagacttctatttccaagagatttcttccctcaaaacccaagtcttataagactccctagcctcatttctggcttcacattcttccagattcagggctgaaaatttctccttcttgtcccaatacacaacctagctgagagtttctccctttttagccttaatgagattgaacacttctttattccaagtcttcaagacaacttttaaggctctcaattttgcgtttaaaacaaagttgaaggtcctagtaaaattaaggccccgccatcaaatcttcacctgatctttgaacccctcctccaaccacatgttctcaaatctgaaaggagatggtcccctcctcatacctcctctttctagcagaatgggaaagtgatcaaaaaccgatctgggtaaaacaccctgcacaaacccattaaataagttgtcttagttatttgtcactaaacactggtcaagcctggattggaattggttatttagcccacccctccaagtaaaaggacccccttgaaaatcatgtaatacttttgaaaatctcctcattgttgcagataaccctcctcccctactacgttctccgggaaatcttatcatattaaaatccccacctacacaccaaaggtcactccataaacctcttattgacccaaggtcttcccaaaagcccccctctttcccttttgcacactggacgatacacatcagtaaacacccaccaatgataaaaatattggtaatcacagatatatcggtacttggattttatggatatatcgatacttggattttacgtatatatcagcggatattttgatacaaaatattggtaaaccaaaaattgatcaaaacttatgaaaatgtaacaaaaaactcttaaaaatgaaattagaagtataataaacattttaaaattgttttgatgaagaaattgatatatgtatgatatgatttgtgatattaaatttaattatattgtgtcggtcgataagaaatgcgaattttgtgagtgtacactcattatgaagttaaattattacgaatatactaattatgtgattcaaatatatattactatgctaagttaatttacttacatctattgaaaatatattaattaattataaaaatgtactaatttaaattcaatactatactaattaaaaaatgtactaaattaatttattctcaatatgctattattacacttgaatatcaaaataaaataaaataataatttaaaactaaattattgcaaatgtactaattatgtgatttaaatgtatttatgatttttatttaaaaatattggtacattttgatgcaaaatattttattgaaaaatattgataattttatttatgattttatatttgttttatatttaattagtatacaaaataaattataagataattaaaattaacttatttataataatttatttattttatatttttacagatttcattgatatatctctgatatatctctaatatatccgatatatctccgaaattttaacgatattttcctatttagggccgatattttgtttgtatcgccgatatatccgtgattattgatatatcgtcaatatttaccgatatttacgtcagacgatatatcttacttgtatatcgtatccaccttctttgatacacgatttaccatcaatatatcctgatattttcatccttaacactcacacaaccccatccacacagttcttagaatgacatgaaattgagtattccccttcttccaagtcaaccaactcgaacaccctattatcccaaaacaacaaaatgccagtagttgcacgcaccccttgaattgactgcactctagtctagatgtcttcccaccctaaggctacggacaatccccatagtcatttctttaattttggtttcctgcaaacaaaccacgtccaccctttgagattttatcattgacttaattatcttccttttatctctgtcatttacccttttcacattctaggataaaattcttatcttcatttgcacctcgacatagaagccccttcaaaaatacccaatcttgtatcaaccttagtttttttatagatcactgtccactccaacttcttggcctccctaacagattttaaagacggtgatttcatctttctagacgccccatcttgcccctcgtggtcaattctccccttcatcctcctcaaaaggtacaaaatttcctcttcgaaaccttccgttggtataccaaggcatcaattgaacttcgtgagacaactagagttccacccttcgtcccacccctcctcttctaattgaaaatcagtcctctccatcattggcctcgcaaaaactgatccaactgggacaatcgcgagctcagtcgcaccatcactgcctcccgatccacaaggaagctctttcctaccatcgaggaccaaaatatctttagacggtactacccgcagaggatcccatcccatagccactgccactgagccttccgacccattggaaggcccttctgacaccaacaaagcttcgtcgggccccaagaaaggaatagaaatagaatcacctcgtaaccctggagaaaaaaaagagcggtagtgagaaatgaggtacctagaggtttcatccattagcacctcgtcgatgagagtcagttgaccagggaacgacgccccaacgttaaagtcttcgtcagccaacaattcttgctccatccccgttgctcccgttatagtctttgggggagccctaggggaaaatagctgcccaaaaaggaacactgggggatgggcctcttttaacttgggcccaataggccccttaaagctcttaaccaggcccacacccacaaggctgaatgggttagagcccatagcccagcccgctccacttgtgggcttttcttgaacccactcacttgagcccaaaacttcttttcctttattctccacacagcccactgtcctagactcaggcccaataaaatctgagtccaaaacagtacccttagctagcctaccagctgcacccctattccttcttccatactcaaactgctcctctgacccccaactctgaatgacatgttgagtctcccacacgcttccaccagcgcatgtgccacccacaccttcatccctaacctcacgccctgcacttttgcaaaacttagaccaaggcactaccttagaaacccatggaggggtttcccaccaaagatgaaccgcaaaacaagtatgcctggccaccacttgcaatgaccctggcatatccttcccagtggctctcaccaagatacatgcccattgtagctgagaaaaaagagctgtttcctcatctacagctataaaacccccacagctctccccaatcctcttgaagatcctctgctccaaaaatgaagagggagtcctacaaccctcacccaaacttccttggcatggctcccattacaaaagcacctcacttcaggtccccatctttgcaaatgaaactctctctccttaaactgtctccttagattatgcttattaggcaaggaaaaaaagagaaagaaaaacaacctccctctaggcctttttccgcttcttccccataaaagagccatggtatcttagaaggattcctcttatagaggagtacatcacccatgccactttgaatagagaaaaaaccagctgccgcaatattcttgcgatgaatagtgaaggggcaagtgttggactgattattcttcccttttactcatgtaacatctatttgaaatactccatcctctccttctaagtgggtcaagcgttaagattcttcctcaaatgactcccctatcaaagaagcccacttttgttgacacccatgggttccaaactatgcttgtaaggaatgatttacttcttccttgagctaagtgtagaaatatttgatagagaaattgcctttcgagtttccttccaacccaatctatcttcaacatcttgtcttaatgaacttgattgtattcttcgaaataaggccctcactccttccaatccccaatcataaagttgtctatgaaagcggagactccatcgagcctcctccccagtttgctctcaaatttctgctacctaagagtttttagcaacaatgacagagaataacagcagaaagtattcttccatagtactttcacctcactacctatgtttgtagaattttacccttctgtaatcatccataatgaaacaagatctgcttctaaaggtctaccacccgattttgataaacttccataaccccaccttgtagccatccttccctacacctgaacatcatcctccttcccttgcccctaattttccttctatgatccatttccacaaagattccctttcaatagcgaacctccaactccattggctaaggagagtcttgtttagaatataaagattttttataccaaggcttccatttttctttttaagtggatagtagaccaattaaccaaatgttgctttttctctaaagctccccgccctagtggaaatccctttggattttctccaatcttaagctcacctttttgtgtttgacgaacagagacaaaataaattggcaggcttgagaatgtgctgattaaggtgagtcttcctcccttagagagatattgcctatttcacaaaggtgagttctctttgaaattcctcctccaccaaatcccacttcgttgatttgtgaggagctcccaaaggaaaacccaagtatttggtggatagagttgatagactccctaccatgcaacccaacattggagctagaccttccacattcacaacttcccctacaagaattagttaaatcttttccaaatttattttaagattggaaattgcctcaaaaccatataaaaggccacctcatatgctacaaatgatcttgattaggttcacaaaaaattaggatattgtcatcaaacagtaaaggagacacttccattcccttatcgcctcttcctcccactttgaagcttgtagcacaccttaaattctgactgaaagccttcatagccaaaatgaagagatacagggaaagaagatcttgtctcaatcacttgaagctctagaaaagcagaccccattgactaggacaaaggattttgacatagataagcaccatttgattcatttcacctactcatggccaaagcccattttatctaacaccactagcaagaaatcccaatttacattatcatatgccttctcaatgtctagcttgcaaacaaacccactattggaattctttagccttgaatctaaggaatcatttgcgatgagggttgcatccaaaatttggcctatcctccgcaaatgcatgttaataaacttaaatcactttccccacaaccttttttaagactattatctaggacctttgctaggagttgatttgccccccaactgaaatcttccatgtccttttttgcatggcttctcttcgggactaaaaaaaagttgcttttaagtttcttttgaaagtgctgttatcggagaactcttcaaccccccaattgaaaccttttaggtccttctcaccacctctctttaggactaaaaaagaatagcatttttgtttcttttgaaagagctgttatcaaagaataccttgaagaaacccatcaccttagattttgatgaatcttgactcatttactaaaatgctatagtgaagccttttgacttgggaactttgtccccacacaaactggataaggcggttaacacttccttctcagtgaaaggaacctcttaggttctttcatccctgttttccagcacttcaaaagtcattccactaatgttgggcctccaattcaccacttctgatagtagatttcggagggccttgaagactaccttcttatatctgcatcctcaaacaatcattccccattcactccaactttggacataaaattgttcttctccatatgtttgccatcttctgaaagaatttggtatttttatctctcttttaaccaaatttctcaactttttagtccacatagtctgttctaaagaagcccacttactgttatcaacagccactagccttcttgcctctaattgttcggaaataggttttctattctctattttgaatcccaaaagctgatctgattgagggcctcaaattttttagatgtgacattcccaaaaacctctttattccaagttttaaatccagcttgagagccttcagctttgctgccaacatgagactaaagaagccattcgcaccataacttctccaccaaatcctcataatatctttgaagtgttttgattgaagttacatatttttgaaaggaaatttgccctccatctggtataatggaacagtgatctgaagttggtttaggtaaaacactctgcgttagataagaaaaatgatcctctcaatcatccaacactaggaaatgatcgagtcttgaagaagactgcaaattctaaccacaacacaaggtaaaaggtcctccttttagggggagagtccctttagttcaggtcttctatgatctccggagagcacctcgtgttggaagacaatctaggtcagtttctcctttgcccggggaatctgaccatattgaaatcccctcctaactctgcccagaaatcctctcagcctactaggacatatctatggccatttattttatttcaatagcattttatatcagaaaatttgctttctaaagttgtataaaaatattaaattatttcttgattcatgtatccttaatcactctgaagttggggttggtaaaaaatgaaggatagcttctacactctaattgtctcctagagtaggcatgagaattcaaaattagctggtttttgtaacaagttttcattttgtcacctcctataaagaatgaacaagttttcttgtagtgaccatttcagaagaaaaactgtctgctgtttaatcacattggcttaggctagaagtgaatttcaaaagattcatgccaatctcttgagaggttctccaaggtcagattttgtggtggcctggactgcaatcacaacctcaatctcaaaatcatgctggccttccatttctgaactgcaagcactatctgtgtgctgctttgcttcagttttgactgcacttctgctagtaagcagagtgaaatatttctgctagaaaattcgtgattagttatattattcacttgcatgtttttctttccacatacattcttttttttctcaactgttttactatttaacatatggaacatagtaatatttctggtggtgttatacataaaatgtttctggaagacttagttgctgcaggatctttcttttcttttctgttctttttttggttttattttttataattttgattgtccaacttaaatgagagtttgaatgtttccttgatttttgttgctactacttttgtcattattttttaggctagatttttgcttctccaaatattgctttgtataactgcttttgtcattatttttttaggctaagcaacatcttgccttgctctgcctgggaga

SEQ ID NO: 11178 - DNA, 6962 bp, Vitis vinifera
  Intron number 9 from transcript GSVIVT01037155001 (locus G SVIVG01037155001) derived from phytozome v7.0 (chr-ID chr1 8; pos 28519105 to 28526066)
gggtgtctcgttttcttaactgggaaacctaagtttgtttggattattgaagataatattcataaaaagatcagaaggtctaaaatgagcacttgcaagcaaggagcaagaagaaattaactcgttccactcccactttattatgtgttgcatattataaatggcctttacattcttatgttggcaaataatctatattgtcattatacaagtgcaatcttgtttataaagttaaaataatgttttttttccttattattatcactattattattttggttttgtgataatgcaatatcattcattcaatattttttcaataaatgtggtaacttaaaactcaaaaagtaattgtcatatcttggaaaccatacactaatgaataaatattaaagagttagaagacatttgaatacatttccattttttataaaatagagggtaacatcatatgttctactttagttgcccttgatcactttttgggatgatagtcagtcttctcaccaatagggatttggatgagtgagacctcaagttcaaaccaataaatgattcaattcctccaattgacatggttccaactgatcgatttgttgttcctaccttccaaaccccaatcaatgtaaggcaaagttaaggagtgccttttttctcaagccaacactcaaatgtgataatccataggaaagaaaggctgatttttctagtatgcctaatcgttaacccttctctctctttctttaattaaatcctttggctccttcttttaaaaatagttgtcctccatcctcttgtaaacaactatttagtcttttcattacatcccaatttatttaagaaccttaattaagaaaagaacaataatcttgtttatatttcaatatgtatagaatggattattttcaactagtatttgtttttattaaaacatgtatgggagccaatttgatcatggcccaagtttaggccacaacaagatagaatcagtgttgcaaccaaagggccgaagctagctttaactaaaatgcttattattctccttaggaggtgtagcataggatgacaatttcaatcaataactttcttgaacttttttaaatattattttttatacatcattacaaagtaatattagtatttcttgaaagggaaaattaatgattcaaaaaattaaaattaaataccaaaactcataaccattttgtttaatcatgaagtctcattcttcttttaatatatatgtaaatatttaaaatatttgtgaattactataattgaaaaattattgtatcttatatttctcacatgaacatcatagaaaattgtccttctaatcaattagttaatcaagttaatataattatagtacttttatccttgtgtcaatagacatctcaatcaacgtattcattattataaacttttaaattattttggaagataggttattgtgcttttttcttctaaattatattttttaatatttttatttatttatttattcatcattactattataacaatttacctaacaaattctttctccttttctttatgtacataaaaagaaaataaaattaatcacatagtctagactacttgtagttcctaaaaatttcaaagaaataaaagaaaagaataattttttctgttatttgattatttaaagaaaagttcaagacaaaaacaaaattctaaaaaaatatacttatatatatatatatatatatatatatatatatatatatataaaataagcatgtgtatgtataagtgtttagttggatttaggaatgtggatttggatttgatgactcagtcaaaaatatatgaggaggaaaatagattcatatctaagtggaaaatagactcataaatgattgaagaaggaaaataattaatactaccatataaagggctgagaatttaaaataaaaataacaattgtatggtatataaaaatccggtcaatgaaaattgcacccacaagcgtgtgtgacatcacatgcatgacatggaaaatggaaaatggaatggtttgaaatactcaatcttgaagacggggaaaattttggcaaatgagttcatttttctaagtcaacaaaaatattctatcccatgatgtaagcttaagtggaatgaaaattattataatattaactattctccatatagtgtaagtggaatgaaaaagggatcattgtgttttggacataattggatccaaaaattaagttttggttcatataagttcaccatttaagctcaaaattgagaggaagtgtgaacttaagaagaagaatatatattttttatcttttcaaaaacgacctttattgactatgaaaaaaaaaagcagtaaaacattaatttaaattttatttcttttgtattttttaaaaacaggtttcattaaattcatttttggatggtaggtaggaagtcctttgaaccaccatgaccacaaaagagagaatgttcattgatgggagaatgtatgatccattcaggggaaagaaaatattttttgttcttaaaatataaaacattgtttttcaaattaaaaaacatgtttgataattttttcaataaaaaataaaattttgagaactttgtatgaaaatatggtattttttattattatatttttatttttaaattattttcattttttatagggttgttttaaaaataattgcataagtataaagaatcatagataaaagttattttttaataaatatttgaaaattcaaacaacatgttaaaaatcatttcaaatttttaaataaacttctactaaaaaactattttaaaaacgcattcccaaattgaaccatacattaggtacttatgcatagccatatgaaagtaagaaatgatcaagtccaatagcttttttaaggataacttaatagagggacaattgagaagaacaagtccaactcattattccttcttttcaagtcatgagcaaacttgtgtctagagcaatattaataataataataataataataaataatagattgcacataattttgtcaaagaaaatttgtcctctccaaaagtttatattgtaatttacatataattataattgtgcctcttttaatctaaaatttattcctttatatattctataattctagaattattatttttttcctccaagtaatctttaataaaacttccattactagtacactatttttgtgtattaaaatcatttcataacaagtgcatagcaccattttactacaacatttaccatatatatttagcaataatctttggtcaatccacaatcatctcttggatttggagatgatgatccaagaatggtggaggaacaaggttactcattgctaatttaattggttggtgaatgatgttttgaagtgatttcaaattatgatgtaggtattattttttagatataatctagaaaaaatatgattttattatagtcattgtttttaacttaatgagacctgaataggagtgtttttacttttttgagaatttattttcatggtataattatttttttcatatttcgttaaaaaaataaaatgaaatgattacatgagaactcatatgaaaagaatttggtgggcattcttcaaattaacagggatttggagaacacttcgatccacctgaggtggaataagtaggaaacaatcattttctaaattgatggtgatgattacattaataaattaatattacttccaaagtagagaaagtggatgctttctttatcaaaagcattgttagggctttcactttagaaatacaggataatcataatgtttcataaagcaagagtaattaaatagttccttgttatgtgttttctttgaaaatgacttcaaaaaaaaaagaaaaaaaatgaagattaggtactttctttattccaaataattactaagactagatattattattttataacttaaatatttgaaaatatattacatttgatattgaaatgatcagctacatggctctaaggtatggagtaccttctaattaatatgtacaatatttatgatatttctaggggagatatttcatgagatgtcataattcttttgtaaatgtttatttatacgtgttttatttagaaaatgttcaaaaataaatataaagattaaaacaaaacaattactatctctgaaactattttatcgagcccaaaaccattctaaaataaagcgaagagattgaactaaattaaaaagtaaattaatttataccaaagtaggtgggtacttgaatttgtctagatttgaaaaaatggtatggatattttttccaaagaaaattaaaaccacatggcttgtaaaaaaaaaaataagataaggttggttgctaaagaaaaaaaaatggaagaaacatatgtattaaggatttcctccggtagcatattgatagttttttaatagggaaaatcatctaaccatacatcaactataaaaaatatgagattttggaactttacttttttctttttaattttggtgtaaaatgggaaaaaatattatctattcatgtactccaatagtgctttcaaatttgtttcacaatcacccttaaaagtaaaggacaaagtacacatcaatttaataccacttgttaacaagtacatgtgtaatttatttttattgtttttctcacagtaatatatctcccttatcactcgccaagtttccatttttttctttattttttccttaactgccaccataatccattgttacctattatagtttttattattattattattattatttcctttatattctttttaatatgctcttgcattttctcataaaacttctttaattttaatttatttttactctataatttgtctatatttattaattttaattattttttgacatattaaacttaaaatgatcatatataataaataattaatataacaaattaaataaaaacaaaatatataatggacaaaaatgaaaatattatcccacaaataataatgattttaaatattaattataataatatattttataaattaaggtttaaatttaaaaattctatttcattatttagaagtttatgatataagattttttatattaatactaaaaaaaagatttatttattttgtaaattctatcacatgtaaaagtaaaaatatcactgtaatactattttattatttacattatttttcttttaattttcattttaaatttatcatatcaaaatcacaataagtgatggtgcttttatcatttttcttatgattttaaattgattatggatctaactttttttggttaaaatctttaatttttaattaaaataaaatataaaagaaaatatatttttcataaaaaaaattatatttaaccttttatattaatttcataaaaaataggtacatctttaaaaaaaaaaaaaaaaagataaattaatgcttaggagaatcggaaacactatcatacttatcatggtgtatatattcctttgggacccttgataagtaattggaggtttttgcccaccccaaaaagaactttgggatcctaggtatatccattcttagaggaaccaagacccctatttcattttcatggttcatatattcctttggggacccttgagaaggaattataggttattccccaccgtaaaacggacattgtaacccaaggtacatcctaaagacaatttgatacatcatttacaaaatttggtacatatttcataaaatttgacatatccttaaaacaattttgtacatccaatccatgagctaccaagacctctatattattacccgtggttcttttatttctttaaagatctttaagaagtaattagaggtcgttccctactccgaaacgaactttggaaccctaagtacacccttaaggaaatttggtacattgttaagaaattttggtacatccaatccccaagctatcgagacccctatctatcttcttatggttcatattatcatttgaggacacttaggtactgattgaaggccattccctacattggaacgaactttgtcactcttggtacatcctttaaaaaatttggtacatccttaaaaatatttggaacatacttgagctattgaaacctctatcttattacccatggtccatttattcctttaggggtctttgggtagtgattggagatcgttccctactccgaaatggactttggaaccctaggtacattattgagaaaatttgatacatccaatctttaagctaacgagacacttacttccatttccgtagtccatttcttcctttggaaaccctcgggaagttattgaaggtcgttccccacctcataacggactttggcaacattggtacatcatttacaaaatttggtacattcttcacaaaatttggtacattatgaaggatgtaccaaattttgtgaaggatgtaccaagggtttcaaagtgcattccgatggggggattgaccctcaatcacttccttatgggttccaaaatgaaatcatgtgtcatctatattcggatgggggacccagaaacaataggatcagatgtaccaaatttaatgaatgatgtaccaaattttgtgaaggatgtaccaaatgttccaaagtgcattctaaggtggagatcggcccctaatcacttccttatgggttccaaaatgaaatcatggatcatccatgtttagatgggagtcctggaaacaatataatcggatgtaccatttttctcatcttcccgttctctttcaattgctttaggaagaatgatgtctaaactcctcctctttttttttcttttcttcctctcgtcctctcagcttctttcctcatctttctctttctctaattccaccaaactatgcccgcatcaccaagccttgctttgctccaccttaggcaatcattttcta

SEQ ID NO: 11179 - DNA, 12808 bp, Vitis vinifera
  Intron number 3 from transcript GSVIVT01023032001 (locus G SVIVG01023032001) derived from phytozome v7.0 (chr-ID chr1 2; pos 16591982 to 16604789)
tcggcaacatccatatcccaaattggagccggtatgtataagcttcaatggaaacaaataatcattccaacattacattcttataatgcatccaaacataagaattagaatcaccaaatctatttctattcaagaagatataggaatgaaaacaaagtttttattcttattcctcattcccatatactaaacatggcttgagggcaatggactgatttcaatggtatgtatacttgtcttaaatatttggtattagcaacttgccctatggtaaaagtgtggtttgggttgagaatggtataaagatgagcctagggttgtcaatggagcctgcaaatagctgttggatttgaaggttgaataggaatttgcacaagaaggttttgggaggtgagaaaatgaaaatggatgttggtggaactgagagtatgaatgtcttatgtactaaatttagtaacactctttcaaaatatacaatataaaattaagaaaataaaatttaattcaatatctgtaaaacagtattgggagaccgcatattggacgttgttttcataatcttgtgtttgtcctaagtcttaactcttaataggaaaaaacatgtttttgatggagtatattccctgcaatgaggtgtacttgtccttaacctcctttcaaagtcgaatcaaaaaacaatgttaggaatcaaaatcgaatcaaaaagagggaagtgagggtttagatattatcttgtccgagaccatccaaccttgattatatataaaattaattttaaaaaataattttattgatttttttctattatcatttttaacacataaaatattaaaaaattattttttaaataaaataagttatagaaactataatattttacttatttataaaatatatttatttttaatataatttaaaaattctaaaattattaattttttttaaataaagaaaatacaatgagtatggtggccatgaaaattactttgtataaatgtgataggattgatatgggtaactcatcgtcaacccaactaatcatcatccttacaattaaaattttacgtaaaggaagggtacaattggtatttttatttattataaagaaagtaactgaaatggcttttgaaacccgatgatatccaattggagataaattcccaacttcaaaattagtaaagttaatttttttttcttgaacaaatttaggaactttatgaatgtcacgttgttgcaagtgtttatactataaaaatattcttaaataattttattggtaaacatttttaggaataattaaattatttttaataaaaaatcttgaagtaataacataatacatcgaatattaattttttaaatatatttatgtaaattatatatacttatttccatccattgaagaaattccaatgttagtggatgggtgaaaaaaatatgaacaataaaaaaagaaaaaaagttgataataacaattgcataactaaaaaagtatttgcaatttagaatcaatcatttgatggttaatttttgaaagatattagaaagattagttttgaagattattgtgacttatttttcaattatatttgtaggtattctacttcgtagtttccttttaaaaaatgataataataataataattttctcttattttaatatctttggtacaaaacaataatttgatttttctcttatttttatttctttgatacaaaacaatattatagtttatatttggaccaccaaaatgcaatatgatttagaaaaaggtaaaaagttttttttataaattaaatttgtattatatttatcaacattgtaagttctaaatttgttatacttcaaatatttttcttaaaaatgtaatatattgatcataagaaatcaagattaaaaaacctgagaaatcaaatatttttcttaaatatttgttggtgacaaaaaaaaacaaaagaaattaaaaattaataatagaaaaatgtgttttgtattattttatatgaaataactaccattcattagcgctagttccattaaatgctttattatcacacacttaaaagatgtttaaaatcacattattaaaatatatattttatattaatttgagactaaaatccatctttatttcaagtacctacaaactaggatccatttttttaaaaataatttttatttatttatttttattttctcttttaaagaaaatgatgtaaacaaaactaaatgttcatatcttgaggttatgtttgatatgtgggaatgaagagtgataatagatatcttattcattttcacatttatttttatatttagataactcaagttacttataaatgatatttcaatttatcctatgaggtattttgattctataaaacaatttgtttttaaagatatttttcaaaaatttaaaaatctaaaccttttactgataagttgtttttaaaaatattttattttgattttataagaaacgaattgtaaattcaagttatataatataaactaaatttaatttgtgccttattaaaaataaaaaataatttgtatttataaataaattaaaaataaatattttaaataaaatattaatagtaatattataataaaatcataaattatatttttttaaatattataaaaatatgataacgtaattgatttattttgttaataataataataataataataataataataattcaaaattaataattgctaatactaatttattttaaatgaatttaaaattaaataaagtttaattttttaagtataaatgagtcaaatttttcattacatacatacatttaatactcaaacatggtattcttaaattttttatttaatttataattaataaatcagttttttgaatttcaaattattattaaaaattaaaatatttattaaaaaattcaaaatattaattatttccattattttttatagtccttatatatattttttgagtttcaaattttcttttaaaaaattattaaacttattaataaatttaatacaaagtcttccttaatttgaatttctagtaaaaaaaaatggttttctattttgctttgtttatagagcacgataatcaaatagtggtacaattttttttaaaaacaaatttgtttgtaaatcatatgtgcaaatagtttttattatttagcaaaaacgttatagaccctctattttggccctaacacacacacacacacacacacacacacacacatatatatctatatatatatatatatatatatatatatatatatatatatatatatatatatatatatatatatatatatatatatatatatttattattttttctctcaccccactatttttttagcatgtatttagatccatttttgctcagtttttcatcatcccggtccatgtttcacattattgatttttgagctatattttggagaccatttaaagggttatttcaggtcctagcatgattaccggacgcccattaggattagtttttttttagggtttgcttttggaattttagagcctttgagtagttgggttgggatgaggacacgtgtactcattctagccttcctttgtctcttttaaaggcctttttggcctttagtgaagggtttttttttttttttttttcagtcttttggctcaagttttcttggagggggtttgctagccaccttttaagggtagtggagatgctctctatagctaaggaaaagggacagagaattgatttttatagcgagaatgagacagagagcaaggggtttaggggagtttttgggaaaagtagcagacgaagaaaagttgtgggcgaggcattgtggtggtgagtgggctgcagagtaagacgttgcagggggggcaccatctattatgatggggagtcttagaaaagagggacatgagctacaggccatctcggggaggcattattcttctttattcttggtgagagtaagagaggagacgttagagagagtaaaatatctttcttttggtggtttttggttttgagtagaggagaagaatagcattaagagaagggaagcagatgggacccttccaggaatggatattttgagttccctattcatcttcatttatcataattgttagggtgaattcacaatatttcaacacacaccaggatttttctaccatttctttgtgtaaaattaaataggtaatagcaactagcagtaataaataaataaacttatgcaatagaaaaataaaccagacaccaaaatttttatatggaaaacccctcaatgcgaaggaaaaaaccatgggacctagtctagttcaaactccactatcaacaatattgggttacacctgtcttctctagaataatctctagaggctactaaatacatcaagagcatatatagccttggattatataatctttcttggtaaaaaaacaaggaaaaatggagaaagaacacccaaaaacacgttgttactgttcatgggcaataacaccagttcccgagctcaaaatctgatctccaccttttagattgtagctactcgagttttgaacctctcctccaaatttcaactcgatcgaaccatagatgaagcgggattggctctttgatgaaatctgggcaatgagatgtgtttttttttttctttctctcttctctctgttttttcctttttttttttcttttttttttttaatctcttctatttttgtttatttatttattttattgtaactgacttaggccccaagaatatggggctcactccctcacatacgaaggagcctaacaaatctccaattggattctaattgattaattaacctaatagggtgtactaattaatcaattagcttaatccaaagaccttgttcacttacccctgtgcaaccttatgttattaccaaaatgcccttatacataaagtgaacctaaaaccaatctgatcctcataacctatgccaacaaggtatatgagctcaaaccggggaccataactccagtattttatgtaaataacaacaagacactgtatactcgggtccgtgacttgttatccattgtgttcagtctccctatgaactaatgtccatagtttaacaaggtaaaaattgtcaatattttaagactacctttattatcattgagttatagatccttctattatgtgttcaactaaaatgtcttagctctcaaagagcctatgtcaagttccacttaaggaactactataaccatagtttccattaacacacctccttagaaccacccaaggggacacattgtctccatcctatgagatatcatggtgcttctattaagaatacctattgctaccaacttccatcaatagtgacccaatccataaggaatatatgatcaacttacaatctcacccataggtcaaaaccattgctaactttggcttaagcttcaatattctcttaaggttgagagacaacacaatgaagtagcttggtaaggtcacgaatacttgatagccttaagtcatgactcaccataagtcctgtccaatatgtaaccatacacaccagtgtactcaccatggaaaactcatctcgatattcaagaccagttatccctccaattagaaggtggtggtgcactatagcctctaataagttgtctaaacccacgaaccgactttgaacaagtcatctatttgcaaggaacccatgacttggattttccctataactcataaatgcactcatgtcacacacactacaaaagatgtaaacaagaatactcataaagtgtaatgcatggaatacagatagataaaagtgaaattggaataccattaaataaataaggaattccaaatctattacatcatgtcatgcttttaagagttccatcctaacacaaccttcacatttcatggacagtacaaagcgagaatttgtttaggttgataacaattttcagagtgccttgtctttgagtttaaaaccttttcctatattcaatgattctaatgtgagctctagcttccttggtctttagtagtcaggcatgcaattttcattggaaagtaagtggaagaggtgtcttgcaaagtctagtaatgtgtacattcaagctgagaaggcatgaggtactccctcgatgactattaggttgtaaaaaaacagtacttggcttgtccatgtgatttgcactcttgagagatatgtgattggattatcctagagcccaatggaagaaaatgggaaatcatgttgccatgagcaactgcagagggaatgaaagtgagagattatgcttagtgtggtcctgatcccacatctattgtagttatgacagaggatggcattacaactactggtcatattattataggagcattgccaatcgttgtacatatgactaggaaatccaacctgtgacacaataagttcaattgtggttggaaatttatatagaatagtagctatatttctcatccaaggagttgttccatttgcgatgatgataaatgggaagttatatgtgagtgccctctgcctatagaaaatgataataagaaagactatccatgttcttttttgtccattccatcaaatttgacatgtgatttcaaacacaaaaagatcttccaataaatggaatgaagaatagttacctgctatgctcatttgggaaaaagactccaaatttggaattagaaatgaaaagttgcaatggtttcttggtgctgtgaaagcacatcctaatgagttgaagcttgtgggggtcattaccatttggggtctgccattactaaggtgggcattttcagggatgttgtagttctatttgggttatgtccacatggttgaatttgaaagccatagagttggggcttgatcttcttggatcacaagctcctgaaagagattcaaaccttttttttccaaaatcaagaaaatttattaagaagcagtttggaatgtacttttttccttctttgccaaatggcagtaaactatttaataaaaattaattaaatttttatattaaaaactttagttaaaattaattagaaaatgtggtaagataaaatgaagtaaaacgaactttaaaggatcttttagacattttatttaattcttttaactatgacatcattaatcaaccatgaaaatctttcaagatttgataacatcattcaagcgattgttatgctccattatggtcaggtggtgttaatgtaatttaaaaaatttaagggtggttaagtgcaattgtcaaatagctgagggggttatgctagggtaccgaaaatcacttttcagtaccatacccactttttctggctaataggattaagacatatggcatgcaaaataaaaaaatttaaagaaaaccaattcttcaggttacccaatcggttgccatgggaattaatcccatgcaacacacatttttatacttattacaataaccaattatatttcaatgaccaattataaaatcatgtttaatgtaattatttcgtttggagaatttcttttatgaaacagaaaaataaagaaaattttggaaaaagataaacaatataatttggtaatataatttataaattaaggaaaagtaaatttaatttattttaacattaaataatttgttgataaaatttgatgaatatttgaagtgtgaaaaacaatataattggtttatgaagtgaaaaaatgggaagaaatagaaagaaattttataaaatatatattaacttaaaatttaattagttgtgtactaattattaattgagaatatatgactaaattatttcttagcgtttaaattgaattacacaacaaaattggttgaaatattgaaaatatgaaaaaggtataattactaacaatatggaaatccaaacccctcgccgattttttttgtaaatttccattctgaatttttcaaggatccatttaacaccctcaaaatggactgaacttatctaaacaaaatctaagtcatatgaaatcccaattaaaaaaaataaatcaaagaaatggatagtagggagggcacgaagaatgtgagattccctcactaatttgttagtatttactgattttgattttttcgaacatcatttaaatacctactaagtgtaatgaaaaaaattcaaaaaatgtataagccatacgaagtccccaaacatatttaacatatcatataatcggagaatagagagggctcctcatattcctcatacccttgctaattttttagtatttttggatttttattctttcgaaaatcattagactacttcctaagtgtaatgaacctatttaaacaacatccaagccatatgaagtcgccaaaatttttaaaaagttcaaagaagtgaagaaatgggagggtacgaagaatgtaaggactcatcacattcttcgtacccttcctaattttttagcatttttggatttggattttttcgaaaatcatttgaaaacctcctaagtgtaatgaacctatttaaattatatctaaaccatatgaagtacccaaaatttttaaaaaattcaaagaagtgtagaaatggaagagtacgaagaatgtgaggattcctcacattcttcgtgcccttcctaatttttcagtatttatggatttggatttttttggagatcatttcaccatcttctaagtgtaatgaacctatttaaacaatatccaagccatatgaagtccctaaaatttttaaaaagttcaaagaagtgaataactgagagagtacgaagaatgtgaggattcctcacattcttcgtacccttcctaattttttagtatttttttatttggattttttcgaagattatttgaccaccttctaagtgtaatgaacctatgtaaatgatatccaagccatataaagtccctaaaatttttaaaaagttcaaagaagggaaaaaatgggtgggtacgaagaatgtgaggaatcctcacactcttcccacccttcctaattttttagtatttttggacttggatttttttagagatcatttgaccacctcgtaagtgtaatgaacctatttaaacaatattcgagacatatgaagcccaaaaaattttaaaacgttcaaagaagtgaagaaatgggaggatacgaagaatgtgaggattcctcacattcttcgtacccttcctaattttttagtatttttggatttagattttttcgaagatcatttgacaacttcataagtgtaatgaacctatttaaacaatatccaagccatatgatgtccccaaaattttaaaaaagttcaaagaagtgaagaaatgggagggtacgaagaatgtgaggaatcctcacattcttcgtacacttcctaagtttttagtattttgggatttgagtttttttggagatcatttgaccacctcctaagtgtaatgaacctatttaaacaatatccaagccatatgaagtccctaatttttttaaaagttcaaaaaagtgaagaaatgagagagtacgaagaatgtgaggattcctcacattctttgtacccttcctaatttttagtattttgggatttggattttttcggagattatttgaccacctcctaagtgtaatgaacctatttaaacaatatccaagccatatgaagtccccaaaatttttaaaaagttcaaagaagtgaagaaatgggtgggtacgaagaatgtgaggattcctgacattcttcgtacccttcccatttttttagtatttttttggatatcagttgaccacctcctaagtgtaatgaacctagttagacaacatccaagccatatgatgtccctaatttttttaaaaaaagtttaaagaagttaagaaatgggagggtacaaagaatgtgaggattcctcacattcttcgtttcctaatttttttagtatttttttatttggatttttttgaagatcatttaaccacctcctaagtttaatgaacctatttaaacaatatccaagtcatatgaggtcctcaaaatttttataaagttcaaagaagtgaagaaatgggtgggtatgaagaatgtgaggaatcctcacattcttcgtacccttcctaactttttgaaatttttggatttggttttttttcagagatcatttgaccaccttctatgtgtaatgaacctatttaaaaaatatccaagccatatgaagtccctaaagtttttaaaaagttcaaagaagtgaagaaattggagggtacgaagaatgtgaggattcttcacattcttcgtacttttcctaattttttagtatttttggatttggatttgtggatcctacatataatctttacttgggacattttatatttctcgtagtgtataattggattttcaaaatagggtagctaggaaaaataataaaagaaaaataaaacagttaaaatcattagaaataatttgggcccattgaaaagaaatgtgacttatgaaaagcttgatatgaatgtttaatatcgtctacaacttatccaatggataaatttgcaaagaaggtccaaccacttgcccatatagtcgtcttcatcatcatgggcatgaacaacattatcatcaatattctttgttattgacctgattggagtatggtcgcaacctgtacttaatgttttgtcactacctctctatgcattaacattagcatcttcaagtactgatttgttgtcacagcttctctgcacattcatgtactgtgtcattgttgcatgattgtgcttgactcctacatattcaagtaatatattttattacgactatctatatgaacaaagtaaattatttaaagtttttttagttaatttatcatgttattttcaagaataaatggaaattacttttagcatctcaatcacaagtttggtcattaggaaaaaatttaactcttcgataaaatgccatggtctaattcaatgcagaagacaaatttccccatctacaaatgaggtttattacataaacaatggcctacctcaaggctctaacaaaagagtaaaatgtctaatcaaaccacgatgtcaaaatagggattgtcgaatcgaataatatacattttcaattataagattcatatcatttaccccaaaaaaaaattattccctaaacatatataacctgatagagttcgccaccaggtcagtctagtgtcattgcattcaccatcatacttgatctttttgctagaggattatccctaccttgtgtactactatattagaacttccatgtttggaggacaacaattcaaccttaaggccttcaattccagctttattatctatgcacctactcataatagatataactgctaccacccaactaaatgttggtttatatggatgttggattagcaaaatgatgtctctttaaagtaagagcaattagatgtagcaaaagaccaaattgagtatcaatacaacaatctatgttggaagccaatcacattacaacttctaaaagtaaagattaatcagtcaactggttacatgtaaccggttgactaattatctctatcggtagatactaccaaagtgttgatgcaacacccaaatgggcaatggctaccggtagcaaaaaaaatggaaccggtttatttgatgatcgaccgaaattggactttccttttgttttcatttaggtatgtgatctggcgatcatacagttatgcataaatattaaatactaaaaagcaagaacttgaacaatatcacctttcatcaggatagaaggttaattaccttatgaaaacttatcaaaagagaatagtttagcataacaattcaaaatttatgacaacaatcatctcttcctaccaagatcacctagctattgtacatggccattattttagacctccttgtcctacatgcatcatccattgctgttgtgactatacttccaccaacatttagttcttgtaccattaatataacacatttacacattcttctttattgtgcaagaaaattacatgaaagccacaaccttagtccatagtcactagtagaccaaaaattttatatttaaaataagcttgttttcagattgtagccatcattcaggatatgcaagcataaataaaatggagtaaagaactactttcaccacttcaatcacaagtttcgccattagtaaaaaaattttaacttttctagaaaatgggatgatccaattcaatcctattgccactttaccctattgaaacctgaaaaaaaatgcacatcaaggaagttaacgcttctagaaaagaagaatatcatattactatactttgtgcattttgaggtagctggatcaaaaaacttgtataggtcaaaagaaacaagtgtatcattaaaaaagattgtcattctaattccaagttgataatcctattgagtacaactggaagtttagtatcctttaaaacctactagaccatttattgggtcttacaattagcctacataacaggccatactagagttccaatatttaaatggtcttctctacaacctagctcataacttttatttactaggtttgaaaagtttcttgattgtggactaccaaagaaagaaaaatccctcaattgtgagcatcacaggatcctccaattgaatttgcagatagggaaagatttatggctaaacccagatgttgcttgacgaagtaggaggatgtcttaacaacaatggtaagagcatggtggagtatgattgatgcctagactaggtttctttgggaagacccttcttagtagcctcaac

SEQ ID NO: 11180 - DNA, 5551 bp, Vitis vinifera
  Intron number 1 from transcript GSVIVT01001431001 (locus G SVIVG01001431001) derived from phytozome v7.0 (chr-ID chr1 3; pos 20921033 to 20926583)
aaggacccaagggtgccatggagtctttacagtgagcctctcatcttagcaagagaagccaatgttgatgtcataaagatcacaaaatcttttgagtggtactcggcaacatggatcactatgaaggaacaaaaaatttaaacaattagttaagcatccattttaatacattttttttttaatcttcaaaatgagaaatttttatattaaaataaaacatcttatagagaaattaatttttgaatttttaaaatttaagatggtaaaattttttaatatcttcaataacttttaaaatcattactttttcattacaaactttttagagtttttttatctcatgtaaaatttttcatattttctgattacaaaaacagaaaataggaaatgtatccaaatgagcatgggccaacaatgtaaaacatattccccaacgatgaatttacctatatacccatgcaccacgcccattttccatgagcttgtagataagggaaatgatagactaggggctatctgtccatgttttgtttcactaagtttttaacaagacaatcacaatgataaaaatattcttataattatttaaggggaaagtgttataaaaaataagaatttattgtattgtgagaacttttagatgatcatctataataatatatatctttttgtctcctaagaggagacctctaataaaatatctatttaattttattttttgacactcttttttctcctttttcaatttcttttcttttcgctttattttttacaaatggtatatataaaagtcatttttcaaacatatttaaaaacaaaaaaaaaatttaaacaaacatttgttctataaaacatattgaaaaactattttcataaactattttttacatttattattcaaaactgttttaaaaaataattaccaaacatgaacttagatttatttttatttttttttaaatgcactgttattcttggcaaaaattagattttttttctttttttgtattccattaaataaagtaaaagaaataaatgtaacatgattaattacatttagtcaaatgcttaccatgaaactagcatgtggctgaatggaaagaacatggaggaagatggcaaaggcagacacccacaatataattaattttaattatattttattttcttatatatttttcatagaattatcaaataaaataaaaataattttgttttagtattttttcttgctttggtattttctcggaatcaaacacaattgaaaaataaaaagagaaaaaaatgaagaaaaataaaaattgaagttatgttacttcaaattaacttcatttattttaactcattcgtataaagattaactaatttgaaaatatataaaattttaaccaattttaattatatttcattttctttaatatttttttttttttataaaacaaggaaaaaaattattttctttacatttttccataatccaacataacctaaaaatatttcattttagtatattgtcagcttagacttcttcgatgtaagtagtattgagatctcgggagaaagaaactgacctgtttgatataactttggttgtctttgcacctattcttgattcatccctttctacaaagagaacaatggctgtgggagagatctttctcactgcattcataaacgtaatgtttaacaagttggcttcaactgaattcttcgactttgttggctgagaggaacctgaagaaaacgttgctaatagttcaggcagtgctcaatgatgcagaggagaaacaagtaacggagtcagctatgaaattgtggctggaggatcttagagatttggcttatgacatggatgacttactggatgcgatcgccaccgaagccttgtgacggaagctgatagccgatggatttgaagctaccacaagtagtacggctatatgagttcccatccctgcttgttttcctatttctttgaatccaaccgctttgatgtttagtgttaggatgggatctaagatagagaagatcaccaacagagtgcaagagattgcaaagcaaataggaggtctaagattgctaaggaatgctggaggaagctccaatgcaagagaaactgtcacgacccaaattccgggtgacccaaaatttggcccgtgacctcaggtaaaagatttgaccataagggttcctcctattccacactagcagtcaaccaaaacactttgaattttttttttattttttttttacacatacgtcccactagagatctcataaactacaatatcctaaacactattcaaaacaacaaggtttaataaatattcattatagtccaaaaataaaagttcacaattaagcaacttaatcaaaataaggtctcattacaaatccataattcatagttactaaaacaaatcccaaaaccacaaacacaataaaaaaaaatatcacgggccactccaggagcatcctaaagtcctccctgcctcacctgtggatcttcaggagtgatatctacatttaaaaagatgtaaaaatgaaggggtgagcatttccacattgcttagtagggtgcctaacacccaatgggttaaagggattactaagttccaaagaacacaaaaagaacatttcaacagtattaatcaaaccacatagtttaatatctaatattatacacaattccacaacattcaacaattaaatgaatacacatgaacgagtaacacacagtcatacaatgcactattgttctcgggctttcaccaaaggatacgcgtccgcacctaaatacactccccattcggagtcttcccgaggtaaacttttgggtctttcaccctagggatctctctcctttcttaattcgcctcacatgggcttttacttttcatcactatttttttttttccatttcatacacttttcacaattttcataatttcttcacacaaccatgatgcaaatgaatgccacaattccaaagtttctcaataatttcaataatttcaacagtttcaacattccccaataatccaataaaataaattttccacattaaaactttcgaaaatatcccaacaaattttcaaaaatttgcatatcaataaacttgaaattataccacactttcaaaatttttcaacaattctaataatttccaatattcgaaaataactaattttccaccataaaaattccgaaaaatattccaacaatgcccaaaaattcacatatcactagatttaaaattaaatcctaatttcgaaattttccaacacttccaataatttttaacaactcaaaacaattatttatcaactaaaagcaaattcccaaaagtacaaaaattccaaacaaattccaaataatccggaaaaaatcatacaacaccaatattacctacttaactcataatgacaagatttacaattttcttgaaaggaaagatgcattaaatttaaggtttagggttaggttctcctaccacagatctaagaattcaatcgttaaaaatatgatcagccatcgtaggattgttcctctcgtcaagtagagcacctcctcaaaatttgagccgaaacggaggtcgtttggccgtccaaatagctagccaaagttccgatgaaagaaaaaatctccacaacaccacaactatccctttccccctttttgccacttttcaaatcctcccattttccctttttttttgtaaacaccagccactcaagcccacaacccaaagttcaaaagcccaatgaactaatttcctttgttttaacaacccagacccactatccaacttttgatttattattattattttttcttttatttattttcatttgattatttttcatttccaaattctttttttttttataacataccaattaatttataaaacactaacccaaaattttaatttttctcaattttattgataatcaatttaatttaatttttacttaattaattttaattaattcacttttcattttcgtttttatttttcgtttctggaaattttcaatttctaaaatcctaagaaattttctaccataagactgacgtggcacaaaatttcaactcgcctaattgaccaacacaataaattgaattttaccaatccagaattaacatgtgttctccaaacattttttttttataattacctaataataattaaattaattcccgtaacgtacttaatattcaaattttcaaaacctaatctcaattatttgatggctaaatttttctctaagtctaaatttaatttctaaaatttctactctttacgtctgacttggcaaatatttcaaactattgacttttcaccaacttttccaaaatctcttccaattagatactaacacgtggatcttcacctctctttttgaccatttgacccacaattttatgaaagactttatgctcctaaaatctgacgcgtccttaaaaaaaacccgggtattacattctctcctcctaaattttcttgttaggattttattcattgcgattattctttgtaatcctataatattgcattttccttcttctttgtaatcctataatattgcattttccttcgtacacctcaaatatttttatgtataacactctttatcttattttatctcttcaagctaatctatttctaagtgaatttttgaacgtgtgcatgttttgtcattaagttcataccatgatcacaattcctcacttccacaattaagaaattatactttgcatttattagtctttgatttctttcattattgtttttgtttacctcagtttgaactttctaatcttatctcacacagtaattaagagtcttctctttctcaaagccttttatgattactattattattcgacatacattgaaatcaatttgattgaatctactattaactatgtctagtaaattattatcttaactcccataaacaagtttatagtttcctctactcattgtcatcattttttttttccctttagcaagatacatgtttcctactaaatctaccaacaagagaggtctctagataagatttatcactaataattatagagtttactttttttctttttgtttttcatgatttgatagactaacaatttactagtgtcttatatcttataactcaaatgcactaatatttttaaatatttcatttatgcagtcccaaaagtctcaataattgtaacgtcacttgaattttatttatttcctattagaaccccttagtttgaatgtcttatatttcttcagtactcttaatcaattaatttccctacatcacctccaacattttttaaaaaaaatttatttatttatttttgtcattcaagaacacatcatatctcccagtaagatgcatatgatacaaacaatcacactaaatttcacaatgaaaaggcaagagagatgtgataaatgagataaaacaaaaataaggcctcacagtctctagttggtaaactggttggcctgccagttgaccactcagggtctgaaagaaactcaatctcc

SEQ ID NO: 11181 - DNA, 11284 bp, Vitis vinifera
  Intron number 1 from transcript GSVIVT01001782001 (locus G SVIVG01001782001) derived from phytozome v7.0 (chr-ID chr1 8_random; pos 3053037 to 3064320 reverse strand)
aaaacaccgtgatcctgttgcttgagcgatcttctctcgtcttctttggttggtttttctctgcaccttttctagagagagaaagagacagacggacagagagagagcaggtggtgaaggtggaacctttcaaacccaccctcggcgaaggatccaaatccatacacacaaactgatcggtgatctctcccctctcaatcactccctttatacgccgagttgaaaggggtttcctccgtttcctactctctctctctccccctgtccctttctctccagaatttaggaagataaaatgtagctatcaggagagagttggcttttcttttcctttcttttccttttcttttttcctcctctgatctcacttcgaactttgatgcattcatccacgtggtttgctaagtcggggaccatctcctttcacacacacacacacagatatatatatatctcatatacacattccaccctgaaactactctactacatctcctacacttcccctttgctcctaacaatatttgctaaaccaccacacgtaaaagggtggtgagagttttctatttataaccatttacagaatataggaaattattacaaatcaaataatatcaaaccgattacaaaggaaatggaaagtaggagtaaatggatacaaaagaatagcctataatcaagggtcaaatatgatacatatggtaaaccgtaatggaaggctaagtatcctcaacacccccctgtaagttgagcgtcggattggaatgaacgtgaagcttggattggaaaaattcaaagagaggttgagaaacacttttggtgaagatgtcagcaacctggaggtgggagggcacatactgggtgcaaagttgccagcgacaacgagttcccgaaggaaatggtaatctaattcaacatgcttgtgggaaacgggattggagcttaaaaagatagcacttttgttgtcacataagagcaggggctgctgtggaatggggaccttgaggtcatgcagaagatgcgtaagccaaagaagttcagcagcagtcatggcaagggcacgatactcagattcacagctagagcgtgagacagtaggttgtttctttgcactccaagaaactagattgttaccaagataaatagagtagccggatgtggaacgatgagtatcgggacagctagcccaatcagcatctaaataagctactagcgcactaggaacagtagatggacgaaaggtaaggccaaagtggagtgtgcccttaacatagcgaagaatacgcttgatagcaagaaaatgatctacaataggggcgtgcaaaaattggctgacagaattaacagcatgggcaatatctggatgcgtaatggtcaagtattgaagggcaccaacaagagatcgatagagactaggatcagagaaaggagaaccatcaacaataaggtgttgggaaacaaccatgggggtgtaaataggtttgctgttgagcaattgagcacgagtaagaatatctcgagcatattttaactgactgataaagagaccatcaggagtgggcgaagcttcaagaccaagaaagtaattgagggagcccaaatccttggtagcaaactcagaatgaagcttgcgagtaaagctgttaagaagatatgggttgtttccagtaataataatgtcatcaacataaagaagcaaataaataaggttagactactgatgacagacaaaaagagaggtgtcagcgcgactgcaagaaaaaccaagtgtgagaataaatgagctgaaacgctaaaaccaggcatgaagagcttgctttaaactatagagggctttctttaacagacagacatgagtgggaaagcgaggatcaatatacccaggaggttgttccatacaaacatgtttagtaagggtgcctgattcatgcccagtcgggtgtttatcaaaacatttataatacctacaacaccttatactagggtagcaaagacaaagctactatatctaggatcgttcacaaggatgaattttctttgtacacttaacattaatgaaaggagaaatggtgatttcctttttgaaagttagtttttaaatgaaaataagattgattggaagggttgattttaagtcaagcaaacataaacaattgaaattactataaagagaaagtctcttggagctatggttactaggatcaggttcctgttgcaaagtgggaaattcctgatcttctcctcccattgaggacaataacataaaggatggttatctcccgaaccggatttatatttagcaaataagttttgatccaaaggattcttgagaaaatggtagttgcttcccattaatggcttcaaacaataaagaccctcaccttgaaccaccttctaatggctcgtacttgataactaatggacatccatggatctagcaataagcatgcatagaatcctaaaagcttaccaagtattgaccattcaaggtgattctaagggattaaagttgaaacttgaaatataaaccattaatgatatacaactaccttcgtttaaagcaaggaaaactctcacatttgcatctgggtcctttacctagcttccatcactccaagaaacgtgaaacttagtcactcatcctctaagaaatcatcctcagagggtgtttggctagagagaaagtgaagagaaaatgagaaggaaaggcagagaaaaactcaaactttacaaaatatctaaaacataatatctaacataacataatctcctttgagaggttttccaacccctatttatagttcctaaacaaaccctaatgtcatttatctattacaaaaggattagaaaggaaaaattacaattctagagaaaaatctcgaaggtcggtgcgcacaaagtgattttagcataccttgcgaaagtttggcacaccctgcgaaagtttggcacaccttgccaaaatttggcacaccctgccaaattttggcaaaccttgcgaatttgggcacaccttgcgaatttgatgatttttgtcttgcgaaatgctctatttccctccatcttactactaatagctttgccaacccctttccaagtttggaaaggggttttgaagtggtccaaggctcggattcttcatgtgattgaccttcaacttgccttgccatagcttgcacaaaactttccctcaatcttggcctgttttagtgataaaaaagctaccaaaaacactaaaacttaccaaaaattggttagtaacattttctaggttcttatcatgccaaatgagatataaaggtctaactactattcaaaagtgcttagtacaattaagtttaagtttataaaaatgcactttttgagtagtaatcagtgccattgaggaaagcattcttgacatcaagttgccgaagaggccatttatttgtgacaataagagaaagcacaacacggacagtagtagctttgacaactggactgaaagtgtcagtgtagtcgagaccaggtacctgggtgtaacctttagcaacaaggcgagccttgagacactagacggatccatccgaaaaatatttagtgcgaaacacccatttagagcccacgatgttggtgttgacagggcgaggaaccaaaattcaagtaccatttttttgtaaagcttaaacttcttcatccatggcagtaagccaagtaggattcttagcagcagttttgaatccttttggcacagtggatgcaagaagagtagaaagaagtttagaggagcccaagacactaagattcgccagatgaagagtcttgaaaatactagcttttgctcgtgtgatcataagataagaacctaaagaagaagagaaatcaacagcagactcaatagaaggcgaactggaagctgagggtggcaaagaagaacttgtaagagaagtatcaacctgcacagactcatccacaaggtcagaaaaaacattacatggagaggagttggatcgaggaatgtgcggggaagggggggatggatcaatatggtgaagacgtggttccaagaaacttgaaatatgaagagaaaaaagaggttgggcctggaagctagggacaataggaaagtgagcgtggcgggtgatgtatagcctagtggtggtaggatcaaggcaacgaaaccctttatgagagggactataacccaagaaaatgcaaggaatgctgtggggagaaagtttgttaaccatataatcacgcaagcaaggataaacacgacaaccaaaagaatgaaaattctcataatgcggagagtagccatatagaagttcaaagggtgacttaccgtcaagaagtggagtgggcaactggttgatgatataagttgcagtgttgaaagcatcaacccagaaacaaggagaaaggtgggagtggaagagaagggccaagccagtctcagtcacatgacgatgttttctctcaacacgaccattttgaacaggtgtatatggacaagagagttgatgatggatgccagaagtacgtaagtgagctttaaagcaagtactagtaaattcgacacctccattgctttgaaaaacaaaaaccttgatacgagcggaatattagttttccacaaatttttgaaattgaagaaaaatatcaaagaaatcagatttaaatttcaaagaataaagccaagtgaatcgggaataatcatcaataaaaataatatagtaaagaaaacccgaatttgatttgatgggggaaggaccccaaaggtcacaatgaataagatctaacacatgagctgacctatgttcatttcgggaataaggtaattgatgatttttcgcaagttgacaggtactacatagtgagggagaagacaataaagacgtaagaaaaagatgtccttttttatttaaaaaagaaataacagaatgattcacatggcctaggtgagcatgccataaatcatatgaagcacatagagatttatttttaaggacataaataaaggcagagttgccgcgctccaacacatatagccctccatctcttttaccggtcgccaccacccttcttgtttgacgattctagacaataaaaagattattagtaaatgtaacggagagaggaaaattagacgttaatttactaattgaaagaagatttttagtgagatgagggacaaccaatacatctaataagtgaatatttggaactggaaaaagagttccaatgtgggtaatgggtagagagtcaccgtttcctatgatcataaagtccttacccgtgtaatttttggactgatccaaaatagatggattagtggtcatatgggccgaagccccaatatccaaacactagttagcagcctcgggtccagaaagagaacaagatgtgttgaaggcttcagcaagatgagcaaaggaattagtcctagcataccattggttacagtggtcagcataatggccctcctgtggacccacatttttcatgtgcgcccccacttgatcggcgagactcgctttttatttatgaaaatttaatttttgaaaaagtcagagccgccacttattttattttatttttgaaagggaaaataaaacaagaaataaaaccctaaaaaatgactccataatttttttggaaaaaacaatgtctttgaaaaactcgagtttaagtccggggattaagttacttattaggaagtgtggaccccatatttttttcgatgcgttcccactcgatcggcgagactcacttttcatttatttgggtgaaaaatatgatttttagaaaagacttggagtcgccatttacttttatttatttttaaaggggaaaacaagtaagaataaaacccctaaatggactcctgattttttttttggaaaagctgtctgcgaaaaacctgagtctggattcggggatcaggttacttattgggaaggtacgataaagaccgtagcacccctctaagcccctaaaaaaaataggtctctactaaataaggtgaaccagacatgacaattagctagaagatcaatggataccaaaatgatcatagttcaaaaataagtcatgatgatgaaatgataaatgaagtgagagtgagagtgtaccttagtagtaggtaataaagcactgtcatgaaaataaggttagtgtacaatgacaagtgtaaaaaaagtctcatacaaaaccaaatcaaaatcaaacaaaatggagagcacaacttgaattattttcgaaaaaaatgttatgaatgtcgggcccccaccaaagcccaattaatttttgctatgaattaattctcataaattccatcattttggaattatgaaaacttattcatttttatataaaaaaatttgaaaagaggaattttgaaaattaaatttgaaatttcggaagtgtggaattttattttatttaaaaaaataataataaaaaaataagtttgaaaattttggaaatctctttgataatggtatttcaaaataaataaataaaaaataattaaaaataaaattaaataaaaaatgaataaataaataaattttgaattttggaaaatgggaattttgagaatggaattttgaaaaattaaattaaaaaattgaaaatttggaaggattatttttgaaaaatgaaatttcggaaaattaaatttaaaaattggaaatttggaaattttggattttggaaaattattttttgaaaatcgaaacgtgaagaccggagttttgaaaattatattttgatgcgcgagaataaaaaaaaaattaaaaaaaaaaaagaggatagtatgtagtcggtgggattcgcatgccaatggtagtcatgcaaagtgtcggcctgggatggaacatcttataacataataatgataataataataataataataataataataataataataataataataataataataataataataataataataataatagatcgatctcaaccttacatactttaatactatttacacatgaagtattgaaaactgacaactagaatattaaaacataagaaaattaattaagggaaactaaccctaaaattattaaaaatatatactaacatgagacattaaataaaataaattgacaactagggatattaaaaacctaaattaatgaggaacaaccaaactaatgctagagataataaaaacatgaaataattttggttcaattagaatgaataattggtaaataataaaaactaacatctaaggatattcaaatcccaaactaataagaagcaaataaaaactaaaatcttaagatttaaagaaaattattgaccaacaatggatcaactgaaatatcgattaataattcaaagagcaatatgtatcaacatggatcaatccaaaccaaaaattcaagaagcaatatatactaacatgagttattaaaatcaacaattaaaaactcctaggtatatacaaattatcataggccatcaaattaaaaactaaaaaattcaaaggactacaaagaattaacatggatcaaccaaaaataataactaataattttaatgacaatgcaaattaacctggatcgatcaaaaataagaataaaaatttaaggagcaatataaataacgtagatatttaaaaattaacaacagatgattttatgaaaatgaaaaaaaatactaataatagtaataataataataataatattgaaataaaataaaataaaataaaataaaaataaacaaacaacatttcatgaatattataaggctacatggatattagttttcatttgtttcattttaaatttaaaacaatacaaaccaaaacaccatgaccgaccacttccactttgatttttaattaaatgaaacaaaccactaacatacttgaaacatctcatggccggccatatattgtattctccttgatttatcaatttaagaaaaaatagaaaacatcaatgcactacaactcatgcacacgaccaaacaatcatattcctttgatttatttaagatttaaaaacctaaaacatcaaagcactaactcatgcatacatccaaacaatcatattcctttgatttatttaagatttaaaaaaactaaaacatcaaagcactaactcatgcacaaagccacacatttatattcctttgatttattcaaaatttaaaaacctaaaacatcaaagcactaactcatgcatgcagccacacgtttatattcctttgatttattcaaaatttaaaaacctagaacatcaaagcactaacaactccattaaccggttgtacactaccttcaattcatctattgatttgtaaaattcaaagcaagcattcaatcatctcacaattgacatatattttcaatccatttcatcgatttaaaaaaagaaaaaagaaaaaaacaataacatcaaagcgttgctaacctcaacacaattgcagccacactcctcaaaatttgatggtatttgatgtatctaaaggtgtagtatgtgctttcaatatgcaacaacctgtgtgtgtaggaggaattactatggtgcgtgctgcttgtgtatctaaaaaaaaaaaccttgcaacccttacatgttcctcctgtattcctaaaggaacctttgccgccatgcttaatacaccaataacacgcattttgcaggcagcaatccgtgttagtgttgttcgggcacctgaatttcatgctaggagtgggttgaagcgccttgggaacaattgggatgaaatggctcatagcccggtgtgtctcagcaatcgggcagtttccaatttccaccaatcgttgcccattgcttcatgttttgaagcttcatccaaactattgctagcaacataacagaggccaggtatcacctcttcgtgcctaggaagttttgggtttccctcttcacctcaaacccaaacatatctcctagaaacagagagaggaacgaggatacagttaacaaaacaaaacaaaccaaacccttcaagccaagtaccatttcacggattgtctatgtgcttaaagtgtgggtggaaagatttaagtgagctcaacagaagaacatagtcatgattttcaagcaccaaaaacaaagatgagtcttctttcatatatttttccctctaaatttagcttaaaaagaaaagaggagtaacacagtaacaagtttgtaactaaccaatgatcaacaaaatgaaatggggcatccagaatctatatcagagcatcaaataatatccatagatcaacagagaagaaaatatgaacaatagaaaatgagagactcgctaaccatacctgtaaaactttcctcaagcactgatatgcctcttctagctcttggtgccgtcacccaaacccagtagaaattcccccaactcccttctgcttcctcttttctcttctctggattttttttttctccacttcctttttttctctgctttttccttctttaaatctgaatgcttttgttcaaaacccctttttctccctttccagacttcacccttaagacttcccttacagcttcccatgtagctccaatttcccacagcctcttcgggaaacacccccccccccccccccccctcccacttttcctttctctcccagaaatcctttttctactcttcctttcttagttttaaaaataacaacttttaatccccatgcttcttgctggttttctaagtatcaattttgacttttaattttttccataaaatatcttcttctttttttcttcttcttatgtagtccaccaactctccttttctattattttttttatataataaaaacaaagtaaataaggcaataaaaaaatataatacaataaaaaaaaatgaaaataaaatgacacagtaaaagcataatataactaaataataatggtactaagaataacaaaggtaatgataaaaaaataataataaggataataataataataataatattgataataataaaaacaactaataatactggtactaataataataatataagatccctagtcacttgcaattttctgaaaataaataagtgaatcaatgaacaaataaagcaggaaaaaataaataaataccacacgcacataacaataatctaaatattaaactaaaacacaaatgaaaaaaagaagaagataaaatgaaaatacaaatagaacatcaagctgatacaattaaacatcgaaagctcatcttaggcaatccaaataaaataataaagaattatcaagctaaatactcacctagtctaaaaaattcatcaatcaagaaactaatcttagagaattaagcttacaaataataataataataataataataataataaaataaaataaaaaatctaagtgacttgggtgacttaagtggaaagtgcccaggtgaattaggtggaaactaaaccaaggaggtgtccaagtgataaaaaaaaaacgtgctaagtgacttaggagtgtacttatcgggctaggtgtatctaaatgggcttaaggtgcaaaagtgggcctaaggtggtgcccaatgggtcataagagaattattataaagtatcaaacggacacgtaatagaacatgtgctagtaggacaaaatagagggtctacaagaaggtacctctaagaggtagcatccctctaagccctataaaggtttctattaactatgttgagggaagtgtggcaattaatcgattaatcaaggaaacctaagttgattaagatgattccaaaaacatagcatgttagacaaaatcaaatcacaataaaggagagttggtatgcatacccgaaccgcttcttaagtaccatcaaaagacatcaaaggttagtttggaaagtatatcattcaacatgcatttcatcgaagataatcaaacaagtatcaatgtagacaagtatgacatcaaacatggacatagtacgcaaaaacatagatattcgtggaattttgaaaataaggtgacggagggcgtacctggatggtaagtagtgcgctttaatgggaagcaaggttggctcaacaataaatacaaaacaaattcatgtatatcatcaagaggaataaaaaatcaatcagatatcaagcaaacaatatcgaagagaatatcatgaatgttgggcccccaccaaagcactaattaattttgcataagttgattccataaattccattatttggaattatgaagtttgttcatgcttgttgaaaatcaggaaagccatgaagatagttgagaataaaataagatagtgaaa

SEQ ID NO: 11182 - DNA, 10238 bp, Vitis vinifera
  Intron number 1 from transcript GSVIVT01016264001 (locus G SVIVG01016264001) derived from phytozome v7.0 (chr-ID chr1 3; pos 5791367 to 5801604 reverse strand)
cccatttcagaggaagaggtactttcttcttttctttttcacgatttgtatatataattttgatgttgtttggaggatcatggcgcataatgcgatatactggtctggcctttatcagtgaaccatgttgcagaatgagacagaccaccctctttgggttctttgtaccatgattttttatttgatatttgatttatcagaggcatatatgagtagtattacttgaatttggatcaatattttttttgtgggttttgcatgtaccatggttttcaaatgtttgtctgaaccatatttttgataacctgtgataggagatctttgattatttctgtgtagttcattttgctataaatagttggctagatttcatttctttgaaagattttaagcacgtttagtttctggacgaaatcaatgcttaaaaaagcaatctgaattgctgattctccatccaaaaaggaaaaaaaaaaagggaataaaaagcatagaataggctatttggctcattctggatcagtgatttttttgtttgagctgctacttcaacttggttgcttgacctctgactttaaaatttcatggtgcaagaggagagacgttttttgcacaatctttttgttcctaatctcgagaaatgattttgttaattgtattcaaaaaacggaatccgggatcatctagaactgcatcaattctttttcttttcctgtatctttgatactcttatgtatggcttcaaaatttagctaatggtaagattcacaatcttcggtctccttggttgagtttgcaattacggaagtcattcttactattcttactctttcacttctttttttcctcctctttcctcttttgtcttcctacttttcttgtaaagttgaaagcattttatattggtttggattactttgaggaagcaaatctgtaactctctacttaatctcgatcaatctagaaattaattttctttggctaggacagcatacacaaccccatccttcttaatctcatttttgaactccttggtaagaatgaacaaaggcttgttttgagtttcagcaacattctttggcttgtcttcttgatattttttcacttgttccatactgataggcttcaaaacaatgttccctttaatagcatgtgaaagaagaagtcttcactcttccatggtgatgcaaatcattcaaggtcaaccaagtaaaatatgcctaattgtcataggaataagatcacaccatataaaaccattataatgaccacaagaaatagaaaccaaacaattatatcatgattgaatagaactactttaaccttgctaaggttgcttccgacattgcattcatactgttttctccattaataattgactcagaagcttcattgccacaacattttataatttgaaatatagaagtattcttccaatcgtcaaattcttgctttagtgcagcaagaataagtgtaaaagtgatattaaaaaaaaaaaaaaaaaaaaaaaaagaagaaggagaagaatacgtctatttcttgaagataatcaacattcaaaaatccatttttactggaggaaccatctccctcatcatcactgttgaaatttggcattcaaagttagggttcttaatttaggaaagttgttttaggaataaaaaaggagagatcatttaggatgattcagtttcctaattttaggagagaatcaatccagattgatatcttcttattcagtcatttgtgtatatatatgtgtatggtgtgtacctaaaaaaatcaataaaggaattcagaaattcttcatggtatcagagccagttttctgaaaccctaatcccttctggccacctcttattcaggtcatcattcattccggccaaatctctctggccatctctcaatccgaccatctctctctggtcgtctctcattccggtcatcaatccctgttttcagagccaagggagaaaacgctttccggctggtcgaatcgtcatcagaaaacattcaccgtcggcgaacttttccggcgaactttttttttttcaccgcaaggaccgcttggaggagatctccaaattttcccaaagcaccggagccagaaaaccatccacgcgcgtttttccggccggcaactgcatctcacacgccggcgcgtgagggcgcgtgagccactttccggcgacgcgcttcctcctccaggctcgcctgacgccgaccagccaccctcttacctatttctgccatccgagccctgcatgtgcctcttttggggttcttttgcctccgcgagccctccgatcagtttttccggcgtcctccggctattttttcttaactccaatccctgcacgtgccttgggaagtgttcttctacctttccagtctataacaaaatacggaatgacatcatcacaagtatctagcgtcacgtcaccagaatcagggggcagatctgaaattccaaaccttggtggcagtgattcctctcctattctcatcacaggacacaaattaaatggccataattatttacagtggtcacaatctgtgttgctattcgtttgcggtaaaggaaaggatgagtacctcactggagaagtagctatgccaaaaactacagaaccgggtttcaggaagtggaagattgaaaacagcatgatcatgtcatgacttatcaattccatgaacaatgacataggtgaaaattttttgctgtttaggactgcaaaggacatctgggatgcagccaaagaaacttactcaagttctgaaaatacttcagaactttttcaggttgaatcagccttacatgacttccaccaaggagagcagtcagttactcagtattacaacacactcacaaggtattggcagcaacttgatttatttgagactcactcatggaaatgttcggatgatgcagcaacatacaggaaaattgtggaacaaaagagactattcaagtttttcctaggactaaacagggaattggatgatgttagaggccgaatcatgggcattaaaccccttcaaagtctcagggaggcttttttagaggttaggcgtgaagaaagtagaaagaaagtgatgatgggatccaaagagcaacctgccccaacattggatgcctctgcccttgctgctcggtcatttaatagtagtggtggagatcgtcagaaacgggataggccttggtgtgattattgtaagaaaccaggccattataaggaggcttgctggaagcttcatggcaaaccggctgattggaaaccaaagccacggtctgacagagatggcagagcacatgtggctgccaactctgagagcacatctgttcccgagccgagtccattcaacaaagagcagatggagatgctacaaaaactattaagccaagttggcagtggcagtactaccgggatagccctcactgctaatcgaggaggaatgaagccgtggatagtggacacaggtgcttctgatcacatgacaggagatgctgccattcttcaaaattacaagccaagtaatggtcattcatccgtccatattgctgatggttcaaagtcaaaaattcccgggacaggttctataaaacttactaaagacttatatcttgactttgtcctccatgttccaaacttggattgtaatcttttgtccattagcaaattggcccgtgatttccaatgtgttactaaattctatccaaactcgtgtgtttttcaggacttgaaatcggggaagatgattggcagtgctgaactgtgttccgggctctacctcctctcatgtggccaattctcaaaccaagtctctcaagcaagttgcgtacagtctcataaatgttagagtctttcaattctgtgtcaaattctaaggtcaataaagatagtgagattataatgttacactatcgcattggtcatcctagctttgtttaccttgcaaaattgtttcccaaattatttataaataaaaatccagcatcttatcactgtgaaatttgtcagtttgcaaagcatactcaaacagtatatcctcaaatcccatacaaaccttcgactgttttctctctagtacatagtgatgtgtggggtctctctcggataaaaaatatttctggcactcgatggtttgtgacattcgttgatgatcatacacgggtaacatgggttttccttatgaaagaaaagtcagaggtcgggcacatttttcaaaccttcaatcttatggttcaaaatcaattcaattccaaaattcaagtcctcaagtcagataatgcaaaggaatactttactagtagtcttagtacttatcttcaaaatcacggcattatccacataagttcttgcgttgacaccccacaacaaaatggggtggctgaacgcaagaatagacatctcttggaagttgccgggtgtcttatgttttcctctaatgttccaaactatttctggggggaagctattctcacagctacctatttgattaaccgtatgccatccagggtgcttacctttcaatccccacgtcaacttttcttaaaacaacttcctcacacccgtgtagcctcttttgatttaccactcaaagtatttggttgcacggcattcgttcatgtgtatcctcaaaatcgtagcaaatttgctcctcgagcaaataagtgcattttcctagggtattctccaacccaaaaagggtacaaatgctattctccaacgaacaaaagattttacaccaccatggacgtctctttctttgaacatgtcttcttctatcccaaatctcatgttcagggggagagcatgaatgaacatcaagtttgggagtctctccttgagggtgtaccttcttttcactcagagtcaccaaatccttcccaatttgcgtccactgagttgtccacacccatgccgtcatcagtccagccagcccagcacacaaatgttccttctcccgtgaccatccagtctcccatgcctattcaacctatagccccacaacttgctaatgagaacttacaagtttacatcaggaggaggaaaagacaggaattagagcacggatcacagtcaacatgtggccaatatattgactccaattcaagtcttcctgaagagaacataggtgaggatagggctggagaggtgttaattcccagcattgatgattctactctgccgattgcattgaggaagggtgtcaggagatgtacagatcatccaattgggaattatgttacgtatgaagggctatcaccatcttacagagcatttgctatttctcttgatgatactcaggttcccaacacaatacaagaggcactcaaaatttcagaatggaagaaggcagtacaagatgagattgatgcacttgagaagaatgggacgtggactatcacagatttgccggttgggaaaaggcccgtggggtgcaagtggattttcaccataaaatacaaagcagatggatcagtcgagaaattcaaggctcgtttggtagctagagggtttacacaatcctatgggatagactatcaggaaacttttgctcctgttgcaaaactgaacactatcaggattcttctctcattggctgtcaatcaagattggtgcttgcaacaactggacataaaaaatgcgtttctaaatggtgacctagaagaggaagtctacatggaaataccacctggtttcgaagaaagtatggcaaagaatcaggtttgcaaactccaaaaatccttgtacggccttaaacaatctccccgagcctggtttgatagattcacaaaagcagtcctgaagctgggttacaaacaaggtcaggctgatcatactctatttgtcaagaagtctcatgccgggaaaatggccatattgatagtctatgtcgattatattattctatttgggaatgatatggaggaattacagaagttgaagaagtatttgtcagaagagtttgaagttaaagaccttggaaatttgaaatatttccttggtatggaagtggctagatcaaggaagggaattgtagtctctcaaagaaaatacatactcgatcttcttaaggaaaccggtatgcttggatgtaaaccaattgatactcctatggatagtcagaagaaacttggtatcgagaaagaaagtacaccggtagacagggggagatattagcggcttgtcggacgcttgatttatctctcacacactcggccagatattggctttgcagtgagtgctgtaagtcaattcatgcacagccccactgaggaacacatggaagcagtctataggattcttagatatttaaaaatgacaccagggaaaggtctattcttcaaaaagacagagaaccgtgacattgaagtatactcatatgcggattgggcaggaaacatcattgacaggcggtccacttctggatattgttcttttgtctggggaaatcttgttacctggaggagtaagaagcaatcagttgtagccagaagtagtgcagaagctgagtacagagctcttgcacagggaatctgtgaagggatttggataaaaagggttcttagtgaactgggacaaacgagttcatctccaattctgatgatgtgtgataatcaggcagctataagcatagcacagaaccccatgcatcatgacaggaccaagcatgttgagattgacagacacttcatcacagagaaggtgactagtgagacggttaaattgaactatgttcctaccaagcaccaaaccgcagacatcctcaccaaagctttacctaggcctaacttcaaagacttaacttgcaaggtgggattatatgatatatattctccagcttgagggggagtgttgaaatttggcattcaaagttaaggttcttaatttaggaaagttgttttgggaataaaaaaggagagatcatttaggatgattcagtttcctaattttaggagagaatcaagccagattgatatcttcttattcagtcatttgtgtatatatatgtgtatgatgtgtacctaaaaaatcaataaaggaattcagaaattcttcaatcacattggtgatccatcaagttgcctctaaaagtacaactgcttgcagttgctacagttccttggacaatgttcacaaattcgacacctgacacaacctagaaagcaaccctttcacccagatttgtattgctaagggtacactcatcaagttggaagctcatcacttctgcatctagatggcaccactctattgtaaacaatgaaagatacacatgatttaagattcttggtgacacatctgagaaattcatagtggatctcatggtaggtccacattggagagttagggaatatattttttttcagttgagatcgttcacataaagctacttcctctgatcaacatctatactatagcaggccacatgccctaggacacagttctgtgggcaaccaaagacgagtgtatactgcaaaatggcaaacctgttagtaaggtgaattgtttttttttttttgatcagaaacaaagaaaagtatattaatagaggaaaagatacaggagaaagataagaaaacaaaagaatgatgaaaggtccttcccacaaaacaaaaaactgaacaaaagagaaaacacccaactaaagaaaactaaaaacacagtaaaaacccaacactctcaaacttttgaagcgcacaccgcagtccagttaagttgtaaaacacttagaggaactcctctaaaagttgtagtacacgaggcccaaagagaggaaaagaacagaatcaagtcccataacatctcttccgttctcccttatcctcaaagatccttttatttctctgttgccataccatccagaacaaagtaaggcaagcgatttgccaaagtgtcttgcctcttaaagagttccccaatcctttaaaagcaataaccaacatgtcctcaatactccttggaggaacccaagccaaccctactaaattgaacaacttgtaccaaagtccaatggtaacagggcaatgaagaaaaaggtggcctatcgattctccatttcctttgcaaaaaatgcaccattagggacagagggatttgtaaggtcttctcaattgcaacttgtcattggtgtttaccttcctatgtgctactaaccaagcaagggccttaacctttgagggggcttttgaactccataagaacttggccggaaggaacaagataggatttgagacttttgataaggccaagaaaaaaaatttcattgaaaacaggcctgatgatgacaaaggccactctcttgaatttgccaaagaaggagagaaaaacactaaactaagggaagacattaaactctaaaggagatcaatttctgaatcagtgagattgcgacgaaaattaaaattccaaaacagtggaaatgaattgccaaggacatttgagatagtgaggtttttcacataaataactctataaaaaccagcaaattgagagcacaaagattggttaccctaccaatgatcttcccaaaaacaaattctctctccattccccaccactaggcggacaaaaggggagaaatcctagaaaacttgaacaatagccttccaaggacatctgtgtgaccatttaaccaccatgttggcgtctcatccattaggatgtgtcccataaatactcgcaataaccttatgccaacgaccattcctttctctagggaacctccaaagccatttccctaagtttctcaaagaagtcttcccaaaacccaaacctcccaactcctttggtttactaacaacatcccatttgataagatgatctttcttttcttcccccgccccagaccaaagaaaatccctttgcaacttctcaatctttgaggttattgattctgggattttgaagagggagaggaagtagctagggatgtgagacagacttgactgaattaaagtaatccttcctcccagagacaaaaaaggcctttttccaaccatccaacttcctcgaaattctctcaaccaccggatctcaaaagcctattgtctttgggttccctcccaaaggaaggcctaaataagacaaaggccactctgacactttgcaataaaaaaccgaggccaaactagacagcaactcctgcccagtattaatacctgaaatggtgtttttttctaggttgatttttaaacctgatacttgcccaaaaaccaaaaggatataatctttaggttttgaagatgttccagagaggctttagagaaaaagatggtgtcatttgcaaattataacaaagacactttagtcctatccctccccacaaagaaaccctcagttagcccagtttcctctactttgatcatcaacctacttagaacatctgctactaaagtaaaaaggaaaggagaaagggggtctccttgtctcaagcctttagaggccttaacccaaccctttgcattcccattaactaggattgcaaaacttgatgaagacaaacatccccttatccaagatctccattttggactgaaccccttcctttctagcacatgatctaaaaagccccaatccacatgatcataggccttctcaaaattgattttgaagactaccccttcctcccctgaccttcttttctcatctaccacttcattggctatcaacatagcatccaaaatgtgtctcccttcaacaaaggctccttgagagccagagactgtttcatggaggactttgcgtaaatgccctgataagaccttagtaaggtgaattgttgagagactatgaagttatataacatggcaaaagcatgatagcatcataaagaggaagcttcaaataaaggacataaggattgaaagcatccacacgtaaaatggtttattcctgatttggagtaacagttccatctcttaaagatatgctggaaattttgtatgactactgggaaatagccatctgatattggaaaatattccctttatagaataactagagaaatgtaactttgttccataaaggaaaaatatgttcctatttcacatatatgataagcactctagcatccatatgtttctcaaagaaccatgatatctttacattcttatatgttaatattgctgcttcaaccagaactcttttgattaaaccttagtaaggtaggaatgaatgacactttttgtttgatcaggagccagttagaactgcagtaattgactcaagatt

SEQ ID NO: 11183 - DNA, 17700 bp, Vitis vinifera
  Intron number 1 from transcript GSVIVT01001043001 (locus G SVIVG01001043001) derived from phytozome v7.0 (chr-ID chr1 1; pos 6787495 to 6805194)
tgtacaagcgcgatccccaccagtttcccggcattgtaagaacttataccttcaattcttgtcaccgttttttatttcgctttttcttttttctgtttgtttggtggggatgttggggtgtgtgagcagatcgagctggtgtctgttgggtgttcgggaaacgtgagaaacccctttctttctttctgtctggaatgaatctactgtgctattgcttgggtttgtatagtcgtggtgaggtaaggtgacgggtgttttttagaacgacgaaaaccaagtaaaatgatttagataagtattaatttttttttcttattttcctgggttttcttgtcacccaaacagaagcttgggattttattttattttttattttatttttgaggttgagtatgatttgaacggttgcaaatcatattagtgctgaagtagaataagttgaatctggatgttcttgggattgagtgaggaaatggttgttctgattggaaggaagccagaaaggatgccaaaaaacaaaaacaaaaaatccaacttggaacaggggtaactgcacctggcacaggtaattaaagctgttagccatggtcattggatgcagagaactaagtgaattgtgaaggaaacctagtggatagcatgtggcaatcaccctaggaagatgttgatacaggtggcattggccaacagacacatgactgtgatctgtggcggggtgcaaaatgaatgtgctttgagctcacagtttgacaagctagtcgttatagaaaacttaagaggttattgataggccagtaataaagtgaaacagttggtgagcaacaactctgtgatgatgacatgtagcaaattgcaaaatgagtatgagcttgcaatttcaccagcaaagcaactgaagtacggcccatttaatcatgcatagtgggctccaatgggtaagaggtaataaacatgttggcaaccttcctaatcttatgcattctgatgtccacttgggttcttagtaaggattgggcatcctaaaatatttcaggatttgccaattttctcggtcatggtgtgatgatattgcccccttatcaaagactagaatggtttaactggagtgaggtctaactggaatagttgcatgtcccgcaccataactaggatgggacaccttcctgcctcagttttcatagggagtcgagaagaaaattaagttacaacacatatccaatgtgcttacattttatagctgacatatgttgggcacatattggttagctagaaataaatattctcatgaactataatttgtagagccttgccttgagaggctagccttgaggtgtaagcctcaatagccttttaaaacatggattttgctaagatgaaattggcagggtttgcaaagtgttattggtaatcagtcttatgtgatattgaccatttaggttaaggccctagtattgtgtggcaagtgatgaagttaggactaacgaagaaatacttactagcttgtcataaaaatcattttttagatatgttactgaatcttaagcaaaccacttcccctattagtgagagtaaggccttatttgaggaactaatgttgcattgtggcattcacgaggattactaggtcactattgctaggttttataaatggtttgaggcttgaaattaagcatggggttagtttgcactctcttgagtccttaaaggaagctgatcatgaggctttataaactaaaaagtatcttcgttcttatcctctaaggtgtcacagtttgtccctcctcaactaaacaatggacaaaaccctaatattactacaaattttagggccaccttaaataagagtaacttgaataattcatctagttcctattcacctgcatcctaacttgagtgtcattgttttcacggaaggggacacctagcttctaaatgtccataacccatgaagcctatgagtatttccaacttgagcctatggaaattcctaattgcaaaggggaacattttgaggttaataatgatgaagaagttttatttgtgtatgtgatgagctgtatcttgtctaccccaattgattgtgatgtgtggaaatgtacaagtattttctataattatattccatttaaggataaggcttgtaagttggtcattgatgggggtaacaccatgaatgtggtgtttgagtctgccattgcaaggtttgacttgaagctcaagccccaccctcgtccatttagggtagcttgggtagataagatttctttacctgtcaaggagaggtgtttagttccgcttaaattaagaccttatttgggagacatttaccatgatgtgttacacatggatgtcatacagatctagttaggacatccttggttgtcctatcatgatgtgaagaattttttatgaaacaatacctatgaatttagtcatggaggtagcgggtcttaaaacttgctcaaccaacagttaactagtgaaagcctgttgataagtttattagtagggaaggatctaagcaaagaattcactgtgtctcaggcaatttgatcatgtggggcttaatattggtttgttatatgccctcgtagttgaggaaagtttccacacttcatttgagtctagtttaaattacccttccaaagttactcctatgctggataaatttccaaatgtcatgccttaggacttacttggtgaattgccattcatgagagacattcaactcgctatagttttagcctcaggatcaaaatgacctaatctccctcctaggatggaccatgtggatagggttgaattgagttgataaatagagggtttcttagccgagggttttatttgccatagccttttagtcctatgctgttcctgttttactcacacctaaaaagggtaggtcttggagaatgtatgtggatagtagagccattaacaaaattgaagttaagtaggtttcctattcctcagctagaagatacgatagatgagttagttggttaccaatggttttcaaagatggacttatgttgtggataccatcaaattgggaatacacttggagataaatggaagaaaacctttaaaacctaggatggatcgtatgaatgcttagtgatgccttttggaatgcaacgcccctagtactttttcatgtgagcaatgatgcatgtgttggggccattcttaggaaaattccttattatctattttcatgatatcttgatctatagtcaatctaaggaagagcatttaagtcatcttaggcaagtatttgttgccttgagagatgagaaattgtatgggaaccttaagaagtgttgcttcatgcaacctggattgcttttattaggttttattgtgtttgttcaagggatatctattgacctggactaggtaaaggctataaaagattggcctaaactgaaaacttttactatatttcttagtttccatgggttagcttctttttacaggagttttattcagggagtcaatagcatcattgccccaattattgaatacatgaaaaagaggctttcattttaccccgacaaccataaagttgtctttgtgattaagtagaaaatgattggggtttgtatttggtaacaccttgatctttctatggtttttgatgtagcttgtgatgcttttggagtgcgtataggtggtgtattaatttgggatggtcatcttattgcctactttagtgaaaaactcaatggagcaaaacaaaggtattctacctatgataaggagttctttgccatagtgtaaactctttgtattggcggtactatttgttaccaaagaagtttgtcctttattttgacattaagcccttaagtacctttattcccaacataagttgagtgaaagacatgttgcaagggttgagttcctccaatattacactttcactctcaaacatcattctgggatagaaaataaggacattaatcccttagttgtgttgccactatcatccactctaagtaatagagtggtagcatgcttgttcaaattttgatgttaattttatagatctcttatatcatcttaataaaattcatgccaactttctcattcaggatggtcatttttttcaagggagttagattgtgcatttcttgaccttcacttagggagtttctagtttgagaattacacaagaggtttaattggacattttggtagagataaaactgtagctctagtagaagataggttttattagcctttgttggaagggatgttgctaggattgtttcccaatgccatacctattgattggataaagctaagaaagaaaacacaagtttgtatactccattacttattccactcacaacttagtgtagtcttagcaaggactttgtacttgggttgtctaaaactgctagaggtcatgactccattttggggtagttatggataaattctttttgataagtaaataaagagtgtattaaaaatctaagtgcttcaaagcatacatggagtatacaacgggtgcctaaagtacctccaaaaaacaatgaaaaacgcaaaaaaaagcacccctcaataagaccctgtcaaatccacaaaatctacaattgaaaaagggccaagagctataaacaaattggaccatgcccaaagattacacaaaaaattcaatttaatcctatgaacagaatgctcaatgttttcaaacgccctactattctttactttccagattgtcctaaaaaaaagcacaagggggcagctctccatacctttctcctttttctacccacaacagacctgtgccaacttgtaagcatctctctcactgaagaggaaaggacccaagtcatgctgaaaagcgaaaaaaagaggtgtcaaacaactcgtcttgttacaatggatgagaatgtgatcaaccgattccttctctttgcaacagaggaaacatctattttccataatccaccctcttctctggatgtgatccaaagttaaaactttgttccatgtggcctcctaagcgaagaagcccaccttgggcggtacccaagagttccaaataatgtttgaagggaaatccaattatccacaactctttagttgtggataaattctctgagatgactcattttatcacttgtttaaagactactgatgctacctatgtggcaaagttgtttttagccaaacttgtgaggttgcatgatataccttctaccatggtgtctaataggcttgtcaagtttattagttatttttggaagacacattggaaattgtttggaaccacttcctttgggggggaagagagctccaaagaagaagggggatgatgttctagaattttgacaaaatgctatggggtgagtctttagaaggtgatttgatgtgggtggaaggggatctatgataggattggctttagggtgggagatggcaaaagggtgaagttttggaaagataggtggtgtgggttcacctttagctgtgatattcccaaagctgttttcaattgccactgataaagaggcttgggtggatcagtcatgggagcaaactagggagattggctgttggaattcagtgttctctagacaaataaatgattgatagttgggtgaggtggaaggtttgcttagaaggttgcaagggcacatgatcaatggaggagtagagcatgctatagtttggaggttggtgaaggggggggcactttttctgtcaaatcttactactcctccctagcaggttgttatctgaaaggtttcctcacaagcttggtgtggactccttgggtgttgatgaaagttagtttcattgcttgggaagctttttggaaaaaaattctaactctagattagctaaaaaggaggggttggagccttccaaaaatatgtcattctttaagggtcaagaggagtcaaaccatattctcattcattgtcctaagccaagcatgttgtgacaccttattttggctatttttgatgttcagtgggtgatgccattctcaatcaaggatgccttcgttagttggcggggtgcctttgttgggaagaagaggaagaagacttggaaagttgcacctttgtgcctattttggatattatggaaggagagaaatcgaagagcttttaaagattctaaactaatagaccaaacgatttcatgctccttcatgtacatgtttttggagtgggttagggtacatgtagagtctaattctttgtcccttttagatttcatagattgattgggttgtaagtgaagcgagggtgttgattttttgtctatccctcctttttttggccttatatacatcgtgtatactttaagcgctttttggtgcttttaatacaattgctttacttatcaaaaaaaaaaaaggtttggaaccactttaaagtagtccctactttccatcctcaaatagacgatcaaatagaagttgttaatcgtagcttgggtaacttgcttaggtgcttggttggtgagaaacctagtaattgggatcttgttttacccatcactgaatttgcttacaataattccattaatcaattcataggcaaaaatccttttgaaattgttcatggtctttcatcttgctaacccattgatcttgttcctttgcttattgactaccttattattttgtttaggactttgctgaccatatttgtgacttacatgttgagatacaaccaaaaattgctttgagtatgtcgattataaacttgctgctgatgcacatcataggaatagagagttcaaagattatgattcagatttgtcctgagtgtaaccttaaaaattccataaagaaacttcatgccactcacttgactcctttcctgtccttcgaaggcttggatccaatgcatatttatttgatttaccatcacacataattgtaagtctattttttaatgtggtagatttatttccttattgaggcgcatttgaacctctagtcttctccagggtaatcctccaatcttgtgcctcatgctccttctgttttatcagtaccaattgatgtatttgtggatgtcttggtggatcaatatgttactttcctaactagtggtagtcatcgtttccttgtttgatggaaagattgtcatgatattgataatacttgaattattgataaggagttttgttgacttgatcctaatcttttgtagtaatatccgctacataacttactggagtcaagttcttttcagctagggtgaaatgatgtagataacgatgttaaattacacactcatgcgcatatgtcaggtgtaaatataaaaagtgatagatttttttattcattattgattttagggtatttgttatttattttagggtcatagttaattactaacaatgttttattagagttaggattagtaaaattagtttcctactagagttaggattgtctatctatatatgtgccttgctaactactacaaactttttagttttttcgtattttctttggcatctcttttctacttctatttttctcccttgaattctttttctctctattgttctacatcacttactatcctggttcaggtctgatgatgctgccatcccatctaaagtgaggatgatttcaagatcttgccttaacaattgtttcaaggtcaaggaagccttgtcctttaaatagggtcattaccttcttaccttagtcttgtagagatttcgaggatcgaatgagactatgacatgtccatttatgctgatatcccaccttgccttatgttgagtttttattagcctttagaaatctcccagaaaagtattccccaaaaatatatatcaattttaaacaataattgtttcattgagaaacttaccatctgagttgtccttggtagtttctatccatcttcttggaattttaacttttgacgcaacctcactaatttagaaattgaagttattgaaagactcatgtcttcccttacttttgtgcactagtctctttctaacgcagattctagagcttggtcattatctttttacctaggtgttggattaaagagaaaggatttgcatagagatgacatgtggtgatgtgcttgagccttgcaactcctcaagtaggagaaacatacgggtggctcattgcatagcttatctaggtgtcaatgaaagggcaaggatttgcatggagatgacatgtggtggggtgcttgagccttgcaattgcttaagtaggtgaaaaataaaggtgacttgttgcatcacttaccaatgtgttgatcaaaggcaatgggtttgcatggtgatatgtgatgacgtgcttgagcattgtagcttaagtgggtgaaacatatgagtgacttgttgcatgacttacctatgtgtcagtcaaagggaacggattgcatagagatgacatgtggcgctgtgcttaagccttgtagctgcttaagtaggtgaaataagtttttgagtcaccatgcatggttagttgtcacatgatggaagtgacttagtgtccttttggttgtatgcattccaacaactcatgtgtgggttgcatgagccttgaagctacttaggaatgtctggttgaaatctcttaaaaaaaccaaagtatgtgatgcacttggttgctctgcaagctacatgcaagaaggtgatgcttttgcttgcttagcaaggaggtgattaaaaggtaaaactccaaaatattattcataaaaaactagagtagtcacagtgggtgtggtgggagggatgaaggtaggggtttggtttgttggtataggattttaactattgaattattaatttatataacaaacagttttggttttatgctattgtggaagttcatttttgtatgaagaatagatggatgatagttttatcttttctttctaagaagtgaaacttgaataagaaagtggttataacattgtggcaatttttcagctagaatgctttattcttttgtgaactaagcactattctttagattgaaaaataagtttcctaacaactctttatgagtctcaaaatgaatttgaggctttatatgatagaactgttgttatgttacaaaagaattgcattttataagtttcaattagaacccatgaaatcagggatttggaatatgagaggtcattatgtctgtagtgtactgtgaaatcatggttggagaatgagaaaggctagtatgtgtgtgatatatgaagggaaagaatggagttttatcgtactatgtaatggttgtattaagttcctcaatagaatccagttgggtaatgcttgcatgtgcctaaatagtgttggatatacatctgatgtcatggaatcatgattgtccaccgagagaggcccgcgattatgtgtgggttggtgcataatgcacccaaatgcgtactcttttccattataattttctgtattgttgataacaagtattcaacttttacttattaccttaacagggtgggttcaaaagcgattgataaagctgtatgttgactgctgcaaggagttgtctgagactcccaatattaagttgcttaagaaactgtacaatttggtggtatgaataggctatagaggtttaatgtgtgccatactgtgggtgaaggcaaatttatgactaagtgaatgaggattgatgcgattattggtatttgtggtagtcatgtaattctcacaactaagaagaagaagagataaacctaagagtcatgctaaggccttgatgctgggaataattgtgagtaactgtgaggcatgatgaagtgcaaagttgaaaagtttgaagtggaaaaaaagtcttttcaggtgaagtttgaaggatcgaatggtggaacttgggtatcagtaacagaaaggagccgtggtttagttgtatcagtaggatttggaagggaggaggtggattggttaacggagcatttgaagaaagctgtggagttggagaataccaggggatttacacgaaagtttaggggcgtgaataagattcatttgatggagatttgcttcaacaatagagggcgattcatgaaaatcaccaagattgctacaagaaggaaacctctacttattgtcatccccgagggtgttaaaggtaatggatgggaagtccttaggagggcgattctttcagtgcaagattattctgatcaagtcggagaagagttgaagaagatgtttggcaatacttagatgagtaaaagcatatatagaggtggtcggtcatacgcagaggtggttgcagaggatggaattaggagtggagttccattatcagctggaaaatgggccagagccgtaatatgcgaatgcaaagaaaaagtccaagactggattcatgaaggcaaggccattgcgaggatgatgggtgtaaaaggtatggtgtctataaaccccatttccgccttcaaggggtgtttctttgtgagtacagcaggaagagcaaaatggttccaagagtaggagagtcttttagtgaaaggaaggcttgttctcctaagaagatggacgccaagagaaaatatgattattcttggaaaattcagaaggggttggttagtgttgaaaggccttccttttcacttgtgggaggaagaccagctgaaattcatcttgaagaagtgggggagggtgacggaggtagcaagggaagctgtgaagctgttggacttgtcgaaggtgaagctgtgggtggagatgcatcctaatgtcgtgcttccagcgttgcttgaggtggaagacggggcctggaaacatacaatagcattttcagtcatcggagaagagggtgaagacgacactgtcacgtccgagatatcccaccgtaggtacgagtggttgaaagaggggggttgcgtctctcagacgacaaaatttgcagaggggctacgaggtagtatcaggggtaatgagtgctacagtagggagcttcttccccgggcacgttatcggtgctcaagtacaagcatggcggccaaaagggagaaagaatgggaaggaagcagattgggcttagtagaagaaaacattcttgggcccatagtgcctgagacttctactaaaggccatccagtaagggcccaaagagggagaaggagtcgtgggcttcacgctggcccagacgcccctcaagcccatgacgtagcggcatccccttcttctctccagcgagtgggcttctttgcaaaagcgaccacgcaacctcgttcaggcgatgagagggccggcgtcgaggtaattcatggagaggatggtcgggccgatgagttacaggcccaaacttcatccaaccctagcccaccttcagagatagaagatgtgagttacgggcgtcggactgtgggctgtaagtcaataggcccgtcggggttgggccaagttctaggaggatcgatgtcgtctggcatgagaggtaggtctcgagaggaagaaagtgtagcgagaaaggggaaagctccaatggttcagatggaagacttcacgcaaagggaaaagacgatggattcaaggaagatgtggtccaaactcttccttccaagcgcggctcgccgtcatggacaatggagtagcaacgagcctcttcccatacggagtgcagcgtcacttagcgaagtccgcaatctggaagtggatggtgggatgggatctcaacaaatacgaggtatcagagagagtcccatcttccgttgtcttctgccaaggagatgcaacagctggtcgaaggaagagaccttgacgtcaagaggagagatggaatcgcgaaaatcccaactcaaagatgacaaaggaggatttacgggccgtgcggggtacgatccttgtggttcatcagtcacggtgtcaccttctattccaagaaccagaggtaaagaaatcattttgggaggaaattgtgaaattccgagagtggaaaacttggaggaaagtcagccttttttttcttacctacccgagccttattcctatcctttctgtaatctggaaatgaatcttctgagtccctccggtcctcatctcccaaatttagaatttctttcccagtctccttcggtaaatcaaggtaaatttaaaatttttcctgaaataggcgatgttggccccttaaattttgttggcatccctatccatgttgaggaggagaatcagagagatgtttctaaccaaatgtccgagagatctacccctgggaagtcttctaacctgatgccaggcagtccgggggataatgaggcatccccaccggaagactttcttatcgatggcctgtcccctaggaaaatggctaaagtgcgagaggttctatgctctttggacattaaggtgtactctaggaggaagaatagaggtccttaggtgtttgaatccaggtggatttggtttggaggattagggcctaagtgtttttccatgaaaattatcagttgaaatgttaggggtttgggttcaagtaataagcgaagggtgattaaagatttccttaggttagagaatccggatgttgtgatgattcaggaaacaaaaaaggggaagtgtaacagaaggctaatgggcagtgtctggacggtcagaaataaggattgggttattctctcggcgtgtggggcttcaggagggattttgttcatttgggactcaaaaaagttgtgcaagtaggaggtggtattgggctctttctcgatatcggtcaagttcgccttggagggctatggacctctttggatttctgcagtttatggtccaaatagtccctcacttaggaaggatttttgggtggaactttatgacatttatggtctaacttttccgttgtggtgtgtgggcggtgattttaatgtcataaggagaagttcagaaaaattggggggctctaggctaacttcaagcatgagggactttgatagttttattagagaatgtgaattgcttgatccacctcttcggaacgcatcattcacttggtcaaatatgcaagagtctcccgtgtgtaagagattagaccgttttctttactcaaatgagtgggggcagctctttccccaaggcattcaagaaacccttatcagaaggacctcagatcattggccaattgctttggataccaacccgttcatgtggggcccaacaccttttagatttgagaacatgtggttgcaacatcctagtttcaaggagaactttagaaattggtggaggggttttcaaggaaacggatgggaaggccacaagttcatgaggagattacaatttgttaaagccaaattgaaggaatggaataagctttcttttggagagcttaatgaaaagaaaaaaagtatcctcaaggatttagctaactttgacgccattgagcaggatgggggtctcacctctgaattgttagatcaaagagccttaagaaaaggggagctagaggaattaattttgagggaggaaatccattggagataaaaagctagggtgaaatgggttaaggaaggggattgcaactctaagttttttcataaagtggctaatggcaggcgaaataggaagtatatcaagacattggaaaatgaaaggggtttagtgttgaataatgccgagagaatcacagaggagatcttactttactttgaaaaactctacgcgagtcctataggagagtcttggagtattgaaggattagattggtcccctatttcggaagagagtgcgataagtttggatgcccctttcactgaagaagagatttctaaggccatttttcagatggatagggacaaggctccggggcctgatggctttactattgcagtattccaagactgttgggatgtgattaaggaggatttagtgagagtgttcgtagaatttcataggagcggagttatcaatcaaagcaccaatgcctttttcattgttcttctgcccaaaaagagtacgacaaagaaaatctcagattttagacccattagtttgatcactagtctctataagataatagccaaagtgctctcagggcgtctaagaggggttttacatgaaaccatccattctactcaaggtgcttttgttcaagggagacaaataatggatgcggtcctcatagcaaatgagatagtggatgagagaagacgatcaggggaggaaggtgtcgtctttaaaattgactttgaaaaggcttacgatcacgtaaggtgggattttttagatcaagtgttggagaagaaggggttcagtcctaaatggaggaaatggatgaatggatgtttgtcctcggtatcttatgcagtattggtgaatggtagcgctaaaggttgggttaaggcatcgagaggattaagacaaggtgaccctttatccccctttttgtttactttagtagcagatgtattgagtaggatgcttttgagagcagaggagagaaatatgttggagggtttcagggtgggtagaaacagaactagggtatctcatttgcaatttgccgatgacaccatcttcttttctaacactagggaggaagacttgcagactttcaagagtctttggttagcatttgggcatatttctgggcttaaggtcaatctagacaagagtaatatttatggtatcaatttggatcaagctcatatttcaagattggctgagacgcttgaatgcaaggcttttggctggcctatactctatctgggtcttcctttgggtgggaaccctagagcaggtggattttgggatcctgtgattgagagaatttcaagaagattagatggttggcaaaaggcatacctatccttcggagggaggataactctcatccaatcttgccttacccatatgccctattactttctttctttatttaagttacccgcttcagtcgctgcaaaaatcgagaggttgcagagggattttttatggtcagggattggggaaggcaaaaaggatcatttagtcaggtgggatgtcgtgtgtaaaccgaaggaaatagggggtttgggttttgggaatatttctctgaggaatctcgctcttttagggaaatggctatggaggtaccctagagagggttcagctctatggcatcaggtcatactaagcatttatggttcacactccaatggttgggatgccaacacaatagtcagatggtcacatcgctgtccttggaaggctattactcaagtctttcaggagttttcctcgtttactcggtttgtggtaggaaatggggaaagaattcagttctgggaagatttgtggtggggggaccaatctttgggatcccaatatccaagtctatttagagtagtcttggataaaagcatacctatttcttcagttctcggtcctactcgtcctttctcttggaatttaaatttccgtcgtaacctgtcagattctgagatagaggacttagaaggcctcatgcgatctctcgatagattgcatttatctccttcggttctagatgccagattgtggcccttatcttcttcagggctttttttagttaaatctttctttctagctttatcccaattttctggatctcctcaggtttttccttctaagttcgtttggaattctcaaattcctttcaaagtgcagtccttcatctggttagtggcacacaagaaggtgaatactaatgacatgctacaagtgagaagaccctacaaagcccttagtccggatatttgtattctgtgcatgaagcatggggaatcaactgatcatatttttcttcattgctccttgacgattaggttatgacacatgttatttcagttagctaagatagattgggtccccccgaggagcatccttgacatgatgtacatcaaatttaatggatttggttcgtctaagagggagatagccttgtggcaagctgcaaacatcgctcttattcggattgtgtggagggaaagaaatgcgaggatttttaaggataaagcaaggaatttagagtttctttgggactctattgttttccttgcttctctttgggcttattgttccaaggtttcgaaggggactccccttaatgtgatacaacttgattggatagcagtgtgtactccataaggagtggtctttttagagtgtttgcttgtttttcagtgtatttttctatagtttagatttctttggcaggaggatacctcatccttcttttgtacttatttttatctatcaataaatctttgtgtcgtttccaataaaaaaaaaaaaaaaaaataatgcacccaaatgcatgtttgcccgtatacactggtacccccatacacacgtacaccaccagatttgatgtgtgaaaggaaagtgaaatcacattactttatataattgcaatattttgctttcctaaccatctcagctgttcttggtaattcctttctattctcttggaattttagtttttgtcataatcttactgatattaaaattgaacttcttgaaagactcatgttttcccttgtttcagtgcacttgtttccttttactgtagattcacaagcctagtttttatcctcctcaagcttattcatagttaaatcttttttcttgaccgtgtccaattactcaaatcctactttgttccttttggccatttttctgtggaaaccaaaagccccctcaaaggttatgaccttttcttggttagtagcacataggaaggtaaataccaaagacatgttacagttgagaagaccttacaaatctcttagtactcattggtgcattttatgcaaaggaaatagagaatcaattgatcatctttttctgcattgttcttgaaatttgagattatggaacaagctctttagtttaacaaggatggatggggttctgcctaggagtattgcagatattatgattatttattttagaggattaaagaattcaatcagaggaaagactctttggcaaattgcttgcctcactctattgtggactgtgtgcttagagagaaatgttaggaattttgtggaaaaaatggagattggaagggatgttgtgggatttgtttcacttctactcctctgtttgggcttcttgtactaccgcttttagaagagttccacttaacgttattcaactcaactggctttcggtttgtatttcaaaagtttgagatagttggggattgcctttgtgtatggtttttgtatagtggggagtatgtattactttgatcaggacgcgtattttgagggaagaacttttcattcttcttttgtaccttaattatcatcaataaataatttgtttctgtttaaaaaaaaaaaattctacttccctaaagatttctcatatatgatatataaaatgaaaggatgaaatcccattgttttatgtacttgttacactcagcttctcaaaataatccattcatgtaatttttgcataggcccaacttaacttagttgtattgatggggaggatcttttttcctttttccttgctacctgtacttaagatggaaaattttggtcttgttttcttgaaataataatggcttatctttgcctaatggcatacaaattggttttttttttgcatagctcatttaactctgtagtttgcattgagctcctttataattttttttttttcctctcgaagtattacttatggtttatgccaacattttcttgtgcagaaaccgattaggaggggtgttgtaggatatacact

SEQ ID NO: 11184 - DNA, 22201 bp, Vitis vinifera
  Intron number 1 from transcript GSVIVT01010197001 (locus G SVIVG01010197001) derived from phytozome v7.0 (chr-ID chr1 ; pos 17217454 to 17239654 reverse strand)
ccaccctcaccttctccttctcatcactgttccctgtaatttctctctttcactctgtctctccctttatttatttgttggcttaactataatctagaagacgttgacaaagatcattgatgaatttttgagttttcatgacctggggctccgttgcttttcccggagatgatttttggagtattttttttccacgaaaaaataaaaaaattaaattctgttgcaaagagattgattttttctgagttctttttttggtggaagccgatggagtgttagaacaacggttttgcgataactggtgtaaaaataccaaccaattcagtaggaatgtagtggatatgaggtagaattctgtgttttgatctcaaaagtaagcataaaagttatggctgtctgcagaaggaccatgtacagtgattatcccactggaagggattggtatgtgctaaaataggcacgtgacctacttgaaattataggcttcaaatattaagcatggcattacaagattgaagggcgactataaaattgacatttgttcttgataatgtcaagcctacaccattgtgcattctcatgtttattcaagttattagtgtgttttatccaaacttgaggggctttactgaaaacatgtttgtaggaaggctaacatgcttatgcttcatataaaaaggtattctgtagggcatgaagggatttgcttatataatttttttttttttttgataagtaaagtatattcaatcaaaaggcaaaacgccacaaagtatacagggggtatacaaggcagctaagcctcaaaaaacaacaaaaacagaatcacctccctttaagtggaagccatctactcaaggaatcctataagggagaacggctcctcacctacatacagtttgacccaactccacaaattacaaacaaaaaaattctttaacttttgaacgttcaacacccccccccccctaaaggctaatctattcctttccttccacaccgtccaaaaaatacacaacggaatggcatcccaaatctttttccttttctttcccacaaacgaacccctccaactaactaagacttcctttacagtttctgggaacacccatttcacgtcaactaaaccaaacactatatcccatagaactctaaccactgtacagtgtatgagtatatgatttacgctttcttcctcacaaccacacagaaagcagctatttggaagttgtaaacctcttctttgaagtctatccaaagtcagcaccctcccccacgtcgcctcccatgcaaaaaaacaaactttagttggcacccttgtcacccagatgcttcttgaaggaaagcctgaatcatcagaactcgccaacaagttatacgcttccttgaccctgaattgcccccttcttccttttctccacaggactgaatcttcttccccaaagggtttgtgacccctcaagatctgaagaaaatccccaaccaaccccaattcccaatcattgaaatccctcaaaaaatttagattccaatttccttgtcccgaattttgatcccacatttcctcaaccgtttgttcctttgaaccgccatagcaaagagatgaggaaaacaatgggacaacgctgtctctgaacaccatacatctgtccaaaatctgattgtgttgcccttccctactttgaagatcatgttattccagcaccattctgattctttccaaatctccttccaaacccctacacccaccgcccccatagccttctttggcctccacccaaaatcctcctgcccatacttcaccttgatcacttgtttccaaagattatctttgtcacaagcataccttcatatccatttgccaagtaatgctttgttcaacaaggctagctttctaatgcctagcccacctttagccttatctgtacataccacctcccaattaaccaaatgagttttcccctccatatttcctcctccccacaaaaagtccctttgcactttctcaagtcttctcgcaaccatcttgggcatcctgaaaatagacatttggtagattggcatgctagccaaagtgctttttattaaagtgactcttccctctttagatatatattgccttttccaaagagctagcctcctcctgactctctcttccaccccatcccacatataaggcgctctattgagaacccctaagggtagacccaagtactgagaaggtaaagaccccaccctgcaccctagctcaacagccaactcctccatctccaccacctctcccactggaatgatttcactcttggctagattaatccttagacctgatgccgcttcaaaccaaaataaaatccaacttaaatgagttaaatggtcctttctggcctcacagaatatgatggtgttgtcagcaaagaacaagtgagagatattcaaaggaggttcactaccgccccttatgttgcaccctgataagaagcccccctccacagctctcctaataagaacatctagcactttcattcccataacaaagagataaggagacaagggatctccttgtctaagacctttggagctaggaaagaaacctgcaggcactccattaaccatcactgagaatttagctgaagataggcaactccacatccaccccacccacttagacccaaagcccattttctgcaacaccttcaatagaaacttccaattgatactgtcataagctttttctatatccagtttgcatataagacccttttcttttcgtttttgccatgagtctatcacttcatttgcaattagagaagcgtcaagaatttgtcttcccctcataaaggcattctgagaagtagagaccaccttaccaaccactctcttcaatctgttagccagcactttagccagtaacttgtaaagaccccctaagagactaataggtctaaagtctccaaggtcctcagcaccacatttcttggggatcaaaaccaaaaaagtattgttaaggcttttgaggaaagagctatgatcatagaattccttgaacatttctataatctcctctttaataaactcccaacagctttgccaaaaagccagagtaaaaccatccggaccaggggctttatccccattcatctccatcagagccctatgaatttcatcctctgtaaagggcctctccagtatctcagcctcttcttgactgatctgatcaagctgaagactcccaatatccgccttccaccccgtatcttttgaaagtagctctttaaacgcattagcaattccttctctaatttcctgctcctctagaaaccactctccattgatcttaattctctccatacaattatttctacgatgagcacttgccatgcgatgaaagaaacccgtgtttctatccccctttttcagccatatctccctggaaagttgtctccagtgagtttcctccataatcacccattttttgtaattttcttttgcctctttcttaagctctgattcatccatagtcagaattctatcattttcctccctatcccagaattccacctgttgcaaagctgcagatttgttgctctccagcttaccaaatacttctctattccacactttcagcttctgtttgatttccttcatcttagtagccaacttgtaactagcactgcccctaacatcaattccttgccaccagctgcgcacaagctctttaaaaccctcagtcttaagccacatattttcaaatctgaatggggtcgggcctcgtcttatcccaccccccactagcataattgggaaatgatcggaaaccggacggggcagcctgcactggttaatcccactgaattgatctatccaactaggagacacaaggaacctgtccaaacgtgcccaagtctgattatttagacccccattccaagtaaactctcccccctgaaaaggaagatccaccagcccaagatcattcacagtttcagcaaaatttctcattgctgagctaattctcctctgactactcctttccctcgagaacaaagtaatgttaaaatccccccctatgcaccaaggatcctcccacagccctctaatcgccccaaactcttcccataaagcatccctctctaccttagagaaagggccatacactcctgtaaaaacccatacagtcccatcttctacattacggaatctgcaggacaaggtaaactgtccctcctcccaatctagcatgtccagagtccttctatcctagcatataaaaatacctcccgaagctccctccgcattcactgctttccagcctaggaatctcccggagcctatacttctcgcaatgctatccgtcatacactgcaattttgtctcctaaatgcacattaagtccaccctctgatttcttatgaacgtcttaatcacttttattttggagctatcatttgctcccctcacgttccagctcaaaattttcaccttcattggataattacaatttggcgccctttgccctgtaccgagcctttctgttttacccctccctcatagtttatggagcattttagtcgttttaactccctttcaaacttagacttttccagtaactctttgctatgtattttctcccttcttttcctgatctttgtcaaaaaatttagtatttccttctccaatccctccgtagggaagcccagaaacttgctgaatcttgccaagccactctcttcccagttaccctccagctcacttctctcaacttgagcatcatctatatcgcctaccccttccatctccctacctttgtcactgttgcagtggatgactctcagttccttacattccttaatccgttcattgcaagccttatacactgttaaccacattgaattatcggcccgaccctcctcatccaaatccccagaatgatcgaaaaactccccccccagagtccgatcaaaaagaaaagaattgagatgagagttccccatttcccttttcccctaggaaccaacccccattccatacctcattgattcctcttcaagcgccctatccgtctctgtcagcctcaccactccttgtagcttccttgtgtccttagtctccctcgcaacaaagaactctgcttctggaggatagctgggcgcagaacacttcaaaataaggcccgtcacctcttggactgctaatgaatttgggccctcccttatttttccaccttgatcgagctgctgggtgcaggcctttgaccaaaacaggcctttgtttgacaactgggctaaaggcgaagctgggcctttagaatagcagcccacatcttccctgccatatgatggacctgcgtctgggccaacatcacttgcagccacccctttcttcttcaagtccatggacccaaacatcaggctaggcccaccatccctccttgtttcctttgggcccgcgattgggcttaaagacttcatttccccagatgagacccaagtccgggttgtcgggcttaaatctggactgatctcaacccgacccgacccgaccccctgcaccaccgtcccatcgtctgacgggtgcagcatctcaagcctcccactcccccaatccttcatcacacgctgccccgcgcgtgaatcctcctcacccctaacctacctgctatggcgatcaacttcatccctgcacttcctcctcaacaccggccaacattcccaccataggggcacaacgtagctttcttcctccccttcgatttccagtacgcttggtctagcttcccctctccatttcactaggattctggcccattggagatctctcatcgatctcgtatgttcatcgacggtgataaaaccaccacatgcatccctcactctcctcaaaatttctgggctccataacgagattgggagcccaacaatccttacccagacttcccttctctcttccccctctgcccaacatccgctcctagggctccagtgttccaaccttacctgggttccttcccacgcgcagctcccagaggaaacgactcgtctggcctcttccaaatcctcaaattccagcagcgctttcctcttgttcaacttagccagccctaggttacctttgaggtcccaagactttgcccagaatttcccccacttctcaatatcatcttccccccctgacccatctctccagctcgccacaacacaatgtttcaatttcttttttaaaccttctgactcctcttttttcaccttcactgcaacggcatttgagttacccgtcggtgactttctcaccattgttgcatatgatcctcccatagcaactttctccacaacctttcccttgtgtttttcaggatttttaccaaaaaaccctaacacctgtttaagcttctccgccatgatcgtccaccccctcttatccctacggcctcttgggacgaagatgcagaacctcttcccctctacatcggagacccctagccgtataaacccccccgctctgtttgtccctcgagtcatggagtacactctcccctgctccttccattcccttccccatctggtttctttctcacccttgatacagagattcaacccttccaagaagaacgctaaactatccgctcccagtcggacccatgacgaggcccctcccttcttctccacaatgcatccttggatctttcctcttctgtcttccactacaatctcaaacgccttggactccactgtaaaactactctccttccttcttttgattaagggggatgggggttggagcccttcccttgtttctctatccctttcaatgattgggaggtgggatgtgtagagaggtttctgtcatgtttgtatgggttgagggtgtgtaaggatgagagataaagagcggtaagtttacagtgaagtctctctacaccactttagagttggagacgtcagtttcttttccattgagtttcatatggaaggtgtgggtgcaacctaaagtcagtttcttttattgggaggcaacttagggaattagatgttttctatgccatattgaggaagagtccatagagatctccttatccattgtgtaaaggaaacgattttatgggagttgcttttttccttttttggagtgttttaggtgcttctctcatcggttcgagagacacttctaaattgacatggttcttttgtgggtaaaaaacataggaaggtttggagagtaggttccttatgcatcttttagatagtttggaaggcaaagaataaaattgcctttgatggagatgggctttccctctaaagactaaaaaattcttttgtttgttttctgtggttggagatcaacatttttataaatgatgcttgctcaactctttttagtctttttgattggttgagatcttgttgaggttggtgtcgttttagtaattattgttttatagctttgacttttggtgttaccacttggcggttggtgtaaattttatgtatattgaggttcactcttttagtggccctttttaatatatttaccttcttatctatcaaaaaagaaaaaaaaaaaaaagaattcatcatgttacctctatttatgtagagatttgattttctgcccttagttatctttccaaccctcacttgactccaatagttggagatctcttggaattttctttgagaagtcactcacattggataaatgttcagggtaaatgtaaatgatgcaaatagaagtaagcttgttctccttgaacttggttttttgttagaccttaaaatcaacattgaaaatgcaccttttttggcataaatgtgaaccaagatagcttttcctctctagcctccttcgtatgttgtaagcaagtgattggccttcatgtaatctaggccttcctttggaagggaaccttagggctttatttttagaacccgtgattgataggattttgagaagcttggatggttggaggaaagtttttctttctcttggactaaaagcattctaattcaatcttttttggttaatatccccttacatgatctttttatattcataatcccaattgcttttgcttctagattgagaaaatccactttgaatttctttggagaaaagagcaaagatcatcttatcaattggaatcaagtttgcaagttaaaggatgaaaatttggggtttgagggttttccattaggaatagaccatattaggttatggccttggaggtttcttagggagattgatccattgtcacatagctcatcggaagtatctaacagtggcttaacaaaagatgcaattccaacattgtggttaggtggtaacacagatgccccttggaatacatctttgaaaggttcttacatttttcctttttttgttttcttctcaatgggaggtggcttgaaaattcatttataggcagacctaggaatcgaccttttcatactctctaccttatgctttcttgcatttatttatttttttcataggtaaaaaggataatatattaaagatgcctacaagaaggctcatccaattacacacgaagtatacaattagggccaaatggcaaacattccaaatggtaatagaggagaaagaaaaacaaacacccaccacctccttaacaatgaccaacccccaagcgagttggaatgcccttagtaggagctcttaaaaccaaggaatgcccctaacctacacccattgatacatatttggaaaaataaaaaattctcccaaaaccctaacttaaccaatctctctccaacaaacaagaaacgaaaaagcagtctcacaatactagtgttgaattcctactgctcctttcccttcccttaacaatgagcaaaaaactattgtaattgaccgagcattctagtttttagatcttcctctccaaacgggatgccaagagagttttcctctttccttttgagaccttaaccttatgcccttttcttgcctccatttttctcaataaggtgttgatctccttttcaaaacctacaacatgcattcccatgaagttactgaaattagcaaacatattgggaaggtcatcaaagttatgctcctttcccatcaaaccgcatctaaaccctaaggccttacaggactccaactcctcagccttgatcaccatttccttaccgaaaggatcctttgcatcacttctcgaacaatctaacaaactgccattttgaagcatcatccttagcggctgacatcaagaacccataggccccaaggattgccttgcctttgattgaaactttgaaccactatcaagggtgggcaacctagcagaagaagaaaggggagtagaatcctccactccacaactatcttctaaaagcctaggttttgcggacctcctcctaaccatcgaagcctctaaagcacccaaaaaagaagaagaagaagaagcacccaaaccccccaaaggaataatcgacaaaggagaaacacctagaaaccttgtgactttgatgggggaaagccttttaaagtctattcaaggaagaaagggaagacctaagtaaactttaagtaggattaatattaattagaattgaattatgattagtttttgttggagtctaattaggattagctagttaagttataatataattagaatttgagttataataggtttattggagtcctaatagactttggatgttataattaaaatttgagtcataataggttattagagtcccaatagactttggatttcttagagaagcctataaatagactaatcaatataaatcaaaggaatgaattgattgatattaatattatgtttttcttcattacaagggttgcaatcctcattgattttcttataggtgagactcctagaaggccttagtgagactttaagtttttccatcttttcttcgttgttttttctctctttatttcttatcttatgtttttctctaccataaaatttattctttgttcctctccttacatcctaaaaataaaaccttagtccacctacttttgagtataggcaaccatcctagggttgtcttacatcagacttcctttaacaaagtgttgtcagagggcaagaggcctccttgcgtctgcatgtcagtccttgggagcaccccatctcgtagtgaaataagcaatgggataggggctgcccaactcctctcctccaagcgcaaacccccaatcccactgctttgcttctccagacttctttcatctttgggggcaagggaaaaggaagaggaaggagcacatgagggctccattaaaagaggagaggcacacttggggttagagattttcctatatctcatctttagacttgttctaactctcttgtttcttaaactttggcttttgacttttcttttatattaagaaattaatgacttatacttgctcaatctatagtttatttacttcttccctcctccccccctccccccctccctctcttttattgtacctcccttaatgaaaaatacataggtatttaacatacatggtagagaaacactacctaaaattagctaactaaaatcctagtgtagaggagataaatctcctattaatttagggaacaaaattgggttacatcctagcccaaatcctattaaataaggaaagaaggcttaaatacaaaagtaataaacaactgtaaaaaccatttgtaaaatgactgaaaatgcaaaactgaaattccactctctccctcaagctagactataaatattgatcatacctagcttgcaactcaagtcttcaaaattagatcttggaagtgctttagtgagaacatcaactgtttgaagacctgctggagtgtaaatcaaagtgattattctttccttcatcttctctttgatgaaatgacaatttgtctccacatgtttcgttcagtcatggtgaacaaggttcttgacaatgcttatggcaacttgattgtcacaaaacatcttcataggtttttctaatggaatttttaattccactggtaaccttactaaccatattccctcacaaattccatgagccacagctctaaactctacctttgcactgctccaagttacaacggattgtttgttgctttgccgagcaactaaatttccccacacataagtaaaataccttggagttgatcttcggatcttcaggctataattgatccaacctagtctgcatttgagaagatttcaacattctttttcattgtcctcttgaaatataggcccttgccagctgtgatcttgagatgtcttagtattcgatacacaacttccacgtgttcctctattggatgattcatgaattgtggtgtagaggaaggtttgtttcaaaacgaaacagaaaaacactcaagaacaaacacaaagatcacaataggatttggaaattggggaataattctaataaattatattgaactgattttaacaattataataaacctttaaataatgtttgtaatgcaaaataaaggaaataattgaaataagaaattggaaataggaaacgaagataattggaaacttttcctagaaataggaaacaaagatagtaaagcaaataaacttaaaataggaaactgatgatgatcgtgtgttgcatcaatcccttccacttgaagaaaactcgtcctcgagttttgtggttgtgaagaaaactcatccgggagaaagtattcaaagatatcagcaatgttgaaagtattgaaaatgttcatattagttggaagatcaatcttgtaagcattatcaccaatcttttgaaagacgcaagaatgaccaaatttcttgtctttaagcttatagtacatgctagcaggaaaacgatttttgtggagatggaccatcactaaatcaccttcattgaacaacttaaggcgtcggttttagtctgcagcagtcttgtaacgaagatcaacctcttctaaattcttcttcacttcttgatgaatccattaaatacgctctacaaactcctcagtgttatgattgacatcatgagaaggaggaagacgaatcaaatccattgtatgccttggaacactagtgtagacaacttcaaaaggagtcttcttggtagaacaattaggcatactcttaaaagcaaactcaatctgtggaagggcaacatcccattgctttggtttatctccactaatagattgtatcatattgccaaaagtgcgattagccactttagtttgcccattggtttggggatggctcgtgctactatattgcaaagaagtagcaaacaatttccatggagttctccaaaaatgactgaggaatttcacatccctatcagaagttattgaaccatgtaggtgaacaatttcacggaaaaataaattggccacataagaagcgtaaggaggaagtgaaccatcttagaaaattgatcaactacaaccaaaatagaatcaacaccatgttgagttcttgggaggccaagaacaaaatccatagttaaatcttgccaaatcatctctggagtaggtaaagaagtataaaaagcagtattttgaacttgtcctttgactctttgacacattgggcaatgctgagtgaaacacccaacatcttgtttgagttggggccaataaaatctctcctctaccaaggtgattgctttatctcggtcaacatgtcctcttaatcagccaacatgcaattatgcaataaaatggtcatgcaaagaagaaagagggatacataattgtgtaccccaaaataaaaatcaatcctgaataagtcagtaacaaactccttattgttgcatcatgtccatatgccactaacatcctcataaatagtataagtatccttcaaataatcaaaccccaccaccttagtactaattgtagctaataaagaggctcgtcgactcaatgcatcaactactttattctattggctaggatcatgtttgataacaaaagtgaacttttgtaaaaagtcaatccatcgagcatgcattcaattcattgtcttttgagaattgatgaactttaaagcttgatgatccgcaaatagcgttaactctcattgaaacaaaaaatgctcccaatactttaaggctcaaacaactgcataaaattcaagctcataagtagaccacttttgtcgaggttcactaaccttttcactgaaaaattccactaggtgaccctcttaggataagacagtcccaattcccaaaactgatgcatcacattcaacctcaaatactttctcaaaattggggagtgctaacactagtgtagcgcacaactttacttttattaattcaaagttgtcttcctgcgctttctcccattggaactagcctttcttcaaacaattggtaataggttccatgattgtactaagtcctcaaagaaaacgcctgtaaaaagtggctaaaccgtggaaactttgcacttcacgcacggttttaggagctagccattcctgaattactgtcaccttcatctcatcaatttgaataccatcctttcccactataaatccaaggaataaaagatggttagtcataaagctacacttcttaagattgatatacaatttattagctcgtaaggctaagagaactttcctgagatgtgataagtgctcctcctcattcttactgtagatgagaatatcatcgaaataaccaccacaaattttccaataaatggacgaagaacttggttcatcaaccacatgaatgtgattggtgcatttaatagctcaaatggcatcactagccattcataaaggccatctttagttttgaaagccatttttcacttatagcctagtcgaatacgaatttgatgatagccactttgtaaatcaagtttggtaaacaccataacaccttctaacctatcaagcatgccattaagacgtgggataggaaagcgatccttgatcattattttgttgatagtgtgattgtccacacacatgtgccaactaccatccttctttggggtgagtaaaacttggattgcacaaggactcatgctctcacgaattaagcccttatcaagcaactcgttaagttgtcactgcaactctttatgctcagttgggctcatacgataatgtggcaagttaggcaaactagcttcagttactaaatcgatatggtgttgaatatttcgcataggaggtaactcattaggagataagtcaggaaaatcaacatgtacctcttgaaacttggtgggaatatcaatagttgcttcagattgacccttaactaccaatgctataacaaaattcggctccttgacttgcttaaagaaatctgggcctgttatgttggggaatagcggttgatcttcctaagtaactgaattgttttatgatgattgagactctgacatcaaagcaatcttcttgtcaaaccaccaaaaaacgaaagtagtatctcgacccttataagtggcatcaacattatagtgccatagcctccccaataaaatatgacaaatgtccatatccaccacgtcacatattatctcatctttataatacttcccaatcgacaaaagaaccttgcaaacttctagcacctgaactactgggcccttcataatccatgcaatcttgtatagagaaggatgcttctcaatctttaaatttagtgttttcaccaaaaccttggaaacaatattctcactacttccactgtcaatgatcatgttgcacactttattacgaatagtgcattgaatccaaaatatttagtgtcatcgagagtcgtttggtttctttggggtaaacaaaactcgttggataatgtacaccactttttctcctacatctccttctgcaaactcaacaccctcatgtatatcttcttcgagaacttgttcctcttcatcgcttccttcttttgtaaggttaacggatcgtctgttcgggcaattatttgaaatatggcctgactggttgcatcataaacatttcctaagatttggatgcgcataagggtcattattgactagttgttgctgttggtttcgaccttgagtattagatcgaatagaggctgaagtttcaattcgattctacgccgaattttgagtggaaggggcatctttattgctatcattgttgatgcctgaagttgttgaccctttcggagtagaagaagctttttgggttggttgctgaaagttactttgagcacgcgtcgtggacctattgatatgattttccgctttcatcaacaaattaactgcatttgtcatggtctaagccccttgaagagccagttgatcttaaataaccagctttaggcctccaatataatgagtaattaattgatcctccgacttagacaaattaacgtggacaatggacatttaattgataaaattcctccgtgtatttgtttacagtgtggttggcttgtcgacaattttgatattgttgatataaaaattgttcataatttggagggagaaatcgcctttgtaacaaccgcttcattttgggccaagtatgaacatgttgttttccttgccgttgatgattatattgaagttgttcccaccatgcaaaagctccacctttcaacttatacgtcatgagttttatttgattttcttttgaaatattcaaatagtcaaaaaagtttttgaaggtatggacccaatcaagaaagtcttcaatgtgtaatcgactgttgaaactcggtaaatccatcttcatcttaaattcttggttattttgaccatgattgttagcccgataatcgaaatgaaaatcatcttcttctctagatgaactatccaacttccgttgctacctttgttgaatattcctccgttgtggaagtcgaaaatcatcagtatcttgaaaaggtggaaaaaaactcatcttgttcataaaaaacccttgtaactgctcgtggaaagccaccacgaacttgccgttgtcactgattgaaaccccttgttggaggttgttgttgtcacactgcttaggagctccctaattttgacactcatacacctgtaatggaaggggctcgtgaaaatcacgattcgcagttggaccagtgtgaatcatgcctccgtcatcgatttgtgccccgacctatggctggtgttagttttcgtagctgccctcctgctggttgccacattggtctggtagtcgctccatgggtttgtgcttcccttcgacagtcaacacaaccaccatctatgtttggttgcgaagagtttcatcgatcccgtcgagttgttgcttgattttttcgaatttccgtttgtcgttgatggttcgtttccctttagaatcgttgtcaaccatcagattgaggtaaaaatacttgttttgataccaattttggtgtagcggaaggtttggaaaagagacggaaaaacactcaagaacaaacacaaagatcacaataggatatgaaaattagggaataattctgataaattatattgaactgattctaacaatcataataaacttttaaataatgtttgtaatgcaaaataaaggaaataattgaaataagaaactagaaataggaaattaagataattagaaacttttcctagaaataagaaatgaagataattgaaaattaggaaaactaggaaatcaattttaaacaaaatagtaaagcaaataaacttaaaataagaaactaatgatgattgcgtgctgcatcaaattgactcgccacactgactaagaaaccaatgttaggtctagtatgagaaaagtaaaaatcccacaagacgctggtgtctttctttatccataggggcactttgttctttagttcctagtttgattgtgtgatccataagagtatctgcaggcttgcatctgagtatcctcgtcttttagtaaatcaaggatatacttttattgagagactgcaaagcccttttttgacctagttatttctattccaaggaagtatttgagatttcctgtatctttgatttcaaactctttagcaagaaaattcttaagtttgcatagttcttcctcatgatctccaattaggatgatatcatttacatatacaatgataatggccatctttcccttgagagagttttgaacaaacaatgtgtggtcagactgatattgagactatccatacctttttacaacttttgtagatctgttaaatcaagtgggcggagactttttgagacatacaaggatttcttgagcctataaactttattaatatttgatcttgtctcaatgcttgaagggatttccatatacatttcttcttccaagtagccatttagaaatgcattttggacacctagttgatggagagaccaatctaagttaacatccaatgataacaaaacccagatagtgttaagcttggcaataggagcaaatgtctcttgatagtcaattccataggtctgggtgaatccctttccaaccaaatgagcattgaacctatccacacttgcatttgccttgtactttatggtgaatatccatttacacccaactggatttttccctttgggtaattccataatttccttatgtcccattcttttctagagctcgaatttcttctccaacgacagccttctattcaggaatttaaagagattcttggatgttgttaggaatctggacgtctataagactaatcacaaagacatgaaaaacaggtgacaatccatcatatgataaaaaattataaattgaatgatttatacaaggttatacccctttcctcttgaaaaacaggtgacaatccatcataagataaaaaattatagatcgaatgatttatacaggatcatactcctttcctcttggcaatgggcagattaagactgtcattctgtaactcattagtgacagggtcagaatttgtgttacttggggaaatttcactgtggtttgaattcggttctgcctcatgaacttgctcggggtatgttctttgctctgtttccttttgagtcttcttcctgtagtagacaatgaagtcattgttgttggcaggttgtgagtgaattgaatgaggacgagttctaggtggctcaaccatggtgtctaaagactcgatcattggaggactttgactacgagggatatgggactggggaatatgagaatcaagtgtttgaagactgctggttgtgatttctgttttccaaaattgatattctttagtggtatgctccctctgaatatcagatttagaatatgattgattttcgaaaaatgttacatccatggagttattatagaattttctggttactggggagtaacatttgtagcctttcaggtttagtgaatacctaagaaatacacacttgattgctggaagattgagcttacttaacacttttgatggaatagtggatagaagttgagtatctggataagatttgagaaggacttggcatggggtttgaaaacggaggacacgagaaaacattctattaataagtacaacttctccccaaaagaatttgggaacattggtggagaacattatagacctagtaacttctaaaaggtgtctattttctctcagtaatcccattttgttaaggagtttcaatgcatgaactttgatgaacaatgccttcgcttaagaggaaatctcccataatggagttgaaatattctctagtattgttagttttcaacacttgaatttttgcatggaattcgatctgaatcatgttattaaaatttttgaaaatttgatccacttccgatttttccttcataagaaatatccaagtaattctagtatgatcatccataaaaaaaaaaaaaaataccatctagaaattgtcacattttttattttagaggacccccaaatgttgctatggatcatagaaaaaggataagatgtatccaagtaattctagtatgatcatccataaaaaaaaaaaaaaaaatccatctagaaattgtcacattttttattttagaggacccccaaatgttgctatggatcatagaaaaaggataagatgatttatatgattgaaggggataagaattgtgaacatgatttcataattgacaaatctcaaattcctctttacttattaaaaaaaaataaaaataattgacaaatctcacattggaacactttagaatctttattgaataatgaaggaaaaagctgtttaagatacattaaacttggatgaccttgacaatagtgccatagcatgataacactatcgttatttgaactggaaactaaaagagaacgtgttgtacaaaataactcccaaacctccaaacctcccaaccagacaaacttgaacttctcttccctactttgctcctcactctccccaagttggagctagaccgcatctcccaccaagcccatattcttcctaactacatttgcgaaagtctcatttccagatgaccatagagctactcctcttctctgttggaatgaccacttacctggccttagttgcaagaacaacccctaacgaacgaagtttctttgtcaaaatggaccaacccccatggagacccctcccttctagaaagatcaaggcaaaccactttgcatttgccatgataacaaagcagaaaatgaacctccttgcccccatttgattgactctccagcttgaactccctacctcccttcttccatcatttgctccactttcgcaactctttgtctcaaaagaagcttccaccccttctaacaagcatcctaaactgagctccctgaatctcacctagactaaaaagcctttgcctcattccacaatgacacctctcaacttcccaccaacctcctctatagaaagatcaaaggactttgaatccattgtaaaccaacactgtcctcctctcatggtgacattataaagagaattgaatcataaagacataggaagtagcatccacaaggctaatatttcacacaatcgtcttcctctctgatgactaaaatggacactatgaaacatcagaatccatctttcacctttaatagcattggtaacaccatgtatggttccaattctattctcatcttgatttttgaaagattaactagctttaaaaagcatcatctatcttggtaactcttccccgacccttcatcaaatgatgcaagtgattcttggaccataaatggaagggaaggcctctagttctatccaatgtcacctagatttctgagtacttagtgtttgcccttaatgataatctccttaaagttattgcaagacctctcttcactgaaacccttcctaactcttgaagccaacatgctttttcaatggaatccatgaagaacaattctttgaagatcgagaatggtgtaatggacaccataccattcatatccaaaatacttgcaatagctcttcctacctctaaccaatcctccatcctaatactgcttttcaaaccacaactctagtccacttttcgattgggacattagcaccttaggccctcctcttgaacaatacttgcataggatcactttacaccacaatgaccacaacttgctaacttcttaggtaacattacctctatttgactcaccaaaaatgcactagaagggaattttgccattgaagatatctctacccttaaaccttcccaccctttgcttctaacactctttgaaatcaccttaacgatatttctttgatttgttgcaaacttcgacaacgtgatgagccttcctttctattaaagcatacctttagatgatgtgtctatgtttttcctttgaatttcttgatgaaacctaaggatctttcagatgcatttttcaattgctccaacagccaacaaatctcttccttttcaaaatccaaagagaagatattgctataacttctttctgtgattgaaatccacttccccccatcaattcctttgagccttacatcaaaaatcttcttttccatctcacaaaacctcctcctaggctctccataatcacgcctcaatactttgtttgtctttgcttatatgattttgaagattgatttgaaaaggcctatgataatgtggactggggccctgtggatcatgtattagaaaaaaaaggttttattcatttctgttgcaaatgtggatgaattgggatttagggtgcaagaaccaagtgatctataagctactttggtgggatataaactctctgaggttttgggttgcaagcttggtaagttatcattgacttatttggacttccttaggaggccaatttcaagcctaggcagtttgcaacctagctgtggggtggggtgggggtgggggtgtgtttaaaagaatattggcaacctggaaaagaaaagatgtatcacaaggaggcacattaatccccatcacaagcattttctgaagttttcttgttataataatacatgtctgttggttatcctaatttcaatcgacaatctgttggagaagttgagaggggcattttttgggagatctacatggggttgggaaattttccatttggtcaagtggaataagaaaccatatgattgattaactttgagagaaggggctcttctaggagaggagcgtgcttgaactcaataaggcttcgagagaggtgagtcatatatcattgtgggggaaagttatgttgttaaaaatgaagtggatgaatgtgattgtgttctaaaagagatgagctactctcatgggaaggggtaatggaaaagcgtcatgaggggaattctttgggacaaagttgggtgtggcggtaacatatacaatctgaacccctagtgtagtgggacaaaggggcctcagttcacaattttcattttttaacagtagaatcgcattatcttacatgatcaataacttttgttatccttcccctaggttttcttatatgttattgtttctcaatattttttgtatacttatgtttgtatgaagttggcttataaatggaatcatgtatatggctatatacatgattctcaagtttgaagtctttttctttggttcttgagcgctaactgtttgccctctatgtcaacatactattttattcttgtgcatctacactttttagctagttgtaagctttagatattttaccatttgaaagaattctttatgataatgctgataaacttgatgtttgatatgcagggtctggtgaggctcaatccctt

SEQ ID NO: 11185 - DNA, 8316 bp, Vitis vinifera
  Intron number 3 from transcript GSVIVT01017643001 (locus G SVIVG01017643001) derived from phytozome v7.0 (chr-ID chr5 ; pos 2310959 to 2319274 reverse strand)
ttaaagctggttttgttggtactataacattaaaggtacttgtctctaattgctgtctggctgggcttttgatcattgaactcacttttgtttcaaatgattttcaaattaaatacttggataagcagaattatcgcttgaatttattttgtggacaagctcctaggttttaactccgtctgcgaggccttattttactggatgcctgatgtcatctgtgattttttgagctggtggatggtgcttgtgctaagtttaagtcttagctgtagaagggattatcattttatcttttctttccatttattgttagatatttttcttttttgaatagaaatggaataatattatgaaaaaaaaagcatacataccaggatgtgtatataaaagggtgagaggttcttcaaagaagatataactgaaaaaaggccttacaacatatgcaatatgcatttcaactcatgaaccattaggaatacaatctcttgcaagaaaggcaaggaatctactttcaacttcaaggaggcatgagtggatgatgttttggaggcaatgggtgggatgatcgtgtggaacctgcgcttcttaagacattttcaagattgggagatggacaatgttaagaagtttcttcaaaggctatagtagcaagaaagagtagtggagaggatgacaaaatggtatgaaaggctagtaaaagtggggaattcttggtgaagcctttctactctgctttagagttggaggtgaagtgtcttttctcaaaaagatagtatagggcttttgggctcctaccaaagtgggttttttatttttgtgtgcgaagcggcttagaaaaagattctaaccatgtaccaatttagaaaggggtcatggcactttctattctctttatttggcatttcgtgggttctctcatattcgacaaaggacttattaatgggttggaatgagagctttaagggcaagaagagaagaaaggctttcaactcctcttttccttttcttgacattttggatggaacacaatcaaagaacctttgaaagggtgcaacgtgctaaccaatctcttaaggactcccttatatccgttttatacatgtggtcttgtggctatgttctagttgatggtcaagctggtttactatccttgatagattttgttgagtggttgtgctctgagactctaagtactagattggggttgtagttgtaggttgtttctttttgttcttttacatctatacttcttatgtgctatgtttgtctctttttaattgacgtttttattatatatacatgtacatgtatattcataaatgggtgtgtgtgtgtatgtgtatcatgatttgcctataaaaaaaacctttgctaatagattcaccttttggtttgttaatctaggtctccatgagaaggaaacacccatgtctagatatttgaaagatcctccttatcatccattgagcatattgctaggcacatagtttcttctgagctgttcatgagatgaacaccactgcatctccttccgccaccaagatctagatccccaaggaagggacctctttcaagccttcaactaatgcttgattttgaccattcttttttatctagccattttttatttattagaaagctcatatgacatcctgaatgtaatctctaataatccatctaatacctatgccttgtagtctctgtttggtcctcttttacccctctagcatggagtccttagtgcctaaccatcgaattcaactttgtattccctattggaggagggttttattagctaagaataggatttccctttgattccttgaccaaattgctttttgatttggtcatatgaaactaaaaagtttacttgtaaattctttagtcttgattacccaaagatattattttattttatcattattattatttcctaacaaaaaaaaaaaagaaaaaaccttatcaaacatctcctctaaaagctttatattcttcgtaaaaagttccaatgtttctttttgtccatatcatgttaattgtaaatgaggctttcgttagagccttcaaatgtcatttgaagaaaattagggcattggaatccttgctgaaaaaaacaactatatcaaatccaaagaagctagctaatgaaggaacacatggtgtattgattctctagtcaggttaagggagcatttggggaagggaagaaagatcaccttgtgggttggaactaggtgtgtaagcccaagagggaaagagggctagacattgagaggatttctttaaggaataaagcccttctttgggacaaagctaggaattcagagaatctttgggattccattcatttccttgcgtccttttgggctttttgttcagcgggttttaagggcatcccccttaacgtattacaacttgattggcaagcagtgtgtagatccaatagttccaatgggacggcctagtgtattgttattttttcatgttgtttagttttacttttggcgggaggattcctcatcctctttttgtacttctttttctatcaatatattcacgcgtggtttcctatcaaaaaaataaagcccttctagggaaatggttgtggaggttccctatggaaaatgatgctttatagcacaaggtcattttgaatatatacggttcaaactctaatgaatgggatgctaactgtgttgttaggtggtcacataaatgcccttggtaggctattggacaaacatccttggatttctttcctttcacttgttattttgtgaaggatgatacaaaaattttcttttgggaagatttttggttagatgataaatctcttagtgagctagtcctaaacatctatagagtgatggggttgaaaaactctattatttcctcagtgctagtttctccccctttctctctatatcttggaacttcaatttttgttgtaacctcttggagaaagaaattaaggggctaatgtttgctttaacccatgtctatttgttgctcacttttcttgacacgagagtttggtccttgacattcttaggatcgttctcagttcgctcattttttaatgctatctttgctttgaccaattcagttcttgttattcttgtaaatcttattgcaaatccaaagctccacctaagggtcttttatggcttatggtaaataaggaggtcaatactaatgctccaacggaaaatatcatgcaaaacgcttagctcggaatagtgtgttatgtgcaaggggagtgaggagtttatagttaatgtttttcgatgttaacatgatggtatagattgttttgactagcaagaattgattgggttccacctaaaaagaggaaagagatgtagattatatcatttacatgttttaggggactttctcgaggtaggactctttggtgcattgctagcctcactttgatttgtacaatttggtgggaaaggaatgcaaaggatttttaaggataggtggaggactttagaagtagtttgggacttgatttatttctctttttcattatgggtttctactaatgaagtttttgcaggcatcgcctttgagcctcattttgctagattagatcctagtttgcaggaccacaagattcattaaagaagcaccttgtgaatggctaccaccatctgtaggttttgtcaagttaaattttgatggaagctttataggagggttgactagagatcattgtggtagagtgttaagagtattctctaaacctataaattagggtttagccattaatgtagaaattctagctcttttgcaggggttgttactagtgaaagttttaggtttttccaattttctaacttatcttaaaaaaaaaagggtttttccaattttctagtagagggtgattgttctgttatcatattatggtgactaaggtacaagaggaccatggaagtttaatgggtggttgtgccaaattattaacatttcttcagagttaagatgtttgttttttgggactctttgcttaggcaatgatgtggtagatgcattagcaaaacgtgaagctagtcatatggtttcctttgtaagagattttatacctctatgaattgtagttagctttgaccttttggactagttgacacttatccgtcttttttatcctttgtataaaggattgggtacttcttggaaggattggtcattcttctttgtatttaatattttaatacaatgaagttgttgtttcttataaaaaaaatgtcttttttaaggtcttccaatttggtagatgtcatttgtttgcttttctagttggcacaaccccgtacaagagttccgacttctaagggtgcattgctttttccaaattaacttagctcaatggatattatgctcattcttgcttttgtacaagagagtctaacaactgttctatccaaggaccaaaaacatctccttaggggttgcgttaatgataaaaacaccattagacgagaagaaatttcattagtttcacaatcattaaggttttctaaaatatgaaattctaagaatgtgttaggtgatggaatgttgatggtagatgggaggttctttccatcatgaaaaatgtaagaggttaaggaaaagagattttgaaagaaccttatcatatgtcttcttataattcattaacaatgaatctcataggtttgaaaaacttaaaaggaaagataggcaataatgcattagggtgatggtataagttggacaatgggactagcgtcctacctattatcccatacatacactatagagtaccaccaaaaaagctttttttccctttcctcataaacaccacaattgtttttctaatgttatttattttatccaggttgtttttgtaatatttattaaaaacttaaattattttgcaacctattttgaaaacttgtaagatgatataagaccaatcatcatgaaagaaagcttgcttttgttgaagcgaggatgatacattacctctactccctttttctaccaattgaagatattattggatacctttttaggtttgttcatttatagtccttgctaaggtacttgaaaattttactttttgctagtatcccttactcatgttctcaaaataaaagcaagtggtttataagaagaagcattatggagcttgaggggtgtaaaggatggtcttgagtgggattatggaagctaattagaaaccgttggaacgtctttaaaagtagttctaacttcatgttcggtaatggaaggagggccttatgttattcacaatagtggtcacaaaagactcattggtaataaaggtgtgggaacagatggggatgggggctgatggagtccttgcttttcaagacaatcccatgattgggaacttggaagtgttacgactttttatttatttatttatttatttatttattttttttaaggttgtaaacaagtatcattagagggaatgtggaggataaaatggtttggaagcttggaacccttagtccccattgagggcgtgtttctttgcatcaaaagcaattttaggaggactttaacgtgagattagttttaaaaaggggttagatattgctgaacatatgttatttgtctaaaggtgaagaataatttgttgatctagtctctttcattgttctaaaataagaattttgtggtagttggtttattcttcgtttggaatagtttgggtgatgcactcttttgcaaaaggaaatcccttgggttggcatgagtattttgtggggaagaagtgaaagaaagctctgagggtcactctcctgtgcttgttttggaccatagggaagtaaagaaatatgaggttgtttgaagatgtagagcagacagaccaagtaattgaagcttcttttatgtgtaaatttttggatagggtttgagggtacatagatgatcattcaatgaccatgacaaactttgttaattggcttagctccaagtaagggggaaggagtttgttttttgtttttttcttattattacttgcttcatggtgcctattgtatatatgtgtactttggtgcactcattttttaggtgctattaatatgtttcctatttgcgttttagaaaaaagaaaaaaaaagtgagggtttatatttataggttgatgtaccattgcaatgttttttctttggttggtgaattaagagtatatatttatgaagacacctaacataggtgtggttataatgtttgtgaatcatgttgtactatccttagttggagtgatctctcatattgttttatattgcaatatctatttttaatgcagttttttatgaggtacattagacgaagttggtactaggaaatcaaatctaagctttgctaataagggtgtgctagcatgtatccaggttttagctggggcccaagagaatggggttcaagacttgtctaaagcaaatcagcagtgtggtaggtgcagagtgagcacatggaaaatacaggagtggggcaagagaagcttgatgctagtctacttcaatctaaaactgccaagcaagtatgtaacaaaagctaacatagatcaaaggtgtatcatgaaggggattgagatcgaatggaaaatgttacaccatattaacccattaaagcatagaaatgtggatgttggatgttgtgtcacttaaatgcatctttttgggctggtttaggataggcctatgatatggtggaacttagtagtgagagagctttagccttattttgggaggaaaggattgttgtcgacatccattgctttaagatgagaataaaggagtgtacaaatatttgtgcaataaagatgcttataatgcgtgcaatgaaggcctttgcttggttagtgacacacaataaggtaaatactattgacatgctacagttgagagggccctctcaaagccctcagttctaattggtgcatcttatgtatggggaatgcagagatgattgatcatctcttttcacattgtttgataactttagggaaatgacatgagctatttagatagactatgatggattgggttcagtctaggagtttatgcgacatgatgatcatttcatatatgggtgggttagggagatccattagaggtaagactctttgaaaattactcgtctctttttgttttggattgtgtggtgagagagaaatgttaggatctttgaaaataaatggaggatattagagatgtgacattcctctcaatgtcattaagctcaattgacattcagtcatagttttaaaaggctcaaggcgcaaagtcctcttaaagcttgatgcgcaaggcacacctaagacacaggctttagtgaagtgaggcgcaccttattttacatatatatttttatataatataatcaagtgcccgaaatttttcctcaattttccccttcttcttcgtcttcttctcttcttcacactgttcgggagactcggacatttttttttggtattttacaggtccaaacacaagcatatattgggttctagaagaagaacaaaccaaaatggcatcgtttttgctccaaaacggcgtcgttttggagcttaatattttttttaaaaaaggcaaaaaacgacgttgttttggacgttcttttaaaagaacaaaccaaacgacgtcgttttggtatcatgaaattaaaaaaacaaaaccctcgtcattttccctttgttgctttgcaactcgtcaccagaggctgagaagacaacggtagaggataaaggcgggcctattggtggtgtcgtgcctggttgagaggtgagcgccttgtgcgcctaatcagcgcctctatgaaggggcgggtggctacagtcaggcgaggtgctagagggtggcgttgcgctgcttggagcctattaaggcgtgccattcacaactatgcattcagtgtgtagaccaaaaaggtgggatcaacaaggagaggagcttaacccaagtttaaggagatgagatctttgtatgttcttttgtggtctatcccatgttgtataaatcttcttgtacagtggaggagttcattatgtcttgatcagttttttgaatttgtggggaggattcctcacccttctcatgactctttattcatattaatacatctcttgtttttaccaaaataaataataaataataataataataataatattattgcagtgaataaacatagccagatatttcaaatactatcttgaatttcttagttgtttcttttttgatctcttttctctgatttttaattataggtaccctggaaaagtctaggcaaagaacctgtgat

SEQ ID NO: 11186 - DNA, 5024 bp, Vitis vinifera
  Intron number 20 from transcript GSVIVT01037591001 (locus GSVIVG01037591001) derived from phytozome v7.0 (chr-ID chr 6; pos 10333068 to 10338091)
ctagaggtccagggttggttacttttggggtgagtgttatattacattgttctcattttatattttggtatcagatctttcaggtactggtatcacattatacttgttttagaactatataaaaatctacataaatctgcgtgttacaacaattaattttctttcctaataagaaatgtgatgcaagattttgagttatttgcaacaattttagaattttgtcattaactgtttattttaacattttgcatattttggactgttcttccagttaaagaactgaagaaatgtggataaaatttgttgtcgaggatatttggttaattttgtgagtttctatttttatttataggtattaaagtttttttaggttgtgtttgagctagttaagggtgacaaaatgagcataaaatttttaatcgtgggatattccatatttggtcaattttgttggttgcggttatcatttttgaggtgttaaagttgttttataggtgtgttcaagtcttgttgagcatattcttcaattttgaaccatttccacttgaagatggttttggttgtttatgttgtcctcttcctgtgccaacgtagatgaagataaagtagtgttattagttatcaataacagtttacaagaagtgttatgtcattttcacatggatgatgttgataaatatatttcatttggaagatgagatagagtaatgctaatgctacttaagtttctcagatgctgaagaagagggagtgagggtattttggacttgcctgtcaatttttattgatcagtaataatatttgtttgatgtgttggctgagaggttgctaatcattctaccataagtggtatgtccttcacatgggcatgcaattttaagatattggtttatagtgaatgaatatattgactttagacagtctcacatttaagaaaggtatgttcaataaagaaactttaaaaaacactccaacagaggttccagaaagaaatctttcaggttcagcaatgacagatcgactcctcctaagttcttcgattttgctcctagaaatgctcaaatataccctttgcacttccattgaaattaccgtgccaacttgatattttctccctcatcaagtgaggaaggacttgggtaaccccaaaaattgggaagattaaagcccataaactgtgagcaacctgtttttgcttgcacatgcaacactaattgatcagagtcctgttatcatgagttggttaataattggatcctcacccaaactcttcttccctgcaaagaacccaacctttgagtgcataaaggattcccaaacctctctcattagaaaggagttgatagagtttgaaaaaaggatttaactgagaaaagattgctcttagatgctcttctgggctgatctgtcctccatgttttcactgatcacatgctcctggatacttgaaaggaaagattcccaataatctaagtgctgtcgctgttatggaagatctttgtgaaccttggattcccacaaccacaactctcctctatatgccaataatctgataccttcaccgctctactgactgctctattagttacttttaatatatgtttccctttcgcctatcaaaaaaaaaaatctcaatccagataatgatcctccaaagaagactctccacagaacaaattaaggccaaaaggtcactcttcaattgttacccagagataccagtaaaaggataaaattttttcctcccacttccaataactttccatggcctcatacaggctgctctacccaatctagaacaccaatcccttcctcaccaaatttatgacaataactgctttcctaacaacgctttgttaaggatgaataaaatgctaacacatagcctacccttctcatttccagcacaaaaaataaccaatttaccgagtgcacctttaaagagtgtgtttaatgtcctccagcatagcaaaggacataaacggaggacataaacagattgacaaattggacatagtgcttttgttgggaattagaagaccctccattcaatgataccatctcttgtaaagaagcaagtctcctttttgaactgttcctcaattgagtctcatactgagttagccttgagagcaccacccagtggctatcccaaatatttagatgactggctacccaccctacacctgaaacagagccgactcctctatgttcccttgtttcctggaaataagctcactttccgctaacttaaagcttaatttccagattggagagctgcctcaggacacatgaagaatgcacctcagctgaagtaactggtaataacgtcaacaataaaaagcgagtgagatctccaaggcctgaccaccccttctcactcccacaaccttaaagctacttaagagactatcttccacagcccttaaaatttccatcaccaatacaaatggataggggggaagtggatcccttggcataatcttctcaagccatggaagaaccctgaaggagaaccataaccacataagttgggttataatgatccttcaaagagatcaactgatcggctccttgttttgctaatatatctgtcacatggtaagctgctcaagccaaaggaatacccaaactctaaagcaatataaattttttttcacagccaccattaaacctccacaagccaccttcttatttacccatgataggactgatgcagaatttctctctaattaaagattggatagatcctcagttttagctagctttgggcctttcatcaaggctaatatctctgcctcaatggcagaaccactccaacattctaaagaatgctctctgtgatgtttcatgatggtccatgaacgttcctctaattccttcttgtgttggtttacccaaggagcactcatcaaaattcaatttgatctgacccaagttataagcaatcatcaatcaattgtaaaattgatttttccaatatgtgccaatggcgaaaaattgcaaattctatgttctctcccaagagagctaatttcttgcaacttaatgaaacgggtttttttttttctttcaattagttaagttgatctttgaacaagttccagtcttttcatcggtcacctactgcccatacctatcaaaaaagaaaaagaaaaatcagtcacctattgtccatggttgatccaactgaagttttgatgccgtttttgatcattcaaactctctcaaaacttacttttgtcaacatgacatgattgtggatatgggatccttgtcggacactatttttctttgtgtgtggttatttgagttttttcattgatattttttattctttccactttcttagtaaatacattagagaaaaagaagagtcatctgaaatgtgaatttttgtaagaatatttaagaataagagaagacgggattacaggaaaattatggaagcttttaaaatgaatatcttcacttcgaattgtcttttattgtgtggtatcccaatacccatgtcctttttgggatcctttttatctggatccctgtggcctaaaaagtttgagttgtgaaggatcaaacacttggatgctgatccacatccgacacctatacatgaatccatgcaacatagctataatgtgatatcatgattgtgtgatactaaagttatgttattatgagatatatgtaattaagtagtggttttcctacacttaatcgtattttcatactctgcatgctttagtcaatcaatttaaactactataatacactatcacccaaaggtctcaagccttggtaggaataacatgagggcctaaacatattttcatcctttctaaagcttctctatctttagattcattagctctctttgggggtatccctgattttctacctgacaagttaataaacaatttatgaatatatcctctgccttttttagttccatgatccttctttctgtaattctcacttttaacactcctaatgcttgccattgtggtaaattctttacatcattgtcccaattgtttatacttaacatgtgatgatgatcaacacacaactgaattacagccttaactgcctcctttttttgtggtttcattttaatattttcagcttgtttttcttaaagcctgccttatttctacatctttgcccagctctccaatagtttttcgaggttcaaacttttttctggataggttttgggtgccagccattaggcattgcagacgaacctaaatggccttatgtaatgcctttctaataattagtagattgcatctttttctattttttatttattttgtgtgtgggaatagtgatcatcccctttatgttctgcaggtaagtctcaaccttaacatttcacataacattgatatcattagaattctggaaaaggaagtattaaagattcaatggccatgtgttcttgaagtctattttctaaatatggttcacacattatgcttgtgcttgtgtgtactatgcttgcacaacatggtgctaagctttgctctcctgtagtcaagaaaatgaacaataaattttgtagaccttatttcagataaacgtacttggaagcacttgctggctcttcactggcgagtatgagatgttgattttacattttatcaagttgaaattgtatagaaacatttcagatttcctcctgttgtactagtttacttgcattatgagtttggtcgttggattgtagttattcaagttttgtttggtcaacttacatttatcaatggttaaatataatagcagtttcttcttacaatattagttttagacttgatttgttttttaaatggtctatcttgaacaaacatataatgcagatctgtcatggtggataatatccatttaatgaaagtttgtgtttttatttatccagttttgcattgcttccatgatttgtaaggaagttcttgtagttttccatgaagttttgaatgttactgctcatctaaaagggtgtgctgttgcagcctgatcgtgtt

SEQ ID NO: 11187 - DNA, 10507 bp, Vitis vinifera
  Intron number 2 from transcript GSVIVT01004864001 (locus G SVIVG01004864001) derived from phytozome v7.0 (chr-ID chrU n; pos 16184239 to 16194745)
aggcaccagggaggattgttgatgcctcacgttcctggggttccacgtggttgccaaatggatggatgcgtgatctcaaccttcaaaggttcttgattcagtcgttatacctgcaaaaggcatccggacagggtgtccggacgcaccctccgatgatgttgttagccatggttaagagagggagatataaatcagttggccttttactaggtattttgagattaccttcctcttcgtgtgaaggtttatatatatagtgccagggacactgttcctctcattaatggtgaggagatattttatgttgttatgatgacatgaggtggcagcatggtcatcgccaccctacgggcggctgtcagaaaccgtggtaggtgatgctgctatcagagatcgtgagaggtgatcatgttgaatgatcgtgggaagtgacttgttgtcacctcatcccgtcttttcattctgcaggtgatgggacgtgggccatggctaattgttgtgatagcgtgtaagactcgctttactttagtcaatgatccggatggcatatgttgattatccggatgtatattgtaaatccgtccggatgctatgtttacaagtgtcgtttgatctcccttgacgcggtccggataagagaagctgaaacgccgcttgtactttcttgaggcagtccggataggagaagcgcatcatgtatatctttagggaaatccgggtgatgacgatccggctgataatgcttgccatgtgtcactgtgagatgcgtgccacgtgtctcggagggaggggtccctacaatgcccccttttttaacttgcctattttgcccgagcaagaatgggcgggttaaaaaataattggttttgaaaccggagtcgaccttttgtttggttgggccacgtggtgagtgggggtgcgggagcccaaaaaatgcatttatgacgagccgccgactctgggtattcccaggcagcatgtcattttaatgatggcgtttgttgggcgtttggctttccgaggggctgtctccctataaatagcgtactgtgccttctttttgcttttccctactgcattcgtctgagagtcttttgttgttacttcttcttcctcctgtgctttccttgtttctctgagagaaaatttcgaaagttcttttgtgccggtgattttgtatcgcgacagcaatctttcttcctcagagctttatttggtacgttcatctttgcttttgtcgttccttttgttgcgcttgttggttcattggtcttggtttctgatttgtttgggtattgtttgggtaagttgcttacgactgtttgttgaatgttggcatttgttggggctctgggggttttttaagggttcccgttgcccccctgtattttttgtgggttgggggtttcttgttggggtagagtcaaggattttggaatgggtacattggtggtgcgaggttttctgagtgttgttatttgtttagggtttgtggggttggttggctgtgtttgactgttgcacttcttgtatgtaggtttcggttcaatcttcggcctaaaaatgtcttcaaagaagaaagctgcttcatctgcccgagttggcgacgcttatgagaagtctacagacaaactgagcgtaaaggagtttagagatcgattctgcattccaaatggcgtaattgtggaatttttgaatggggaggatgtcgtatctactgagaaagctgaacaagataccgtcatcttctccaaggaacacttcaacgctgggctccggtttcctctgccggcgttgttcaaggaattcctccatttcaccaagattccacccgccttcatccatcccaatatcatccgggtgctgatgggatgcagcatcataaacatgctgtacaacctcgacctcacgctgctggaggtgttcttcgtctattcgctgaagaaggcaaaaactgacatcttcagcatgtccgcgcacttgccctcccttcaattggtgacggaactgccagactcgacgaagggaggggcgaagggatacgtgatggtccggggtgcatgggcggggtcgaagcatccggggaggcccttctccccgaactattccttagagattccgggtaggtttgctttgcgacttttgtccggattttactttgttgtcttttgttgatcttcccggatggaattcttatcctttgttgctgtcaatgtaggtccggaaaaaaggggccaccttgtggactgggtggaaaaggcgtcttttgcctgtctcagtaatctatttgagatagacgccaaggagaggcactacaagacgctgctcactgcgcagaacctgatggcggtcgtccgggagtcccaagagtatgttgtcaacattttccccaggaaaatgccaaaggaggtggtgcctggggagcattatactgtgaaggatctcccgatttaccaggcgtttaaagaggctgacgctgaaaaacgccgagcgctcctggacaatcgggagaagaagaaaaacaaagggacccttcgaaaggctcccgaacagaaacgcggcgcagactctcctccaaatatagctccagcgaaaaagaaggagctggtgaagaatgggaagggagtgaaggagtccactcctccccaagaatttgctcttccgccaattacccatgaggcggaggtaataatagaggagcctatgaaccccgctcctcattctatctcaagcggatccggacacttcgcggggctgaaccactcaagtacctccttggcagcggttgcccgtctggctaatttggctgaggaagctgcgtccatcaatcatccggcctctcctaatccggatgccgatgcagctgaggccgtttgtgcgaccctgatggaagaagcaggggcaaaaagccaaagtcaaccctccgacgatccggaccgtctggctcttgttctggtgaaggggccaccttcaaagaggccgcgttcggcacgcaatctaaggtccggactcctcgggcggcttcaagatcgtcagcaagagatcgaagttagttgctcatccgcccatggcgctcatccggaggggagcgaagtggagatggcaactgagattccagccgtcccggtgatggtcccggatgaggccgcacccgagaagacccatccggccgcaaatgttgaggcctcacacctggaacaaaagtcaccttctgctgcttcatccgggggggaacttgttaatgacgcagcttgctcctctgctagctcttttagctacgcggagttagaagataagctgaaacatataccacccggctcacctgacatcctgccctcagccaagatgttcgagatggtggaaacggtaaactgtttttatgtgttttttttattcttttgtgttgttgtggtatgatttataacttggctttacttgtttgtgtgtcagctggtgagtggtctccgcggcatggcccaacaacacgatctcttttctgacctgctgcggaccactgattatatgaagatcttcgcctctcggcataaagaaagtgaaaaccaattgcgcctgaggctggaggaggttgaagccagcttatccatctctcgagaggacaacgaagccctccgggcggatttggctgaggttaagagctgggaggaatcatcattcacccgtctgtgtgagtcagaggatgaggtggcccggttgaaggcggaggtgaggcaactccggacagaggcttctattgaaaagaagcagaaagaagatttgcagttgcgcttaacagcgcaaaaagaggagctagagcgggagtttgctgcagagagggaggagcttgaagcggactatcaaaagcaagtggatgataccttcatctttggctatcgctgctgtatgaagaagaatgacataaagcgagacgtcccttcaattcctccgggtgaagagaagaaacttcatgacaagcccgctccctgatagcttttctttttgcaattccttctgtaatcttctttctgtattttttgtggtccggagacctctttgtacatatactaacatatatcaataaaacaattcttttcccatttgtacttgtcttgctttttcattgatagtactgttttaaattggaaacgttccatggtctaagtaatggagttccgtctaacttttgtaaatgataggctccactttcacttgctttagacactatatagggtccttcccagttagcttggaacttgcctgtgcccatttcagcagtgttttcaaaaacttttctaaggactagcgtaccatttttgaagcttctgggctttactttgcgattgtagtgagcggatgctctctgttgatagtctgccatccggatggctgcactttctcttacttcatccgtccaatccaaatttcttcctaattccatgtttgcatcattctgctttgctgcgtcagtccggatagtagggagacctatttcagtaggaatgactgcatccattccgtatgcgagggcgaaaggagtatttcctgttggtcgcccgggtgtggttcggtaggcccataggacgccgggcagctcctccacccacttccctttggcttgttcaagccttttctttaaggcagtgattagggtcttgtttgtagcttctgcttgcccattgctttgaggatatcgcggtgtggagtatgaattccagatgttcagctccgaacagaaattcctgaatgcgatgctgtcaaattgtggaccattgtcagctatgatggtttgggggattccaaaacggcaaacaatgtttttccatacgaacttggtgacatctttgtctttgatactagcatatgcttcagcctccacccatttactaaagtaatcagtggcaacaaggaggaactttttttgagcaggcgccgctgggaggggtcccactatatccatgccccactgcgcaaaaggccatgggcctgaaattgatttcaacgttgctgatggcatatgcggaatgggagcatgcctttgacatttatcgcattttttgacataagctgccgcgttctgcttcattgttggccaatagtatccttgcgaatgagctctatgtgccagagattgtcctcccgaatgattcccgcatattccctcatgcaactcagctaacacatactgggcctctgaatgccctaggcatcgaaggtaaggtcctgtgaaggatcgcttgtacaggtgccccccaatcagggtgaaacgggcagcttgcacccggattttgtgtgcctgtttgggatctccgggtagagttcctgtccggatatattctgtaatattgtccgtccattcttggtcgttcgcttgaggtgcctcaatggtattacaggtggaaatttctgcgacagaggggttgggttgcacatgtataggcaatagaatgacttctttgatagggagggaggcagctatgccggccaaggcgtccgcgcgcctgttgtcagctcgcttgattttttcgattgtccattcggtgaattgctgcaaggtgcttcttactttagctaagtatcgtgccatgcgtgcgtccttagcctcatattcctcctggacgtgctttaccacgagttgtgagtcgctgtagatccggagtctagagacggatagagcgagggcgagatctaatccagacaagatagcctcatattctgcttcattgttagaggcagagaatcccagccggatggcttgctccaaatgttccccagttggggactgtagtaggagcccaactccagagcctgatgagcgtgaggctccgtcaactcgtagagtccaccatacttgtttacttgattcgtggtgttggctgggtcttcgggaatattctagcacgaagtcagccattacttggcctttcatggacaatctgggttggaattcgattccaaactcgcttagctcgatggcccattgtagcattctcccggttaaatctggcttgtgcagaatgctgcgaaggggctggttagttagtacaatcactggatgagcttggaaataagggcggagcttctgggcagcgcttcgaagggctaaggctgttagctccatctttgagtatctggtttctacgtccgccaatgccctgctgacgtaatagataggtttctgctccttgggtgaggggcaacagaatagaacggcgctgattgaccattctgataccgccagatacatatacaatttctcttttggaatggggctgctcaagatgggtggttgcgtaagacaatgcttaatcttttcgaaagcgttttggcaactgtccgtccatccgtgcgctccagcttttcgtattgccaagaagaagggtcgcaattcatcagtgaagcgggctatgaaacgccctaatgcaacgagcttgcctgtgaggcgttgcaactccttcttgttcctgggagggggtgtttccatgactgccttgacttgatccgggctgacttctatgcccctttggctgaccataaatcccagaaatttgccagcacttacaccaaaggcgcatttagaagggtttagcttcatgccatactttcgtaagaggtgaaaaacttcttgtaagtggaggacatgctgctctcgggttttgcttttaaccacgatatcatcaatatatacctcaatcgtgtggcctatcagaggtttgaagattttagtcatcaatctttgataagtggcgccggcgtttttgagtccgaatggcatgactttatagcaatagaggccgtgtggcgttatgaatgctgtcttttcttcgtcatccggggacatgggaatctggtgatatccggagaaggcatccaaaaaatagagcattccttgcccggaagtggaatccacaatttgatctattcgcggcaagggaaaactgtcttttgggcatgcattgttgagattggtgtaatctacacaaactcgccattttccttcttttttgggtaccaccactacgtttgccagccagtccggataagatacttctctgatgaatccagcttctagcaatttgtcaatctcattccggataacttcttgtctatccgggtggaaacgtctaatcttctgctggacgggtctggcagctggaaagatgttaagcctgtgagatgcaacagagggatgaattcccctcatatcagaatgtgcccatgcgaagatgtcatggtttcgtctgaggatattttgcatgctctgagtttcttcggttgtcatgagggaactgatgttcgtgaggtgggtgttttcctccgaaatttggattgtttgtaagggatctgctgccgggggatctttgtccgccggacccaataattgctattggtcatttgtatggctgggttcagggggagatgcatcctcctggttggcccttgcttcgcgtgctatctgatagcattggcgagcggctaattgactgccatataggtcgatttggccatcgttggtgagaaaactcaccatttgatggtatgtagaggggatagctttcatgtagacgagccatatgcgccccaaaatgacattgaagggtgataactcctgaactactgaaaactgtacgttgagagtgactgggcctgcttggaccggcagtacaatgtctcccaaggatgtagttgaagacccgttgaacccggataggattcgtccagggttttcgaggcctgtgagactgtgtcccatgtggccaacgaccgatgcttgcacaagatcggcggaactggctgggtcaaccaagatacgccgcacatcgaagtccccaatttccagggacaagatgagggcgtcgcgatgtggttgtagtgtccgggtgggatccactggtgggaaaatgattgtcccatctatggggcgagggccccctccagttagcccaggccggatggaattgatgcgttcgcgtattgatgcggcccgcaacaatttttgtctctttcgcctagagtcgtactcctcgtcagatggacctccgttaatatagtttataacggccttgggggcggctgaggccctagggactccaggattgtgatgttgagaagtgattcttccttcagtatctgagcggaggtattgcttcaaatgccctgcctttatgagcctctcgaccagatactggagagcccggcatgtctctgttgtatggccatgatccttgtggaaggcacatctcttactacgatctcttgtggatgggtccgttccgatgggtctaggtcatttgaagtcggacaagccctggatcattgggagaagtttctcatatgatatggaaagaggtgtgagaggcggcatttccgggcgacttggcccttcctgccttcggtcagacggctttggctgatctggaggtttagtatttctctccgcattacttctagatggccgtccggcaaccaaaacttgctgggtggctgcacgtacgtcatcttcgagcattgaatatttgttagcacgcctgaataagtcatccattgttgtaggaggttttttagccagtgattcgaaaaatggagtgcctggacagatgctttgtttgaagatctgtaggacagcatccatactacaagcctctacttgaagcacgacttggccaaaccgcttcacgaattccctcaagggttcgttatcttgcatttttatgttctgcagggtgctgatattttgcttgtgtcgagcggagcacaagtattgtcccacgaaagcttcggacaggtccttgaaattgccaacagagttgggaggtaggcgatgaaaccatgagagggcctgtccttgtaggctggcgggaaatactttgcatagtagtgcatcgttgccaatatcgagcgtcatgagctgtcgataatgcatgatgtgatcgaagggatcattggttccatcgtatgtgaaaaattttggcacgaggaatccccttgggggctcgtaatgaatgatatgagagcagaaggacgtggagagcatgtcatccagccttttgctgatggagccaacgggtggcttgtttgggaggtttttcccagtcggtttttccgctaggtgcgagtgaacgttccgcatcgcgggggtgaccatggggtcacgatgcgggtgcacgttctgcaccataggggtgaccacagggtcagggcgtggtgcccaggttgtgaccactggtggccttgatctcccaggctcttgtgggcctagtcttgcgcgcatcgaatttgacaactgggactttttatcacgttgtctctttgctgaaaagtgagtagagtctgagctttcctcacgaggtgctcgaggcataggcgtgtctggcacatgaggccttacgttgcctgctcctgggatagctcctgttgtcccaggatatattgattccggttcttgttgaggccttgagtttgctacttggccccttgaatgctgacgtcgaggaggccctgatgtagaagcctggatgcgcaatacaacgttttcttctttcaatctttccgtctcctggaggagagcttttagttgtcgttcgcttgccaactgtctcctttcgatggctagacgacattcaagattatcttccacctctctaccagatgattggcttcgggaaggtgtggccatctttgtaagtgactgaatcaaaatgaaaaatttcccacagacggcgccaaggttgatgcctcacgttcctggggttccacgtggttgccaaatggatggatgcgtgatctcaaccttcaaaggttcttgattcagtcgttatacctgcaaaaggcatccggacagggtgtccggacgcaccctccgatgatgttgttagccatggttaagagagggagatataaatcagttggccttttactaggtattttgagattaccttcctcttcgtgtgaaggtttatatatatagtgtcagggacactgttcctctcattaatggtgaggagatattttatgttgttatgatgacatgaggtggcagcatggtcatcgccaccctacgggcggctgtcagaaaccgtggtaggtgatgctgctgtcagagatcgtgggaggtgatcatgttgaatgatcgtgggaagtgacttgttgtcacctcatcccgtcttttcattctgcaagtgatgggacgtgggccatggctaattgttgtgatagcgtgtaagactcgctttactttagtcaatgatccggatgacatatgttgattatccggatgtatattgtaaatccgtccggatgctatgtttacaagtgtcgtttgatctcccttgacgcggtccggataagagaagctgaaacgccacttgtacttttttgaggcagtccggataggagaagcgcatcatgtatatctttagggaaatccgggtgatgacgatccggctgataatgcatgtcatgtgtcactgtgagatgcgtgccacgtgtctcggagggaggggtccctacaagg

SEQ ID NO: 11188 - DNA, 2516 bp, Vitis vinifera
  Intron number 3 from transcript GSVIVT01024512001 (locus G SVIVG01024512001) derived from phytozome v7.0 (chr-ID chr6 ; pos 9420114 to 9422629 reverse strand)
gtattgaaaccataattgagtaccagtatagtaaggtatcctttttttctgttatcagttgattttattttattctagttctctatcatgaagctaggaagagctaagtttatcataattacttctgaatgtaactgcttgaagctggatagatgagagtaactgaaatatatataatttgtgtaagggatttgtgttttttttttatgccaataatcttgtttatgtttatcatatttaacaaccctgcgccccccaaaaaaaaaaaacaagaagaagagaaagaagtcaaagaaaacaaaatatgttttctgtttgaattcatttagttactcaaattataatctgaattagtcaaagcaaacatgatgcctttcaagataaattgtgtcaagttagatgttgatatttggggacatgaaatgcttgtcctttgaagtaagggaaacttaatcagaactcaggagtgggtgccccctgatcacaacaatttgcattaaagatgtacaaacattggtgtttgttatcttctctttcctgatatgtaaaatcctctgcatcatgtttgttagttgtacttttttttttctaggtaaaagcaattgtattaaaagcacccaacgaagagcttgaaaaggtatacatgatgtattcaaggcacctaaggccaaagaagaagaggaatacacaaaaaacaataccctcgcctcacttacaacccaaccaaacaataaaatcaaataatgacaatgagcttaaacctaatcaccatgacccattccaagaataggtgcaaaaaggaccttataattgattggtccgccacttcagaattttcaaaggctctccaatttgtctccttccataaggtccaaaataagcacaaagaagttgctcttcatgccatcttctccaatcttaactcaccttacaaaggattataaataaagacatttagtagattggtaagctaggaagagtgctcttcacccaagtcaacctccctccttttgattagtcttgcctcttccacattacaaattgttttaaaaatctttccccactatgttccaaacccgcaaagatttaaaagaggttcccaatgggaggcccaaataaaaggaagagagagtgcccactatacaccctaatgcccaagccaaatcctgagaattagaaatctcccctactaggatcaactcacttttatcccaattaatttttaaactagagattgcctcaaaccacattaaagcccaacctaagaactccaaatgctccttattaaagtcacatagaatcaagttatcattagtgaataaaaatgagacactaccatacccacacctcctctcccactagctaagaagccctttagaaagcccccttccattgttgtactactattatgtttttaaactctattgtcgcaatatcaacttttaatgcagattaaattatgtctttttgttttcatgtatgcctcataagggccacaacaactgtttgaggaattggtttagtaacttgtaaatttatttagaggaagtaattcataaattaccttcatattttgttatgcaaaaaaagcctatttgcaagatatgccttaaattgtttgttgttaggccaatatatatatatatatattttataaataaaaagcaaattcattaaaaataaaaataaaaagacaacaaggacgcaccaaagtacatatgaagtatacaaatagtgtcaatatcatgtttccgtgaacatttattctcttcattgttagctttaatcgaatgcatcaatggctagaaggtgggagagtttacagggttgagtctcgctataatgacattggaaggttcatcctttgtttggtccactccatggaggcgaagaggtttgttttggtcttcccaggaaggaaaggtcttctagggggttggggcattttggttgggaaactttgcaacttaggcgtgacactcggctctcaggttagcaaaggtgtaccgttggttgtaggccggtcaaaagagggaaccttaacaagggtttcctttgttatgtcttttgcagacaaggtgaagaaaggtttagaagctttgggagaggtagtgtggtttcaaatgggggaaaaggaggtctgtcttaaaaatgattctttgaagagttcctactactcttaaccttaaattactgatttttgagcagatagatcaggtaattattaattctattataactggtggtcttctcctttgtgctcgctcttcatgctttgaaagttttcttgatatcatatgatctgtcaacaaactgtcatattatttttgaatttgaacagtgtgatttgtgcatatggttttcttgcacaggccatcagtcaatatatagttgcttggaccttgatatagggaaatttttgtgctttcttggttttatttatttattttctttttaaatcatatccttctattttgactttgatttttatccaggtgaaaagatccagaacttac

SEQ ID NO: 11189 - DNA, 8395 bp, Vitis vinifera
  Intron number 1 from transcript GSVIVT01036444001 (locus G SVIVG01036444001) derived from phytozome v7.0 (chr-ID chr1 4; pos 22003363 to 22011757 reverse strand)
cctggaaggaaggactgatttgcatcgtgtttctggtgagtacgccattttccattttttaatagttttaaccttagtttcctccatcgtaatacaagatgttgtttgtgtatttgtggtagaccagtagttttctgctggatgaattgaatatgtttcaatattgaagcctgcgatatgcatggctctataattcatctatacccaattaatttttgatgggtaaagcaagcgaatattatgaaaatgatatgcaaacaaagcgccaaaaagtagtcaggaagtatacaaggagaaggacaccttcaaaataaaagaggggcgacaaaaaacaccaatccctcaataagggcccaacctgtcaacaaaatctattacagagacgaccaaaaactataagcaaattagatcaaacccatagataattgagaaaaagagtgtgctagcatgacacatgggccaattgctaactgagggtgatgccctagcccatatgcccacctcttgagtagaagcttcaactttttaagtgccaatacaataataatcccacataatgttgtttttgaagaaagatctgataattttactaatattaagaggctaactttgtgttgcagctcttatgaggttgaagaaagagaaaccctttgcctcaactacctccttttgttgaactagtaaagtgagatgtatttctcagtcaatctccaaattcacaaatatcaactttacttccatgaattactcttaaaagtacaataccaagttgatagcaaggcactttgatattaacttagttcatcttgatagtagatttgacattcccccttctaagtaaagtacaataccaagttgatagcaaggcactccaatacttagttaatcttggtggtagatttgacattcccccttctaagtacttaagaatgttttgagggtcttgttttgttggttaggaatgaacattcttcaaggtaggaataaattgtacttgagtcaagactacgttggttggtttaaccgaaatggggtgctcactagcattaatggaacatgtgtcaatgccaggggacagtctcatgaatgataagtgttgccctttaaaatccctacaaaagggattccattctccatttgtgaaagaatgatgggaagagtcatgagaaagaatctaatggtttctatttaaaaatttcttctttggatcactattaggttcctatcaagttcatctaatgtactcttgtcaacacgacataacataggtgtgagtatgtgatccttattggatatttctacttttcttgtgatatatttctttgattttgattgatttattttttattttcaaattccttagcaaatatttatgtttgtttagtttggggaaagtgctaaagaaagaaaagacacactaaggaaaatgtttttctcatcttttgcattattatataaaatatgtaagaaaattaaatagcattaaaattggtagaaacttatcaattttcaaattatttaatatttatatagaagagttaaaataagtgacatgagttttaacatataaaaataatttattgactttaattttttttttccacatctttcttttgcttttccttttatttttttcgctcctattttgtctcaaaatttccaagaaccaatacagccttagggataagaaagaaaagatagggataaaagaaaaaagttgaggatttcttatcaaatatatctttactgttaattgatttttaatttaatttttatttttatttttattttttcccttttattatgtcttgtttgagtgctcatacttgttattgagatcctttttagcctactttctatatcctaaaatcggtagatatgcaaaattgggcacctagatacaaggggtggcaattgttatgtcgggttcatgtcgtattaagataaaaaatattgaaaatttactcaacctaagatggccaatgcacatggtacaagaaactccttgatcaaagttaaagtagatggagaatggttgtccgaggagaccaagataaagaaagaggtgtggagggccttttaaaccctcctttgaatcaggaagatcaaagatcatatgagcaaaacgagctttgaagcctaggggatagatgattctagggcttggaggtgcctttttaagagaagatttttgctgccctctccaatatgtgtggggataaagcgcctaggccagatggccttactattgcattttggtagtcatgttaggactctgtaaagatcaaggtgatgggtttttgagggggttttttaatcaaggcacctctaagaaaagtttaaattttattgtcttggttatgatcctaaaaaaaggcgaagcaaaagaattaaatgattttaggcccttcaagttaattggggcattttataagcttttatcaataactttggcaaatagactaaaaaaaagtggtgggaaaagtggtttcaatttttcagcatgtttttgtggagggcaaccaaactttggatatggttttattgctattaaggtcattggttcaaggttatttgcaaaatagatgtcaagaaggcgtgcaatcgcatcaattaggatttcttaatcgcaattttggtaaaatgagttttggttaaaattagatttgatggataaaatcatgcatattgtggatccacattttcacatgtgtttccactcaatggtgagactcgcttttatttgttgtgaaaaaattgatttttgaaaaaacttggagttgccacttagaccccaaatgcatgacaaatttctttgttctagttgatgggaccttgttaggtttgtttcaacgctttgaaaaaactaaggtaataccaattaagggagtgactaatgtgcagggactaactttcatgtcaagttgtaaggttaggaagctaaccactacttgcttgcctccctttgacaacttttcttaaatcattaagggagtaggatatggcggaggagagattttgaagaaaacttgtagcgttgaagaggcaatatccatataaaggagggagacttgctttgattaaaggcatgttatcaagtcttccaatgtatttcatgtctttgtttgttattcaaaacatgttatgcttaaggctagagcaaatccaaagagacttcccatggagtggtcgagcatttaagaaaaggccttacttggttaattggtttgctagctagggtgaaagggatgggggcttgggtattcataatctatccactttaaacaaggccttccttggaaaatggagttaaagatttgtaactaagagacagtccctatggaaacaggtcataataaggaagtttggagaagaggtaagggcatggtgttcaaggagtgtgtgggatggctatggggtgggggtgtggaaggtaattagaaacaagtgggaggctattaaaagcaatgcttgcttcatagttgggaatggtaaaagggtaaaattttggaaacaaaaatggtgagatgggagtcgttgcttctcaagatagttcaatgattgggaacttgaggaagtggagacccttttatggaaattgcatacgttttcaatttgaagcaatgaggaagatatgttgagttggaagaaaaccaagtgtggtaagttctttgcaagatccctctatgcttccttagccaagagagaaagagagcctttttcaacaaacatagtttggaatccttggataccaatgaaggtaggcttctttgcatgggaagtggcatgaggaaggatcttgacgctagatccacttaaaaggagaagatggatttttccgaattgatgttacatgtgcaaagatgatgaagaattgacttgtcatttatttctttattgttccaagtcaagaatgttgtggtagcaaatctattctctatctggtgtgatcttggtgacatgctctacaacaagaggaatcttcttgggttggcattactcatttgtggggaagaagtgaaagaatgcttggaggatgcttccttgtgctttttttggacccttatagaaggcaagaaataagaggtcatttaatgacatcaagcaataggaccaagcaatcaaatatcattttatgtctattttttagaattggttagagtgcacataaacgactagattggttgagctccaagtaaggagtgagatcttgttttttgttctctctttccttggatagccttttaggctcgtattgtatacatcgtgtgtactttagacttaggacgtcgtctcttaagcctttttaatatattttttgtattgcctataaaaaataaaaaaaatcccaaaagtcttccagttcaatctttgctcacccattaaaagatacctgcttcttattctccaacttgttaggaatgaggcgacaaacaagtacttggccattcctttttttgcatattccttctctatctccatctcgtccttgtaatattctcaggattactcacaaacttccattatcaacatgtccaaattaaataactcatctacctttactaactactatcattggtatttatttatttatttattttttatttgataggtaactaccatcattggtatgcctccatcatttagcatccatgtcctttgcacaaccattcaaaatcctatatcattataatcattctagtaatgaccatttggttcaactaaccgccatttgggcatcatcctttattgccacatggacatcatctctatcttatggataggtacacccaacacgattcacattctttacttcattggttttgccaatcattttgacatttggttgaactttgattatgttgttgacataattgttgaagtttttgacaatacattctccacttaatccattttgctccatctcctgtgtcaaaaagctagaaaagtgcttgtgagatttggatctaatttttttggtatcttgctcttagaagattgatcaatgaatcaattgagttcaaattattgggagatattgaggacaacatggagtggtttagagaaaagattttgggacaccaaggtagaataggatgagggtggacaccaagaaaaagagtatcaagatgggcaaaaggagaaagaaaattggatatcgacttaatatatagttaaatgcattgtcatgtgctcattgtattctatgtgttggggggtcctctctagttttcggttctcctgctagggtcctttcaacactttagggggtcagttgttgttagggtggtgggtgtttagttttctttttccttcccttacttgccttttggccttatccgcatattttgtgtatactttgttgcatgtttttgcaagcctctataatatattctcctatttacctataaaaaaaaattgtattatttccatttttaagattttctatgtcacatatctatgtgccaaaccttaattggaggttgtttcaaattgaaatttatggcattattgattcttttatgtatcatattgaactaatgaggtacttgatgtaggacaaccctggttatttaatcaaatatgtatgttagggcttcaattttttagaatttaagaagagtgaagaataaaaatgatggtacttggtagtggagaaaagttcaagtaagagaaatgagaataaaagatcaaaaaagaaagatataaagctcaccaagggctaaggttagggcttagtgaggctttaaggagaagaatgagaataaaattatagtagtgtgaaaaaggtacattaaaagataagaggaaaaatgaagaaagataagaaaccttagtaacgtcttctaggcgtttcacctaagagaaaagcattggagtctcactatttatttatttacttttgataggcaaaaaaagaaaaaacctaataacagcacctaaacagaatttggtgcgccaaaaattgcaagacatgcaaaaacatgatcttattcaatattaatcattaatctcattttacatcaattagccttatttatagtttttataaaaccttaaaaactaaataaagccatgaaaaaagaaatctaactcatataatagcttattaggactcttatttctttcttaaaacttctaaatcttctcatatactgaaattaaaagaaaaaagaaactttctttttagaattagaaatttaattttattgaaacttcttataataaaagtttataataaggaagatgtctagattttaaaatggattcaaatagaaacttcagaaaaagaaatttcttaagaaaatagaaagtttaaaaatatagaaacttcttttaaggggaaattctcaataaaaaaaacttaccaaattctaaataaaactcaaatacaaactaataactaattatgatttcagagagcctaaaaaactgcagaattagctaaatacccttgatagagtaatttaggattttttttctttcttttcattcatttattgaggagatcttggagattcatccccatcaatattaattaagggaattaacattgatagttgactaaaagatagcaacaccttcttgctgtcttgaacttgtgagcatgtaaaaaacttgtccaaaaatatcggacctactttctactaaagggataggagcaccttcttcttggcataaatcttcatgcagatataaaaattagttacaagtctttagaaattatatttttggttgcatcaatatattggtcattatatcagtttatttattatatgactataattatatagagccaaagatatacttctagcctgatgccaatataacacccagactgatggtgaaaatgctccctaggattttagactaattattaaaagcatcaatgactttgtagtcacctacaaattttggatgcttaaggcattgctgaatagcccagaagaatgtgatccctaagagctatgcactcaactatcagaatggaagctgtgtcaagctgatgcagtacagaaaataaaatgcaaggagagtataattgaaaggaccttaggaatcactcctagaaacctttcgcttcacacccaagtactctttgcatctcacaaaggaaaaactggctgctgaaaattcattcattcattgattccttccaaaagactaattaactactatataagacttttctagggacttataactccttggaactagacacagtaaatgcaacttgaaaatgacaaacttggactgattactgaccacattaaagactgttggaaaatgacaacaataatgactgaaaatggtaacttataaccattgactaatcccataacttaatttctgaaagtaccttctaggctgaacccatattgacttgtataagatctcaactaagcccattatcatccagagcgtgccaaattaaagcttgggcattggagcccactcctttatgcctctgataaacttttaaaggtggctgccacttgtctcaatcacaagcgatcagaagaaaccacaacatggtcgtccttaatctgtgtcataatagaagcaggagtgggatgaacccacttaagataagagccactaaagttgtgtttccattcaagtttggaaggagggttcctaccaatccattgactaagaacctatgcctaatttaccagcacatgcactattgccgagaccttgaatataaattgactgaacttgttgccttcttgctgttaaacgcatgttgctctggtcactggttcagcatatataatatgtttatggattaggatttacatatcctatagtttgtccgtgtcagtttatttctttaacttagcttgacatagtcactgatttctgcatatgcaatatgtttatggattagtatttccatatcttatagcttatctgccccagcttatgatttcctccaacttagagttatctaatgatcctcaacattactttcccttttgtatactcctacactagcaaattatagtttatttaccactggtgctgattaattcttcttaaggatgtctgctttaccaggaaagaggtgctactcatattaagcagggtgctgtcctatggttaaaatcatatggatgcctctagatggtaaactactagttagtagaaataagcctctgattgggggctttctattgtatgttcttatccaggtaaaactctagctgattgactggtggctgaagcaattttttttccactcctcatttttggtggaaattaaaattctgtcctattcttgtaatctaattgcctatacctctagaatttgcttatagtataagttatacttaattgtgcattgtcacttgcagtaaagcggaggtctgtgagattcagacaggattct

SEQ ID NO: 11190 - DNA, 10925 bp, Vitis vinifera
  Intron number 2 from transcript GSVIVT01027833001 (locus G SVIVG01027833001) derived from phytozome v7.0 (chr-ID chr5 ; pos 8340453 to 8351377)
aagaatcttcaggagaggaaggagcggtatggcttccattcttcatctataaatgtacttggtagaatttgttgcttttttccccacatttattttggtcagaagatgtgatacagtatctttgatttttatttttttaaaatttctttctgttccattatttgcaaatgcgcactatttcctttactgccactacatagttgtacaatacacctgtaagccaaatttgtaattttcctcatgataatatgttgtcctatattttgttgtcctgattctcctgaatgctccataaatacgtactgaccatagaaatctatttattataatttcatcctgtagaccatttctcaaacttaaattttggcagctagcaatgagacaatatttgataacaatgacacatgttggtttgtcttgggagattgcatatcgtgtatacatatttgtccctcaattttgaataaattatctatgagttcctttgaatcaaacattttcatagtttaggctcctgaactgaaggaacttgtgagattattgtgctaatgtactaggatagtatgtgacaaatggtaatgcctaatatgctttgtgggtaacctcctattttactgaaatggatgatgcatggtgattaggctagaattagggtatgcctaagagatgccagttgtgattttttttttcttagaacaattgaatacatgtcctttttgactggtcagaaatatggcactttcaataaaaaaattgttaacgtccaatatctgatcaaactggataagtgttgagagaagggtgtattccatctctggcttatcaagtggtggtctcctcacacttgaatgtacttattcgacataccattagtctgtctacataatactgcaaatggaaaacagtggcattctcttatttctggatttttatgggtaatcctttcgaaattgaccagaattctctgaattcctagctcatccctttcacttttctaccacaattgtccttggttttggtgttgttaagtaagatttaatttttgagggatgctgagaatgctactatgagaatatttaatttctattcattgtgttttaaaaaataaatttatatttctgttctgggagatgctgggagatgctgggacattggtgctatattatcattttaaattcacaaagagaaagaacttggattatcttataatattaggtatgcatttgctaatcggaaattgggaatggaggatggaattggagatccaatcttgcaatcatactgggagctacaacccctggtgtagatttgaaatttcacctttgatccaaaactaggctctagtaataaaatgaacatttaggaaaaggtcacaatttatggttaaaaaatgagggggaaacaagattgaaaagaggcactatcaccattgttactgtcctgtcatcactaccaccttcagtgacctgttgccaccatcttcactgttgatgcctctgcgaacttatcatcatcataggactagcagcatcatgtccaacaaataggccaatcctactgtttctcttcatgagcacctcttcaggaccaccatcaatctgtcaccagttatctgatttctacatcacacacattaccatcttcagcacccactcaaaaccaccgccatgatcaccactttaagccactattaccaacttcccaccatatccaatactaagtcattataactagtacattgccaaattaattttaataccttcactgcttccatcatcatgctgcctggtccacctcctttgtggggaaaaaactgctgcaaccatgttaactcttggtctccataagttcaagttttatcgggaattataatttatttatttatttattttctttatggtgagtgagaatatatgttagaagggggctgtccttcaaatataaatctagtaatgcatcattaaatcatctgaaattccattattgatatgttagcatgtttgccaacatttcctgtatttctttcttcatagacacttgcatactagcatgtctatgaacaatgtgttgaaatatgaaatttcagctacttttggaaatttttagtgttctctccaatatatcataaggcctattttcaacattgaaccttttaatcaaaacttgagagagaaagtgacattactgagaacatttgatgttgccttctgcccttgtttcatgatccttctatccatccatacagctgattcaccatttggataaggcttgcttcttctgggtctattcagatcataaataccatgtgaaaaagttcagcgtatgcattattgaatggatggagctagcagtacttgacttgtccttccaacctgagctcaattttaaatgaccaagatatttattgttttatttttcaacatcaaattacaaatttgctctattaactttagttcaggctggtcacttttacattgttgatatgttctctccaacctgagcaaattatcatccaatggactcggcttgcacatcagctaactcaaacacatcaatttcctggtttgataggtggatatgcaaatcagtatgtcatatcattgtgttagctgcaagcatgtgtgtgtaaatcattatttttgtgattttttgagcatagtgtattaaatttcattatgcggtttttaagagtgaaatggaggattttgaggattaaaagggcttttagttgttagggaatgatttatctaataaatatttatttggttggtttcatttattggtgggggttgacactattgcttaattagatttcatagatagtttgggtagaacttagggttgtgttttgtttttcttcttgtagctgtttagtcctttgtactccctcaatatgcccagtgtactcgagttgcacatgtttcttgctcctaacttataagtacaaatcattgaacttaaaaatgcagaactgaaatattttccaatttttttctttcagatatcatgctttcttctctccatattgatatcaatcttgatttatcaattgattgtattttacttcctagatttctatttttacttatattcctctgtatttgaccctcaaggataaagcagggatcagacattttgagaaatatggcaaggaagcattatcaattggttaatgttcagagcaccttttttttccacaaaagacacagcaaccttgaactttactccaatagaagaacaatgaaaaataagtaaagtaaagaggagtaaaaacaacatactagattgacagttcttccctgatgatatggtaaaaacaaggtccatttatttggagagaatgaaagtaaaaatatcatctcaaagcaaatacctttggttacatgaattttaggggaaaacctctggctgatgtgtgctatttccaggaacaacaccatgatcccatggccactccaaagttttaatcttctcttttaaaacatgttaatatctaagtgaggtttggccttgttgtcactatcagctacagatatgatgcaactttcattggatgtttggaaaactttcagcccttacaaaggcctttacataggagagaaaattttagccatggagcccacaatgttttttgtcctgtttgctcatccagtccatacacgccttagcatagttggtgcagaattgataaagatactcatgccccacctcaaagcttcggatctacatttatctgtaaacagcatgctttgggtattttaagtttctaaatttcattactagttagattgagtcaattttggtcttgtttgttgttatgtttgtgaacatatgacatacattcataaattttaggcactggtgtgcgaatgccagcattagcctattgggacgagtaggcccactacttcaccttcatttaggcatcggccaggttagtgcagtgaacttgtctggctcctttgctaaaccccctacccaccagaatattacaacaaataaattgtgcatgaaagtttcccttcatatggctcgaatcactctcagatgccatgaggcacatccttctcctgtttgttgggttgtttcatgtgtgtgcaaatgagaaccagcctaggaagcagggaaccatgaagaatatggacagacggttaaatctgcaagcaaaagaaatggagttctcgttgaagctttcttcctttattagtgaagggggcatgggagatttgcagagtccatgccttccataccacaccaccagactggcttttgtgttagttgtagtctgtcttcactcctctcactttggaaagattagcagcattttcttatgatgacttggtggagggtatacgatgcatcagggtaaaagattgagtggtatccatggggttggttatagtaaggcccagctggaaagtggtctttcctctatctttagcttgatattccccatttttagtgtttcaatcatgtttcaaatggctcccttaagtatgtgcaaggagttgccccattgaataattagaagtgggatagtattctctgaataagttgcaaatctgagctttagtaagtataggttttttcaggttttggtttttgttgaagaaagctcaattgcaatcttaatttttatgttcaatttggttttctattttcttgtaaatttcttttttttgttttcccaaatatgcaggagtcatgttttagaaaacattcacgtctatcagaaaaaaaaaaaaagttttagaaaacattcaagatgttttaggagtatttctgtattgaggtaagagcctaagccatcagggattaaaaaattaagagtagatgaaggtatgaatatgcttatttttactagtgtgactaataaagtagagttttgtttcctcttgggaaaatagtccttttcaactgtggtaaccagttgtaagaggtaggttctaccttcctgtttctcaattaccttcgcttcttatccctcttttctactattcatattcttttctacaggacttacatttagaatctcgggttgttttcttgaatcattcatcatctgtattcaaaaaatgtccctcatctactacaggctgattcttttgaaatgtaaattacacaatctcatttctaagctttaccaatatatgatagattaggaatgggtgtcataaagaaattaatttagtgaataggaaacaaagacaaaaattatcatgttctcttcaatctgaataaacctgtagttgggggtgtgccaatatgagaatgcccctaagattattttgttttaaatcatttgagggtagcccaaaacctactttacattgtcagataataggttttgcattaatgcagagggtgtaaaggattcagcaaaagtttgagtcaaaatatgctacccatattttattatagatcttaaaacagcagtgcaagttatttttcattttttgcatgtattgcatatgccagcacgctagcatatattatagggtgggccaaacttgagtgttcgctctagcctccaggttgtagtgaggcttggatctgcatctttagggttctaatatcattttgggctgtcattctttttaatgcttccagacaattttggactttgtaatgtctactaaaatttcacgtttttccattttcctaaacatactataattttcttgatatttacttcagaatcggtactttaattgacatttcttaattttgaagcttgttgtttcctttgtttttgatacataaaaccttgctatatatgacttatgctaaattatcatctaggcacatgtcaatgaacctgggatctttctgcagttatattaatataatagtcaggcctgtcggcagtatcagaccatgaattcttttatttgtaatatgtgtgcatctaagttccctttttattgggcagtcaatgtgttggtggtgattataatactttttgtttttttgtttgtgttatgctccaagaacatcaatacaaaagcttgatatgggaatactgaaaaaacagaaaatcgaaactttccaactaagcctgagattacatctctctttctcatctctctctctctctctctctctctctctctctctctctaagacagatacacccacataaatgcaatacccatgtgcaagtacacaatctcatacataattttgatttggtgctttgtatgatatttgcaatgggtcaatgatgttttaaactattaattgctactttgatgccatgtggcacaggttgaatatggttggttaagattgttttagtccttttgaactctaggccaaaatgcctcagttctctagctaaatcttgtcgtatatatttcaaatattaacaatcttttgggtttcaacactttattcttgtttagaattttcttttgtttctttattcaatttctttttagaaatagatttgattataaaatctctatatatactttccttataaacagaaatttcttaggaatgcgtgcttagtgaccaatgtatctaaagctattgcaactaatgctatgtaaaacttttgacgtatcatatttcatccaaagatgaaagtttgacagtttctgcaaaatatagcagaaatgtcagtttatcagcagtaacccactgctgcagcatcctgacaaattgttttgtcgtgacatcatggaaatattgctgacatattaatgatacttcgatgggtggaaatattggtagtatctcccccattatgttattttctcaggagatatccttcgtagatataaagattgaattatgctgatatatcagcaataaatcaccgaaaaagagtgtcaaagtgagagcgagataagagagcgtggaaaagagggagggtgttgaagagtgaaagagatcagagagagtgtggaatggagagagatcagaggggggtgtttatggaagagatcaaagaaagtatggaagagagatcagagaacatgtttaagaaagagaaaagagtgttgaacaacgtacctgctataccaaagagaaggcttctttgacagagaaaagaaaaagtgaaatgggcaatgggcactttgccgtagagagagagagagagagagagagagagagagagttgtgtcaaacagcatacctgtcataccgaagagaaagatcagagagagttcagctgtctcaagacttcagtgtttgggttctttgacaaagaagaagaaaaagtgagacaaactctttactagtctagatgtcactgaattattgatgatgttttggtgggtggaaatcttggggatatctccctgtaatgtgattttctcagtggagagaagagtaaggagggagggaggagtgttgagagagagaaccattttgtctggacaacactgaaacatggttgatacattgatgacttatcaccatgtgtaaatattggggatatctcctcatatattgactttatcaggagatatccttggaagattggaggtatattgctgaaatatcagtgatatatcaccgaaaaagtgtcaaagtgagaatgagatcaggaaatattgaaaaaaggggtgttgaagagtgagatatatcaaaaagattattaaagagtaagaccagagaggatgatgaagggagagagatcagagggagtattaaagagagagatcaaagaaagtgttgaagagagatcagaaagagtgttaaacagactacttgtcattactaaggaaaagagattaaatagttatgccaaagagagagaccaaagagaattccatcctttaggccttcaatgttaaggctttttggaaaagaagagggcgaaccaggttccatcgtcttcaatcctttgaatgttagggttctttgacgccccaggggggtggttgttgggggtgaggagagtgtctccaaactttcaatattagagttcttttatatagaagagagagaattctgtggttttctaaatagctttactgagtcaaaaaacgccatagctattgtacgatggtccatctgagggccaaagaaaaaaagagggaaagatttttctgtaggcattgaaaggcatgtgatgcacgctttagggtttcacctagagagcgtgcaaactccaaaaattgtctgctacttttgttttggatagccgaagcaaaatatctattgttttcaagccttcaaatgtcaaggttctttgacaaagaggggaagagacttcaagcttttgatgttagggttctttgacccacaaaaaagttcttcaacaaagaagagagagagaattctcttggttttttaaatagctttctatgtcaattttttttttttttgataggtaaataagagtttgtattagtaatgcctagaagcggcgaaaaaagtacacacgaaatatagaaacaatacccaagagctaggcaaaaagaaagacaaaaacctttcacctaactagacaaaagccactctataaaatcaatcatggacaaagaatgatcctctaaatacaccccacaccaattcacaaaagtgtacaaaaaagaaagttttaaagcttggtcggattgttctgtgtcattaaacactctcatttctttccttccataaggtccacattaaacaaaggggggcagccctccaagccttttcctttctcttactcacaaaagcaccatgccaaccaatcaaattccttttgattgaggagtgcaggacccactgcacatcaaataaggagaatataaccatttaaattcctttctctgtgtcaaatataaccactgctattgtaggatggcccatctaggggctaaagaaaaagagaggcaaaagattgttttgaaggcatgaaaaagcatgtgatatatgttccttaggctttgcctagaggcatgcaaactttcaaaattatttgtgctatgtttgttttagatggccgaagcaaagtatattaattcattatgtacaaaaagaagcaaattttactacttattcttttattacattttgaaactcttgcagcaagagctaccaattttagtcatttagaaccatcatataaagagctgcagcttctaactctgtatggtgcaatgcagaacctatcaaataacctggtgtgtgagtatggatatgaagttctaggttgtatgtgatatatatttgacttatggttttttggaagagtatggctaagatgggagagaaagggctggttctgtaaggttttttttgtagctaattgttgtctgcaaggtcacgtttaattttgattcaaagagaagaaagataaatgaaatacctgcgatatttgaaggctgctctacattgtttaatcgaggaactttttggacaaagaaagggttgggatttgacgattttgggttttttgatgtcagaaattcaaacaatagctatcacaattggatttactatgcgagacttggactagtttcaatgaggctggattttatagcctatcaaaataaacaatgaagaccgaaaagctggttctgttccaggtcgttgtattactaatcagtgtctggatggctgtttatggttctatttacttgtagggttataggattattggaagattaaagcttagaaaatgaatctgtagaagcaaaggagaaaatatcacctgaagtaacaatagaatattgatgcaggattttaaatttatagcactatatgactctcttgtgttatagaataagatgaagaaactaaaaaattacaccaaggttactaggcaatcacacttcgggtttcctagcaatcacacttaggaagaaggtaatcacacccttgaaggaagcataatagatgctgaaacttcaataaaattctgcttccttaccttgaaagactacagagatgtatatagactcttatgaccttttcctaaggcttggacattggaactagcctttctccttctaagtcatcaaaggatgttttcaatgttgttccccatcaaagatgttgacttaacttaccaaataagcattagatttaaaacaaaatgaccataagtagaaatggaacaaccttaaaaaatctcttattcaacaagactaatgtagcttagtttatcttcataatatagttatatgttaagcaagtgtatttgtgtaagagtatgtgcaaactgaactaacatgcctctaatctctatggtgggcaacgaggaagctataattgggtcacagattccataaaattttgggaaaggaacactcactgaacaaataactcttttatctttgaatattcatctatccttcttataaatgaccaataaacagaaaattgataatctccatatgttgcatctttgcatcctatggtgatgaagttacagacactatttcagaagcagtttcatgcctgtttgggggagttacacccctaaatgaagtatggaaaagcataattaatggaacaatgttgggtcccttcagcatagttttgtgaagtttttctttgtacttttatcaaagtctagtggcatttcttgtgctaattaaggttctaaagaaatttattttgtgtggtcattgttctttaagtaacgtgttaatagtttctcgaaggtcatacatattgcttatgttattgttctttgtatgattattgttctttaagtaatctttagcagtttctcgaaggttatatatattgcttatggtatgatcaattcttacagctcagtgttagcataagttatcatacatgaatagtttcaaacagcttatctggaataatgtattgtatgataaagaactcatcaaagatattcataccattgggtgattgttgatttgttatgaatttgttacttctaaatgatggtcttttcttacatgtgtgttcatacagacgtaatatactagagaagaaattagctg

SEQ ID NO: 11191 - DNA, 2759 bp, Vitis vinifera
  Intron number 6 from transcript GSVIVT01000850001 (locus G SVIVG01000850001) derived from phytozome v7.0 (chr-ID chr1 3_random; pos 2921381 to 2924139 reverse strand)
aatctgttgacgttccacttgaatctcttgagaaggtataatgttgttaatatttgaatttatacctcgtattactgagttaaatatttgtagaatgggaacacttcattgttatttcttcccatctttattctgtttttctgaaatttcttttatccaaactggtggaaggtttcttttgttactgggaacttcctttcttatacagtttctatggtccatggtatcttatatgttatcatgtatctgccaatatattttgttaaatggcaatttttttttccaccaataccattaattgttatgctaatggttttatgttgtggtatctctcatatttgaaccatagcatttagttaggatgcaaagaattcagagatcacaaaggcatactgatatttgaaatagcaatagcatgatttgcaaagctcatgtggggccttgtaatgacggcttgtcccaacataggtgatacatgcaagtggatcatttttcatgagtgatcgttgatccacatttggttctgacctcatttgccatggagtagtctgagaatttcatattcaagggtatattcctgactttgagggtgtttgtcatcatggttagaaggcatttggttgtcaattttatcaatttatgttcctttttctgcttgataaggtattgaaaatcatattagatgaagtatgagaaagaatggtagatccttaaagtaagtatttgaaagaaaataaatgtagcctacggataagatggttccaagcaacacacgctctgcaaccagaaaaaagaaaagcaaaaaaaaaaaagaaaagaacaaaccaaacccttaggatttgtgggggttgaggcagatggagggaaggtccccaaaagaccccaagtagaaggtcggtcccttctttcttgctaaatagcagcttccttatatagctgacctagactcttaacatttcagagcaatccaagcttcttgataagtcaacaatttgttacatcccaatgatctccatggcaaatatctatggttctctatcagcaagaatacaatatactatcttataattcggtaaataagcttaggatgaaaaatgggaagggtcttaggcccctttctggtagggggactgttattgtggttcagctttatgagttttgggtgtagccttctgaagttatgcttacttgttgaaagaaattcttgttttctttatttggttgggatgagagtttcctttattgactcatctagtaaccatcaagtgcatttcttagctaagagggaattttactagaattaatttcaggtgtctcttttgaactcccctcaggatttagtttagttgttgctataggaactgtgtggctattcattttcttcaaaaaattgtaagaaacagtgccccttcagaaaaagtcagatatgtgtcataaaggatgtggggaagaacaaggtagaaaatatggaaacaggaacaaaaaaggagagaggtggtggcccaccctaattttataaaaaatgatctctaaagcctccctcactgaactttggaggagagtgtacaaccctaaaaggccaaggagactacaaccctcatgagttatgccaagcgtgtgacaaattagagaggagtttgacaatgttagatcattggtaaaaaatggcactagtttatacaatagaaggcataaacataagtataagtggaaaatgcttataaaaaaagaaaattcccgaattagaaagtgggataactaccaagtctccatttgggatttattctaggcccattagaatcacttttgcaataattttttacaactaatccatttgctaaaataaataaaaagtgatttttgcaaagaatcaaccttttattttaaagtgtgtgttatgtcttcaaataatttcctttagtgatttctttatatatataatttttctttctcggcctcttctactctaaagccttgtcttttggacttatatatactaatataaaatgtgaaaaaaaaaaaattattaccatcaacatatttacttgaatttatttctcttgcgatttgtgttataatactcgttgttaagcataaaaaggaaaaatgaagttaaaataggaaaatgataaaatgaaagagaaaatattaaaaatttgtttttaaataatacaatgatttatttaattaaaggctcctttttatattgaaatgaaggaaattgtttaaaattttgacatctttgtttttatttggtcattacatattttcatagcaatttaataatctggtttatcaaacacttaaatgttactttgaaacacatagctcttttaaaccatagtttatcaagcattcaactgcttttcatcacagctaatttttcttttagcacatgcaaaagtgattatcctaaaagccagtaataccaaattggacctatataaccccaagaaccctttctctctcctcctcttctgcttacaatagtttctcatagtgtttagtggattttagtccattttgtctaaacagatttcaaacagaaaggtccacatttgttgtcataggggtcatgtcaatcttttttatgctttctagatgtacctggtgaaaattaccatagtggaatttgaaacctaaggccgtttttttcctacctcatgatcaaaacagtttgaaatgacagccttttatcttgctttcttctacaagattttgttgtctgatttatgcttaaatatgtgtagtttacacgt

SEQ ID NO: 11192 - DNA, 13733 bp, Vitis vinifera
  Intron number 3 from transcript GSVIVT01011160001 (locus G SVIVG01011160001) derived from phytozome v7.0 (chr-ID chr8 ; pos 7543016 to 7556748)
ttattgatcactttgggtaagtttctctgattctgttgaatttcagtgtcaaggaaggggctttaattgcctttgaaatgcagaattgattgtgatgaattgctgcctttaatgttatttttcgctatacagtgtgatttgattacttgggtgcataacgggtttctgagttttctcttctctaaaattgaatttgataagtttgcggctattgtatttaatatgatgtgttatgaaactttaacacccttatgaacttgtggaatctgtttattttaaatttgaaggactcggttatagttgtttatcattttttttacacattttggttaattttgtggtggatttgtttctcaagtccatttttagttttgaatgcactgtccaatttggtatgtactagtatttaaatatatctcttctgctttctagcttttagaggaaagtgcactgtcagagttttggtgtttggatgtgcttcaatgtctcttttctcatcattttattgttgacttaggatttgatttgatgtatttattttggtcttttgagaaggaaactttttgtcgatcatttaatttcttttaaaaatgttttctgatgaccttgctaacccaagactaagtggaattagagtgtgttgactccaattttgaacccccacataaagcatccagtaattccatgcgcgcaatgtgattttttgaatttgtcattaaattgcttacaatttgttgccatgtggcaattgatttgatctagtgttttgtcatcacccatacctcactaacgccgatgccaccatcaccaccacctcgagcccttctcaaaaccgtcagcaacttctcactctggtgtcgacctcttctctcctttccatcattgtctcctgtgccatgtatgttctcctccctctattctccttttctttctcttggtcattttttacccttctatgtttttattttcttaaagacgtgctttaagagaacattttttaatttttttagctttttgaaagttttgtgttatttgttgtgcctgttttttaaaaaatatttctaagtgatccatcatctcttctattttttttaaacaaattcctttctacgaggcacaacctctttttttttttttttttttttttttttttttttttttaatgtagaaaattgccaaatagttttatgtgttttgacttatttttgttatttatggtgttttatgtaagtgttgaactattactatgggcttttatgacttgaattaatttgtttcgaggtttttcacttattctattttatttttatatattttaaatttttattaatgataaaaattttggtcctaaaaggcttacacttcaattctttgaggcttatgccttacctcatgggcacaaaaatactttgccttatgctttcacctttaaaaactttgatatctccaatttaccccatgctaatatgaaatcaatatttaccataggtgcctaacagttaagaaaagcccctggatatttgatgcttagactacatggatgcccacataatatgaatgctttcatggtggatcccaatttcttaatatatagaactggatccatgatgagggaggtaagtggggtgagtttgggatggggttctcttctccccaaccttgcccctatagaaagttgtcaatcccatcctgtcccatacttgggctggggtggcaccacaagccccatgctcaggtggggcaaggataaattggcccagtggtttatctgctcattaactcacagttggcttacaactcctttggaaatgaagcatgagtcttttcaacttccaaaaaaacaacacctacctcttcaatttgactgatccattcataggttaaaaaatgcaaaaaagaatataaaaaactgatttaaaatgtttaattgttaagtaaatggaaaaaaatggaaggaataaaaattcaaaaaccctaaaagtggggttctgtttccaagaaaatgtttaaatactagaagtcagatataaaacataaagtttggtttcaaacaatctgtttgttgaggaaacaaaaagaaaaatgacaaaaaaaaaaaaaaaagaaccctgatttttgagaaaatagaaaagaaaaattactaccagtttgagaagatgaaggtgagagaggtagatgtagattccaatggtaagcattacagcagtgatccttgctgcaatgaagtagtgagcatgatgtggtagataaagaagaactgaatcaagcaaactcaagagggaatgagggaggagcattgaagaagttagggttgaaaaggaaatgataggaactcaatataattgtggtttcatagatatgtaaaacagaggattatttagtaaaatcaaagataatagaagcaaagcagggcaggactggacaatgtctgatcccagctttggggtatagctgtattttctgaatcattcccaatcctctcccttcttgtttaaaatttgctgaaatatggaccattagagtcaattcaagcagtgtgggtcacctggaaatctgggaaaattgccttcctacccaggacccatggttcaatttgtgatccattagaaaatccattgccaacattgaaaaaagagattttttttttctttcaaaagatggattgcataaagaaggaaaattgattactttcttgtttttgcccctattgagtctagcttttaaacttaactaggttcatgttgtatgaaaattgctcaggaaaataccggccttagattgtttatcatttagcctgattaacagattgttaagattttgtaaattttggttctatttttcataggctagtggagaatattttttatacatttaaatttaatttagttttattggaaagaatttactcaaagaccaagaaaagaataaaaaatttgaaagtcagatttgataaaaatgttttttagctggagagaattcaacctaatatttgggactctttaaattagtgttgacaattataaaaataaattcagtgttcttgcttctaggctgctgtgtatacttcctgtatgctttgtggcgttccgccctttaatatatttgcgctcatttataaaaaaaaaaattataaaaataaattcagtgaaatactgtgtgatctttgatacttgttggatgtatttctatgtttaggggacagtataggagatccaggtttaatcacaaaacaattgcaaagtgttaaccatgcaaatttctgaaaaagctaagatgtttgttatgtaaaccaaactgatgacagtgcccaacctctgaaaatattcgaagagaaagggattgtctccaaaatttgtgaaaattgttggtacattctccagagtcttatttaagaggtcatataatatctcagtcgagagtcttatttatgtataatttcttggggtgggcaagagtgtacgtaggtgattatgcaatgcctatgttggacttcattaattggttgagctctaagtaaggagagtatattgttttttgtgtctctctccactttaggccttttgccatctttgtatatgctgtgtatacttttatgccctcttttgctaaccttttttttttttttttttcttttttaatagaattgatctttgcctatcaaaaaagggggaaaaaaaaatctcattcaatagaattttgtaattcatgattatgctattaaaggtagtgcatcttaattatacattatttgaaccccaatacaaacatgttaggcttcatatattaactcttaaccatataaatgtcaacttaaaaaattttagtaactcctcaaatctcaaaatgacctcatataaatggagacatgaaaattctaagttacaatatatagtggcagcaatcgaaatatgaatacaatatttttttatcagaaaaataaggctacaatatgataacagactgaaattgcaacaggcatctcctttcaaatctatgatccattcttcatgagtcgtgctcttgaatgattcttgaagtttaaaagagtgagcagcaaagcccaacggtttgtagacatctatcgggacttgaacttggaacctttcacaaaccctccccaaccctttaccacttgagccaggcctcaagggcccaacagtttatagacatcttgctcttctagtttcatgtaatgctaatatttaaaagccttttagaaactgtgttggtgtttttaatttttttgaaatacacacaggtccacacataggattataaaattttccaagtaggacaatttttttttttttctatttatggttttaaaaggtaaattagacaactcagaaaacatttattttgatgtagcaaatcaggtctaggtccataatctaataattagtaatccaatctcctttgggttaaacaatcaccttttacccactccatgtctagatgtcactcaacatcgtggtctttcttgaggggtttagggttttttgaatctgaaggtatatgttgttcttgttgcttgaattttgttatttactggagtttgttattctatggcagtcttggaatcagcatgaatccatcatatgacctttatgcatgcacacatgtatgcatatttttttcttaatcagaattatctttttatttttattcaggtttaaagtaaacaatttatattaaatatctcaaccaaaaatattttgatatgcatgtgaaggaaatggttttctatgcttttttctttatgagaattataggaagagactaaatatctctatgtccatgcacataaagtctacatattaaagtctatatagttttgtttatgtgcacttaaccacataactaagcatttcattggagattgtgggaaaacgcattgaagtggtatttttaggctaacatggaaatgagttcatgccatgaattgtgaggaaaacaattaaagttagtgcaaacatatgtatgttggcaaatttaaataataaaatggatataaagagggagagatgattagttcaaagaccatgcagaggagaaggctaagctccttcaaagaaacgcattctattccctcttgcaatgcatctctctctttcttgcttttccatggttagttataagaaggtgcaagaccaaaacaataagcatggtctttcaattctccaaaattaatgtgtaaaatgttttgggaggttatgaattggcaattatgattttaattcaagatagttgaatttttttaaatgtcacattcaaatttgaagaggatgctgttagttacagataaggggggcattataatgttggattaagatttcaaatgcaagcattatagtggattttgatggaatttcacctatcacctcttagtggaacaatggtttccccttaattgggtacccctttgtggtgggttgggcttccccgtagtggtcttgtgtagatattaccctcttgggtgttgttggtttaccttgtcaatgtaaatctcattaggagtggatatcaatgtaacttctgttaagagtgggtgttaacctaatcaatttagaagtgatttcaacatgttaccatggatagtggtgtaggggcataccccatttcttaggcatttgtggttgttgtttgtagccttactttgcaatttatttgattggctttttctttttcctaaaattgaatgaatttgagatttttgcatctgttttaattgttatataattttttagcctacttcatgaatttgtagaatctatttctttcacgtctgaatgaatccatgttagatgccaccagatagcatttaagtatccttcttccactttttgtgacttccagagaaaagtgtagtgtttgcctttggtgttcagagattttttttttttctcttttatcatctataatattgttgacttacaatttcagtcgattcattttattcatttggtgttctgagaggaaacttattgttaacatttaacttatttataaaaggttgtataatgatcttgctggcctatgattaaagtggagtttgggtggaagttggagattttacaatagatagtgctttccctttgcatagaattattaaatgttatcttctctgatatgtttcttttttgcatcaagactctagattattgttttgattttgttatcatgttaattaggacaaatgacaaatataaaggcatgaaataaaacatctaccatatcctaggtatttgagtgatgtattttttttttttcatgtatgattttacacataaacatccatggaatcaagggatgatttgttgtgattgtcttatataatctgtttacttcacgttacacagccttggtccctcaattatgcagttcatgtgcagggtgtatgcgtaggtaacattgattttacatctttaggatgaatggtactaagtttctatataagccagtatgttaggcgcaattacttcattcagttttaggtatacatgtactagagcaatggattaaagtgtcagagaatttccaaatgaattaggaatgcatcccttgccttttctttgttggatatacatctgtaaatgtggatgagagcaagtatatttttgtttgtttgatgtttagtacttgagatatttattgaaataaattttagtttttttataagataccatcagatagtataaaatgtttataaattttagtttaataagatactataaaataagaaacaaaaagggggtgcaacccttgtatcaggaacttttttttgataggtaaaaaaagaaaaagattccttacaccttaaattccacttaggacattcacaaaaatctagaaaagaaaattttccatttcctattgaattatttgttggctcaaaaaataaataaataaaataaaataaaaatcattaccacagtttattcctgtccagaccataaaaagttaactacaccaaaataagcaaggtgaagctgtatttttttttttttttggcaattcttccttttgaatacttatatatccataattgactacagaagcacctttaaaatactaaaaattaagaatgaaaagaagtcaaactccttgttatctcacagtgataagtaagtggttagctaattgctgcctggggtgtagctcaacggtagtatctttggcaatgaaccagaaatctcaagttcagggccccttagtatttaaataggtggatagaggtgtggatgcatatcacttggggattgcttagccggaagttgggatcaatgtctcactatcaaggtgaattccctgctttccaagaaaaaaaggtaaataatcttaagttgtttgcaaggaagaatcttctcttaaactgcttcaaaaggaaaaaagaaaaaagaaaaatggaaatccttttgttgtacaagagacccgtaaatccttcttgtggttaaagagattctacagttcaagtttggagcgttatagatgatcttacttagaatctttcatctgttgaaatatcttattctctgtatttacatgcacagccacacttttccatcaatgcaaaatctcaatcatgagaccttctgataaaccttggatcctaatgtcctcgaccacttttaattaccaataatccaccatcgttcatctcttttgaacctatgtagaaaagatctgaaaattgaaccttgtatggagaatcaccacatcagttgtactgaaacttagttcaacacccatcacccacagaagtaaatctttcttttgtaccgttaagatgatagtatatgaagtatttgttgagatcattgtatagagaaggaaaaacattactagtttgatgctgatgatttgttacatatcattgtgaagcgttaaaggtgattttctctgttataagaagcgtctttttcttgggcttcttgaggttttcttctatggaaacattgttcttctttggtgtaacatatatcttaaacacataccttcttggtgttgattcctaagaaaagcggggcggagaatcttggagactttagacctatcagcctggtgggggggctctataaacttttggctaaagtcttagctaataggctcaaaaaagtgattggtaaggtggtgtcttatgctcagaatgcctttgttatgggaagacaaatcctggatgcgtctttaattgcgaatgaggtgatagactcgtggcagaagaagaaagaaaagggccttgtttgcaaattggacatagaaaaagcttatgatagcatcaattggaatttcttaatgaaggtccttaaaaaaatgggctttgggaccaaatggatgagatggatgtggagttgtgtctcctctgctaaattttccattcttgttaatggagtgccagctggtttcttccctagtactagagggcttcgtcaaggggaccccctttccccttacctctttgttatgggcatggaggttctggacgtccttatcaggagagcggtggaggggggctatctgtgggggaaggtgcttaccctggatagactccagttaagaggggtgcaactccctaattgctgctatttgtgtggttgcgaagaagagaatgtacatcatatacttttacactgtatagtgactagagccctatgggaaattatttttgggttgatagatgttaagtgggtccacccagaaactgtaaaggaggctttaatatcctggaggggctcatttgtagggaagaaaaggaaaaggatttggaaatccattccgttatgtattttttggacggtttggaaggagaggaataggttagcctttagggggggtgagttgaatattcagaaattaaagaattcttttgtctgtaacttgtggaattgggccaaagtgtatttaggtgaggagtctttctccctcataggctttttggagtggattgcttccacttaaggggagatagtttctttttggtccttttcctttttttgaggtagtttcttttgaggctttagccgttttgtatactccctgtatgctttatggcgtttagccttttctaatgaatatcttgtttacttatcaaaaaaatatatcttaaacacgtaatttttttttttttttctttttgcctgtttgaaactcccctgatattcaatgattacaaattatagggctgcagtgtccttagaaaacgactacttagatgttattaggattacacatttcaggacaaatttgcaaaaatgtggaactagtttttatgttgtaaatggtcaatgacatccttggtttaggtttgtagttgttttagatgttgggaaaggggaaggataggatgcagtgttagatgataattttatacgtaggtagacctcaatgctttgtaatttcataactagttagtactcaatacagaaactgttacagagtggtagatgagtccacatactgaattagagttgaaggatgctaaggatgatctgtagaaatgctttttcaaatagtaatatgatgtggtagcaattatctaatggagctcctatacttcaggcatgtgtattgcataacctcagtcttttagcctgggggaacagacatactagtatgccagtattcagaaagtagaaagctggaagggtcagttggggatgatgagtatctggtcctcctaatttgtattggtcagtataggaacttgtcctgtgtatagaaaatttgctaaatcatgatagtgtaattctgacccattttttgaatccgctccatattttgacataaaacattttggagttgtacatgggataccatttaggaagtcagacttctagtattacatttataaaaagagagatatagatatagtgaaagaaggatcagatatcatccgcagaaaactaaaatcccgaatagactcgcagaaagcaaataacttgacaccaagagatggtattcaaggagcagatctgaagactgctcttgggtccagctgaatcaaaccaataggagcgacagcatacttcttggtcaaggagaccctaaataggccaggaaatgaatatgctcccgcaccgctcccaacaactctgtggaagacctctctgtctctccccctcctccccccttaagattttcctttgagtcaatgacatccaaaagagtggctgtgagatcacaatgctgtagaaccttccttctagtgctcctgctgagacctagaaaaactatagccatcgtatatgagatctctctaggagcacccactgaatgcttgtcatagcatgtactgtgaaataacacatgcgaggggacaaatggaggaacaaatgattttaatagtctcttcatttttcctgcataaataggatctgtcaaggctgatactctgaaaggtctccatgcctggagcatataattggtatttcatgtgagtcattatccattcaaaagctctgactgagcttggctgttaaagatggtttggtttattcttcctcaaaaagaaaggaagaaagattttgaaaaaaaaatactgacccatccaagaaatcaatgtcatagtatacattaattaggctggatttaccttcttctattagagattgtcaaccatgagaaaatatatctgaagtcatgaactggacaataaatatatgtatgtatatgtatagatatatagatatagatgaatagatatatgaaaaaaaaaaaaaaaaaaagatgccttagaaggggtctcagttttgtttaatttcttttaagattttgcagtaaaatgttgtagtactgttgatagtgcattttagcatttgaatcatgaaatctgtttcatactatggtattctccatgtgtatcaatgtttttgataaataacaacatttaacttaccaaacatgaatgtaaaatatcaaccatattcaacttcacatttttctcctatatcttaatgggcaaatgcacacaacactgaccagttgtatccatcaactagaagagggaaatgcaaagcacatgtttgatatatcaaattatgtggattgaagtgctggcactctgcatgtgttggaagcatgtgggtcatttctaggtagcatgcttctgttagtccacccccccactaaggaaccaccatttgccctccctgcagcaaagagtatatggcatgtccattgctttactgtgaatacaaaaaattattttttcccaaaaaattggtggtggtggtaattgggaatgtaatttttaagggtacaaaacctctgaggtgtgcccatttgtcttgcccagcttcgcctattcctatccgtccagatgctttagattagccccagttgggcagtattgaaacggcttctaagcaagttcctcatgaaatgaaatttaaagttacactagtggcgatattgtgcttcttccttgaagtagtttacttttgatgaaccaatctagctggtactgacgtagcacaagctcactggtctacattctcctgctgatggtgaacaagatgagacagcagcaaccacattagagttcttgatgagctcagtttttcgcctagaatatctggataatggaaatgctacatcttctttgagttagatagatgagaaaggcatgtttcaatatgtaaaggagtaaccaggttaattgatttaagcatgccctgcattgggctttttcaataattttccttaaatagtggctcttcaattactttgctcctttgtcttcatctggttagtggcacacaagaaggtgaatactaatgacatgctacaagtgagaagaccctacaaagcccttagtccggatatttgtattctatgcatgaagcatggggaatcagctgatcatatttttcttcattgctccttgacgattgggttatggcacaggttatttcagttagctaagatggattgggttcccccgaggagcatccttgacatgatgtacatcaaattcaatggatttcgttcgtctaagagggggatagccttgtggcaagctgcaaacatcgctcttatccggattgtgtggagggaaagaaatgcgaggatttttgaggataaagcaaggaattcagagtctctatgggactctattgttttccttacttctctttgggcttattgttccaaggtttttaaggggactccccttaatgcgatacatcttgattggatagcagtgtgtactccataaggagtggtctttttagagtgtttgcttgtttttcagtgtatttttctatagtttagctttctttggtaggaggattcctcatccttcttttgtacttttttatctatcaataaatctttgtgtcgtttccaataaaaaaaaaattactttgctcctttgtaaatataaaatatttatttacttttctcctattgaaaatctgtgtcaagagccttgtgtaagttccattagattgatgttgccttgatcattctgagagtatgatatataatcattcttgggagtatatgacatataggattaatcatccatgactacgctaagtaatcttggatatcaacctttgggaatccaatatccaagattacttagcgtagacacggataaaaatgctcctatttcatcaattctcggatattcccgtcctttctcttggaatttcaattttcgccgaaatcttactgattctgagatagaagatttggaaagccttatgcggtctcttgatcgtctacacatatctccttcggttccagataagagatcctggtccttatctccttcaagtcttttcacagtcaaatctttctttctagtcttatcccaatattccgagtctcctccagtgttccctactaagtttgtctggaattcgcaagtccctttcaaagtcaagtcctttgtctgattggtggcgtacaagaaggttaatactaatgacttgctacaattgagaagaccccacaaagcacttagtccggacatatgtaagttgtgcatgaagcatggagaaacagtagatcaccttttcctccattgctctttgaccaaggggttgtggcacagattatttcagttagcaaagatggattgggtttccccaaggagcatatctgacatgttttttactaattttaatggtttcggatcttctaagagaggggttgttttatggcaagacgcgtgcatcgcgttaatgtgggtggtgtggcgggaaagaaatgcaaggattttttaggataaagcaaggaattcagggtatctttgggattctattcgttttttggcttctctattgactttttgttctaaggtttttaaggggatacctcttaacgtgttacaacttgattggttagcggtgtgtaaatagaccgtttgcttattctctcgttgtatttcttatatttgattacttgtagtcttgtttttctttggtgggaggatttctcatccttctaattgtaccttctttttatcaatatattccgttgtcgtttcctataaaaaaaaaaaaggattactctgaaaaactgcaggagaccttaggcaagaaaaaagggtggcaatcaagtccttatatgcaaactatacgtatggacatatataattcattattgtcattcagtgattgcttgtatacaagaacctttattataatcatttgattcttatgattacttgctgtgtgttgtttgcttgtctaggagaaccacaacaacagaagaaatccttactattg

SEQ ID NO: 11193 - DNA, 13914 bp, Vitis vinifera
  Intron number 30 from transcript GSVIVT01008813001 (locus GSVIVG01008813001) derived from phytozome v7.0 (chr-ID chr 18; pos 2360221 to 2374134 reverse strand)
tcaaggagatagaggtatgctgagacctttttcttcatgtgagtttttggctaatggtcaaacaggaaaaattccatgaaaaaattcactgcaccagttgacataagttagtattactagctggcagagtacaaccattcagacctcccaagttgacatatatttgagattctggaatttgcaagagcctcgcttttcatttaggggtttatatggttaagattctggaatttgcaattatgagaagtttctttcaagggagaaaatttctttcaagttttgactatttatgtgcaggatcattttttgaattactggaaataacatctgttaggagtaaatcccttgtaacatgtaaagttccttgcttgatattcataatctgttgcttgatctgaaaaacttgggaggtgaaaccaaccttggagttggtcttactaacagcctcccaaatgtctttagctgtaagaagaagtagatatgtcttattgatctctagttgcatgtagtagccaagacattaccattaagttttttgccttctaaatctcatacttgggatcgctttcaaatggtggttttgctatcctaataacgtatttgaattgcttctcagagaaattcttacaacttgggaccactccgtaaaattccttccattcagttttgacatggcaatttgaagggtaggattttcagagtgtatggatgcctgggtgctgaaagaagctactgctgaagtagctttggtgggcttaggtatttcagatatggttgaaagaaaatatgacaataggaaatatgaactgaatgagctggagattttcttagaagaaagtggtgacaaaaaataacagcaatgaaggctgtgaactgagaaataaatggaaagggtaatgacgatgaaggttgtgaagtaggacacaaaatggtggctatgaactccacctaaaacataacagcaatgaaggttgcctgtaaacccaagagcctagatggcttttataccatgtaaacttgtaaaagagttatgaaaactgatatatttcttaggaaaaaatattacaagatatatagaatacactagttgacgtatagaggtctaaactaggaaaaatttccaaacctcctatacatagcagatccacatcagtggtaataatacaactgtaaatgtacaattgttatgtctggtcaggagtgccagtggattttccaaatcagacagccacaatgatggggagtaaagaccaatctgggtgtagctaggggctgggctcaggaggctataatcccagtatcattatgtctgatcaggagggcatctcagattcgaccttcaacaattgccgcttttagcagttttatggatatgccagtggaggggcatgaaaaagagattgcagccctgttgagaaagttggaaacaaggaaagggggcaaagcttcaacttttttagagttaaattttgtcttgtatacccattttgcaccaaattgtttcttttcttttggaagcttagtcaactccaaagtgttgttcctgtcagttgactcaatttgctgatccatgtctgtcctccattttagatcttcgtatgcttcctcaaagatgattggatttgctccagaaaatagtgcaaaattgatcatttctttgggattttcatttgtaatcatcacatattctgagctggaacaccttgttgattgcttatgaaatctggctgatcttctactctgccaaggttcttcattctcctgtgctgtcgtatcctcattataaggtttggtctcttcatcttcatcattcctatcatttcttgtgtcttcatcatccatctgttttgttggttctatcttccatgacctagagcattcttcatcaaatgtaacttttctactaataacgtttccctgggaaacaggattatgcaacctgtaagcctttgaattttcactataccccaccaaaatgcatttttcagccttgtcatccaacttgcttctcttctcttttggtcatgagcagttgatccaaaatctctcgagtaatttgcaactggtttgatagctcgaagcttcgtgcaggctatggcgttgacacttgtgtcacagtccagttcaagggctacataacacatgctattgcatctccttaaaaaattttaagcctcaagtgcgctttttgttaagcactttaatatattttgtttgcctaacaaagaaaaaaagtgatccatcaaaattttcacaaataaagatgacaatcatttgatttgtcaattgccactatgaatttgttctcccttttgttttagtcaaatgactacagaaataatttggttgaaataatcttggatggattccaagtccttcattcttagtgtgtcaaattcgcttcctcttctcccgtgtgagttgccttatgctattagatagttgctgttgagagagagagagagaaagaagaaaaaccttaattctcattcatgtaatctctacttacaattgagagatatatatatacaaggctaggagtcctaactaccatacatgtgacctatattaacaaggaaagataatatactataaatacattatattcaacactccccctcaagctggagcatatacgtcatatgcactaagcttgttacaaatatatttaatcctaggacctctgagagatttagtgaagatgtctgctagttgatcatttgaattaacaaaacttgtagcaacacatcctgatgcgatcttctctctaatgaaatgacagtcaacttcaatatgcttggtcctttcatgaaagactggattggatgcaatatgtaatgcggcctggttatcacagatgagtttcatctgttcatcctttccaaatctcaactcccgaagaagatgtcttaaccatatgagttcacatgttgccaaagccatagctcaatactcggcttcagcgctagatctggccactacatcttgtttcttactcttctaagatattagattacctccaataaaaacacaataccctgaagtggaatgtctatctgtgggtgagccagcccaatctgcatctgtgtaaccaacaacctgagtatgacctctgttctcgtacaatataccttgacctggtgtacttttgatatatcgaagaatgcggattacggcatcccaatggctatcacatggtgactgtaggaattgactaacaacactcataggaaaagaaatgtttggacgagtaatggtgagatagttcaatttacctacgagccgtcgatatctcccggggtctcctaaaggctccccctgtcctggtacaagtttgacattcggatccataggtgtgtctaccggtttacagtctaacataccggtttcttccaggatgtctaaagcatacttcctttgggaaaggaccacaccagaactggattgagctatctcaattcccaagaaatacttgagtttccctaagtctttggtctgaaagtgggtaaaaagatgttactttagtttctgaataccatcctgatcactgcctgtaatgacgatgtcgtccacataaacaaccagataaatacactgccccaaggagttatgatgatagaaaactgaatggtctgctgtactgcgaagcatgccaaactcttgaacaacagaactaaaacggctaaaccatgcttgaggagattgtttcaagccatatagagaacggcgtaacctgcacactaaaccaaactccccctgagcaacaaaaccaggaggttgctccatataaacttcctcggcaagatcaccatgaaggaaggcatttttaatatccaactgataaagaggccaagaacacatagcagccatggagagaagcaaatggacagaagcaatcttggcaacaagggagaatgtgtcaccataatcagaaccataaacctgagtatagcctttagcaactaagcgggccttaaggcgatcaacctgaccatcaggaccaaccttaactgcatagacccaacgacaaccaactgtagatttaccagagggtaaaacaacaagatcctaagtgccattagagtgcagagcagccatttcatccaccattgcccgtcgccaacctagatgggaaagagtttcatgggtgctctttggaagagaaacagaggatatagcagaaacaaaagcagaataggttgaagataatcgatgataactcaaaaaattgtaaataggatgaggattacgagtagagcgagtaccttttcgaacagcaatgggtaagtcattaggagaaggcagagccggagcaggtgaagccgaagggataggaagtgagtcagcaggtgcctcagcaaaagggagaggagcaacgacacgagggctacgatgataaacctgaagtggtcgagggggcatagcatcaggtggggagacaatgggaatgggcaagacttcagaaataggaagagactcagaagtggtggaaaagaatggtgagtcctcaaagaaagggacatcagcggagataaagtatcgatgagtctcaagggaataacaacgataacccttctgaagtctggaatatcccaagaagaggcacttcatggctttggcggaaagcttgtcctgtccaagagtgagaatatgaacaaagcaaatacaaccaaagacacgaggaggaaggaaattgttgaaataatgccaaagttaggactttaatttaggaataaaaaaggagagatcatttaggatatttccttatgatttagtttcctaattttaggagagaattaagctagattgattttttcttattcagtcatttgtgtatatatatgtgtatggtgtgtaccgattaatatcaataaaggagttcagaaattcttcatggtatcagagccagttttctgaaaccctaatcccttctggccacctcttattcaggccatcactcattccggccaaatctctctggccatatctcaatccgatcatctctctctctctctctctctctcattcaggtcatcagtccctgttctcagatccaagggagaaaacgctttccggacagtcgaatcgtcgtcagaaaacactcaccgccggcaacttttccggcgaactttccggcgacggtttttttctacaccgcaaggagcgcctggaggagatctccaatttgtcccaaagcaccggaaccagaaacccatccacgcgccgcccacgcgtgtttttccggccggcgactgcatctcacgcgccggcgcgtgagggcgcgtgagccactttccggcgacgcgcttcctcctccaggctcgcctgacgccgaccagccacccttcctacctgtttatgcaatccgagccctgcacgtgcctcttttggggttcttttgcttccgcgggccctttgatcagattttccggcgtcctccggctattttttctcaactccagtccctgcacgtgctttgaaaagtgttcttctacctttccggtccatgacaaaatacggaatggcatcatcacaagtatccagcgtcacgtcaccagaatcagggggcagatctgaaattccaaacctttgtggcaatgattcctctcctattctcatcacaggacacaaattaaatggccataactatttacagtggtcacaatctgtgttgctgttcatttgcggtaaaggaaaggatgagtacctcactggagaagcagtcatgccagaaactacagaaccgggtttcaggaagtggaagattgaaaacagcatgatcatgtcatggcttatcaattccatgaacaatgacataggcgaaaatttcttgctgtttgggactgcaaaggacatatgggatgcagccaaagaaacttactcaagttctgaaaatacttcagaactgtttcaggttgaatcagctctacatgacttccgccaagtagagcagtcagttactcagtattacaacacactcacaaggtattggcagcaacttgacttatttgagactcactcatggaaatgctcggatgatgcagcaacatacaggcaaattgtggaacaaaagagactgttcaagttctttctaggactaaacagggaattggatgatgttagaggccgaatcatgggcattaaacccctgccaagtctcagggaggctttttcagaggttaggcgtgaagaaagtagaaagaaagtgatgatgggatcaaaagagcaacctgccccaacattggatgcctctgcccttgctgctcggtcatttaatagtagtggtggagatcgtcagaaacgggataggccttggtgtgattattgtaagaaaccaggccattataaggagacttgctggaagcttcatggcaaaccggctgattggaaaccaaagccacggtttgacagagatggcagagcacacgtggctgccaactctgagagcacatctgttcccgagccgagtccattcaacaaagagcagatggagatgctacagaaattattaagccaagttggcagtggcagtactaccggtgtagccttcactgctaatcgaggaggaatgaggccgtggatagtagacacaggtgcttctgatcacatgacaggagatgctgccattcttcaaaattacaagccaagtaatggtcattcatccgtccatattgctgatggttcaaagtcaaaaattgccgggacaggttctataaaacttactaaagacttatatcttgactctgtcctccatgttccaaacttggattgtaatcttttgtccattagcaaattggctcatgatctccaatgtgttactaaattctatccaaacttgtgtgtttttcaggacttgaaatcggggaagatgattggcaatgctgaactgtgttccgggctctacctcctttcatgtggccaattctcaaaccaagtctctcaagcaagttgcgtacagtctcagagtatgtcagagtctttcaattctgtgtcaaattctaaggtcaataaagatagtgagattataatgttacactatcgccttggtcatcctagctttgtttaccttgcaaaattgtttcccagattatttatcaataaaaatccagcatcttatcactgtgaaatttgtcagtttgcaaagcatactcgaacagtatatcctcaaatcccatacaaaccttcgactgttttctctctagtacatagtgatgtgtggggtccctcccggataaaaaatatttctggcactcgatggtttgtgacattcgttgatgatcatactcgggtaacatgggttttccttatgaaagaaaagtcagaggtcgggcacatttttcaaaccttcaatcttatggttcaaaatcaattcaattccaaaatacaagtcctcaagtcagataatgcaaaggaatactttactagtagtctcagtacttatcttcaaaatcatggcattatccacataagttcttgcgttgacaccccacaacaaaatggggtggccgaacgcaagaatagacatctcttggaggttgcccggtgccttatgttttcctctaatgttccaaactatttctggggggaagctattctcacagctacctatttgattaaccgtatgccatccagagtgcttacctttcaatcctcacgtcaacttttcttaaaacagtttcctcacacccatgccgcctcttctgatttaccactcaaagtatttggttgtacggcattcgttcatgtgtatcctcaaaatcgtagcaaatttgctcctcgagcaaataagtgcatttttctagggtattctccaacccaaaaagggtacaaatgctattctccaaccaacaaaagattttacaccaccatggacgtctctttctttgaacatgtcttcttctatcccaaatctcatgttcagggggagagcatgaatgaacatcaagtttgggagtcttttcttgagggtgtaccttcttttcactcagagtcaccaaatccttctcaattcgcgcccactgagttgtccacacccatgccgccatcagttcagccagcccagcacacaaatgttccttctcccgtgaccatccagtctcccatgcctattcaacctatagccccacaacttgctaacgagaacttacaagtttacatcaggaggaggaaaagacaggaattagagcacggatcacagtcaacatgtggccaatatattgactccaattcaagtcttcctgaagagaacataggtgaggatagggctggagaggtgttaattcccagcattgatgattctactttgccaattgcattgaggaagggtgttaggagatgtacagatcatccaattgggaattatgttacgtatgaagggttatcaccatcttacagagcatttgctacttctcttgatgatactcaggttcccaacacaatacaagaggcattaaaaatttcagaatggaagaaggcagtacaagatgagattgatgcacttgagaagaatgggacgtggactatcacagatttgccggttgggaagaggcctgtggggtgcaagtggattttcaccataaaatataaagcagatggatcagtcgaaagattcaaggctcgtttggtagctagagggtttacacaatcctatgggatagactatcaggagacttttgctcctgttgcaaaactgaacactatcaggatccttctctcattggctgtcaatcaagattggtgcttgcaacaactggacataaaaaatgcgtttctaaatggggacctagaagaggaagtctacatggaaataccacctggtttcgaagaaagtatggcaaagaatcaggtttgcaaactccaaaaatcattgtacggccttaaacaatctcctcgagcctggtttgatagattcacaaaagcagtcctgaagctgggctacaaacaaggtcaggctgatcatattctatttgtcaagaagtctcatgccgggaaattggccatattgatagtctatgtcgatgatattattctatctggaaatgatatgggggagttacagaatttgaagaagtatttgtcagaagagtttgaagttaaagaccttggaaatttgaaatatttccttggtatggaagtggctagatcaaggaagggaatcgtagtctctcaaagaaaatacatactcgatcttcttaaggagaccggtatgcttggatgcaaaccaattgatactcctatggatagtcagaagaaacttggtatcgagaaagaaagtacaccggtagatagggggagatatcagcggcttgtcgggcgcttgatttatctctcacacactcagccagatattggctttgcagtgagtgctgtaagtcaattcatgcacagccccactgaggaacacatggaagcagtctacaggattcttagatatttaaaaatgacaccagggaaaggcctattcttcagaaagacagagaaccgtgacactgaagtatactcagatgcggattgggcaggaaacatcattgacaggcggtccacttccggatattgttcttttgtctggggaaatcttgttacctggaggagtaagaagcaatcagttgtagccagaagtagtgcagaagctgagtacagagctcttgcacagggaatctgtgaagggatttggataaaaagggttcttagtgaactgggacaaacgagttcatctccaattctgatgatgtgtgataatcaggcagctataagcatagcaaagaaccccgtgcatcatgacaggaccaagcatgttgagattgacagacactttatcacagagaaggtgactagtgagacggtcaaattaaactatgttcctatcaagcaccaaactgcagacatcctcaccaaagctttacctaggcctaacttcgaagacttaacttgcaagctgggattatatgatatatattctccagcttgagggggagtgttgaaataatgccaaagttaggactttaatttaggaataaaaaaggagagatcatttaggatatttccttatgatttagtttcctaattttaggagagaattaagctagattgattttttcttattcagtcatttgtgtatatatatgtgtatggtgtgtaccgattaatatcaataaaggagttcagaaattcttcagaaataaagtggttggtcagggaagagaagggagtgaggaatctgatcgtgtcagacagaggagggcatacgattaattaaataacaagcggtaagaacagcgtcccctcaaaaacaaaaaggaacattactatggaggaggagagtacgagttgtctcaacaagatgtcgattcttgcgttcagctaccccattttgttgaggagtatgagcacaagaagactgatgaagaatcccatgataagacataaacgaagtaaatggggctgaaaaatattctctggcattgtcactgcgtaacacacgaatagaaatattgaactgggtttggatttcagcataaaatttctggaaaatagagaataactcagctcgatttttcattaaaaataaccaagtacatcgagaatagtcatcaatgaaagtgacaaaatactgaaatcctaaagtagacgcagtccgacaaggaccccaaacatcaatgtggacaagctcaaaaggagactttgcccgattattcaaacactttgggaacgagacacgagtatgtttcccaagctgacatgactcacacggaagcgacgacaaagtggaaaaacgagggaccatcttctggaacttggagagactagggtggcccagacgattgtgaatgaggagatgagcatcagtggaaatgcaaactgcaggagatgaatccgaggtgaggtgatagaggccttgagactcacgtcctatgccaatcgtcttccccgtactccggtcctgcaagatcacaaatttatcagaaaaggtaatagagcaattaagagtacgggtgattttgttgatggaaataagattaaaaggacattcaggagtataaaggacagaagtgagaggtagagaaggcagaggaagggctaaaccaatacctttagccacagtttgagaaccattagctaaggtaacagtaggtaaagtagaggtagtagtaatagaggagaaaagatccttattaccagataggtgatcagaagctccagaatctagaatccagggtccaagagaagatgtgtgggtaaggtaggcagaggcattactaggctgggcaacagaggcaacagaggcaacagaagcctgagatgcggaagagcttggaggctaaggcagcggagaatcagaggactgggccacatgggcagtgcgaggaggccgtccatgtaattgatagcaacgatcgcgagtgtggccaagtttattgcaataggtgcaatgaggacgttgacctctatctcgggtaccactgcggcctcctcgagagctagtttgagaaactaatacagaagaatctgaagtgctatcaaatggcaaagtctgagtggaggagatacggaggaggcgagcaaacacatcatccaaggacggaactgatgaactaccaagaatctgatcgcggacaggctcaagatccggatggaggccaataagagtaagaactatgaagaacttgtcaagttgtgtttgttgaaccccaacatcaggagtaagaggcatcacagtcaagaactcctccttaagagaggcaatttggccaatataagtagatagatccaagtcctgttggctgatatggacaatagcagaagccaccttataaagacgctggatatcattcgtgtataatcctttggcctgagtccaaaatttaaaacaagttttgtaggctcgaagatgaagaagaatcttggaatcaaccgattgccataatacactacataactgtgcgtctatcttcctccactgtacgcgatcaacctcagggatatctgcctcctgtgtaatcaagtgatcctcatatccttaacccataaaccaaagttcaacagaggcagaccaggaaagataattttcactgccaactaatttctccgaagtaataataggagatccagatatgacagaggaaaaaatggaagctttagtagccatatccacctatctggagaatgaagtatgtttggatcaaagagagccctaatatggcttcagattgtggcatggcaccaccgaaaaagggagacggcctcagatcgcggcgtggtaccaccaaaaaggtataagaacacttcccagggcacgtgcagggattggagtggagaaaaagtagtcggaacttcgccgaaaagactatttggagggccgacagagacaaaaatccccaaaagaggtacgtgcagggctcggatgggagaaccagggaggtagggaggctggtcggcgtcaggcgaagctggaggaggaggcgcgtcgccggaaaatgcctcacgcgccctcacgcgccggccggaaaatggcgtgtggccggctcgtggatgctcttttggtgccggtgccttcacaaaagttggagatctcctccaggcgctccttctggtatggtcggtgtcggaaaaataggtcgccggaaagttcgccggcggtgagtggtttctaacaacgatccgactgaccagaaagtattgggagatagggaaggtgaccggaaagaaacacggtcaccggaaggtttcccggagttgatgacacgggaaacaggaaagaattaggttttcttccttggctctgataccatgttgagagagagagagagaaagaagaaaaaccttaattctcattcatgtaatctctacttacaattgagagatatatatatacaaggctaggagtcctaactaccatacatgtgacctatattaacaaggaaagataatatactataaatacattatattgaacagttgctatgggagaatctcttgattctctggcttgacatatccaatctcaactgcttctgaaagattttgataactgaacaacacctttatttgtttgttccaatggttgtaattagagctattgaaatgaggaagttgaggctgcaatatgttgttggatgccatcttcaaactcagctctgataccatttgttgaaaggattagatggttctgttccttaaaataggctagcagcggcattcaccaattcagacactaaggccttgtttttttccctaagtctaagtgtttatttcctaagtcataagtttcaccttaccctctttccgtttttgtttccgtacattgatgtccaccacaaccactcttagattgttgaccaagagcagtatgctaccagccaccaccccaaattcccccttaacaagaaaaattattttaagtatgttaggtgatgcctcctctaaagtaaatcattagtgtccaccttcttcttggtgggtaacaaaataaaaagctccgactttgtgggggtactttggctatcctattaacttagctagtgacacaaaagattcaaaagtattatgcatgttaggttatatttgggattaatgaaaattacggcctgtagcaaggtaatccaattgtatgagtccaaaccatacagatacgaatgagaggaattactattttcctattaggtcttcctcttagatatttccagttcagttgatgagtgtcagatcccagaagaggacggtagttgtcccatttggaaaataggtttcctatgctgccatacatcttcattatcatatgagcaatattattggaagaatgactagcacttttactggttttatagaagttttgtttgttacatcatattttcctaatatttatttttcgctttgaacccagagggcagtactcgtgaagactttagattgtttctg

SEQ ID NO: 11194 - DNA, 13861 bp, Vitis vinifera
  Intron number 2 from transcript GSVIVT01000198001 (locus G SVIVG01000198001) derived from phytozome v7.0 (chr-ID chr7 ; pos 16041289 to 16055149)
aagagacagttaattaaatattgcctgttagcattaagatttgtatttgtgtggatagatgcaatcgacatacagcaggtagtttatgattattgtgctcatagtcataacaagtatgtgtcccttctttattgctattcaatgttaaagtaaagtttatcctgaagacaaatcacttatgctataattggttgtagctcttgtgctctaaagcaagaagccacatgccccttgaattcaagtggcaaaaacaagagagttaaaacaagaaagaaaaaaaaaaagaattagtgaccattgatcgcttaaaataattttaaaaaaattattttttgatgaatgctttccccaaacatcgctttaatcttttatcatttatctcatattaaaattaagttaaatatggaataatagaaaataaaatatgtgaataattaattaaatggttggcaattgaaaccattacatcatgtgctttaccagtcaagcatcacatgaatagaagaaataacaagaacaagaacaagaagggtaaaaaacatcaaggctaaatggagaatatacaaccatcaacaacaagagcaaagctggaaacaaaaaggagccccattctctctatcagcattgtggtggaaaatctcatccgcatttcaaatgttggagaagacttaccaagtgcaccaaatgcaaccagatggggcatgaagctgtcatctgcaaaaacaaaaatcaacaacatggtgaagaggcataggttgctgatcaagaggaggatcaactgtttgtggctacatgtttctctagcatggaatcaagtaagagttggctcattaacaatggttgcacttactacatgacacatgacaaagatctatttagggaactaagaagcacaaacatgtcgaaggtgcgaatttgaaatggctagtacataaccgtggaagaaaagggaacagttgcaatttcaagttgtttaggtacaaagctcatttctgatgtgttgtatgtccctgaaatagatcaaaatttgttaagtgttggataactaattgaaaaagattataaagttgtgtttgaagacaaaaattgcttgattaaagatgcggttggctaagatattttcagggtaaaaatgagagggaaaaactttactctaaatccattggagaaggagcaaatcactttcccaatcaaagaaaatatcacacagtgtggcacaaaaggcttgggcactatcatcatcaagggttgttaaaaatgaaatctaagatgatggcaaatgactttccagaccttgatgatcacattccaaattgcaaagcagtttggtaagcaaaacataaaaccactccccaagacgacatggagagcatcaaagaagttgcaattgattcatttagacattgcaagccctcaaagaacaccttctctaaaaggtagtctttattatgttgtatttattgatgattttacccagatgtgttggattttctttttgaagcataaatcggaggtagcacaagtcttctagaaatttaaagtcaaagttgaaaatgagagtggttgtagaattcaaactctcagatcagacaatggcaaggaatacacatctgaatcattcaatcgattctatgagaaggcaggcattcaacatcaatttatcactccaaatactctgcaacaaaatggagtaagtgagagatgaaatatatacattttggagatgacaagatttatgttacatgagaagaatctacctaagcagttctaggtagaagcaacacatatagttgtcttcttgcaaaacaggcttcccacaagagtagtgaaggatcaaacaccctttgaggcatggtatggctataaaccatccttgcacttctttaaaatatttggttgtttgtgcttcactcacgttcaacatatcaagagagataagctggataaaagagcacttctaagcatcttcattggctacaactcaattataaaagcttataaagtttttcagccacaaactggaaatattgttataagcagggatgtgcactttgtggaagataaaaaatgaaactaggaagatgaaaaatagaataacggagtttagcataatgacatggtaaatgatgtttcaatcaaaggcatgatgttgctttctgatgtatatcatatatgtaatattgttgtatgtgaacctacagactatgaagaagcaatgaataatcagaattggatgattgcaatgaaagaggagctatcaatgatagagaaaaacaaaacatggattcttgttgaaagacctagaaataggaaggtgattagagttaaatgggtgtatagaactaagcctaatgttgatggctctattaacaaaaacaaagcaagacttgttgtgaaaggttataatcaaatttttggcatggattacttagatacgtttgctccagctgctcgattagataccatcaggttgctacttgttgtagctactcaaaaggatttgagacactacatgaaaattgactttcaatgataaaatattatgtcattgaaagtctaaatttcgtctacaaaaacattccctaacgaaaattcttccgtgccttgttcgttaccctagacctgtcgctaaaagtttcatgacaaaaatcttatttcatcgcccaaagttttccttgatgaaataaaattttgtcaccgaaggtgttttccaacgaaatatttcatcgacaaaagtaagaatttttgtgatgaaaaaaaataaaatttgtctcataagtcgtcaatatttaatgccgacgaattttatttttgttgccaaatatttttggtaacaaattaatttcattagtgatggcctactgtctctgttagttgacttggccacgccccaagccttcgccattcacccacaatgctagctcactcgtcaacatgtgaccaggctctaataccacttgttgatcgaggtgctctgtactttccagtgggtcacctatcctaagatttctttggttgtagcacgcttaactatagagtattttatgacaaagcccccatttgttctgaaaaccaattggtgatcagaacagggatcttatattatttaagttcactctccatagtccattagggtggtcgttggcccccctataaggccaacatgcactatttatttattaaataaggtatgcaagtcgacatgaatttgacttgaactcaattatactcaacccaaaatcatgaaagggtgttagattcaagtcatattgacaagtcatatcaaattttgtcacctctaaacaaacctaatgttgaatgagaacaaattagaggactatagtttattaatagctagaataaattcaatttcagacttatggattaaagtgataaatttgaaatataaaataaaagtacaattgaaagacaatgttaggagaatgccaaagtgtaatactcatattgacattaataaaataatgatcaaaatgaaagtaggattctacatcatttttttttctttccctttctcatctattccaaacaaaaatatcaaacataatgaaacactataaatataaatcatataataatttatgatatatgtcaattatttttataactatatttgttttaaatatttgattaaaaatgcatacaagtataaaaactcctttacaagttagtagccatagaagttactatgttgcgatataatttaagatttcattcttaataactaatcaattttgataaattagtaattaataattaaaaatagtaaatatataattgatcaataaaaaataaaataaccaattattaataaagatgtggttgaaaactttttaaaaaaactttatatttatgtagaatttcacatgtgctatatatattagacattttttattttgaaaatatgaaaatagagctaggcatatagtacttgcaatatattatatcatataatatttaacttatacttatttatttattaataatatatgatatcttcgtacacataaataatatttggatttttatgtaggttttgtttttataaacactagacaatttatttgagaaatttaattctgaccaattatttaaaaactaagtaataattaaaaaaaaactattaatttaaactaggtaactaaatgttagtataaatttacttcttgagtggataaggtatgattttgaatgagaacaaattagaggactataacttattcatagctaacataaatttaatactacatttgacttgtatggataacttttacctaatataataaaaatcatttagtagtatttatatatgtgtagcaccatataataatattgaaatttaaataaatttatatcataggatgtaatcttacatatcttggattatctattgttattatttatatatataaaaatataaataacatattacactataaatattaattgcttaaataatttacatttttgttatttcataacaatactattattacataatagaacatttaaatttaaataaatctacattctagcatttaattttatggatccttaatttttattattatttatataaataaaatattatagtataaatattaagtgtcaacaaatatatattttattatttcatagtataaaccatctacttatttattaatattctttgttaatatcacaatttaataatattatttggtgacaaaattactcaatttgtcaggaagtaatataattatcgacgaaaccattttgtaagcaaaaatagataaaaagttgtaacttttagtgaggaaattattttcatcaccaaaaattataattagtgataaatattttcgtagggaaatagtttatttttgtcacaaaagtgtttgcgccaaaaaaaagcgtcaaattttcccgccacatctttcaacgaaaaaaatttcaaattcgttaggaaaagtttgtagaaaattggcattattgacaacatcaaaaatttcattggtaaaagttacttttagcgacaaaagtagaattcgcccctaaatttttgtcacgaaaagtacattttcttgtagtgagagtgtatcaactcgatgtcaaatcaaccttcttaaacggttacttgcaggaagaaatctatgttgagcaacctgagggctttgtgaaagaaggagaagaaaacaaggtttatcttctcaagaaggctctttatagcctgaaacaagcttcaagatcttgatacagtagaatcgatgaacatttgatgaatttaggatttgctaaaagcttatctaaatcaacattgtatgccaagcacaatggagctggcgttcttatcatctcattgtacgtggatgatctacttgtgactgggaaccacactagtcttgtgaagaagtttaagctagagatgatgaaagttttttagatgacggatctaggtttgatgacttctttccttggaatggaaatcaaacaaagtgaatgtggacccgcacttttcacgtgcgtccccactcgatcggcgagactcgctttttatttatttgtgaaaaattgattttttgaaaaaaagttggagtcgccacttattttatttttattttttaagggaaaataaaacaagaaataaaaccctaaaaaaaatgactccataatttttggaaaagcgtgtctttgaaaacccaagtcttggtccggggatcaagttacttattgggaaggtacctctaggaggtagcacccctctaagccctaaagaggtctctactaattaagttaaggggaatatggcaattaatcggttaattatggatacctaagtaggctaggtgatttcaaaagatttgcatgctaaacaagatcaaatcacaaaaacggagagttagggtgcgtacctgaaccgctcttcaagcgctatcataaaacatcagagttagtatagaagtataacacacaacatgtatttaatcatagtgaatcaagcatacatctaaacacctaaggattatcaaacatatgcatacttcacagtgacatgattgtttacaaaatttagaaaagtaggtgatagggggggcgtacctggatagcataaataacttacaatgcgcttccataagacatgagggattagataataataaaataaagaaaccctagcatgcttgttatctaattagcataaaaaaaattatcaaagcatatgaaaacattaattatcacacacatcttgtatacaatttctaaaaaaagatagacataatttcaacaagtgacaaaaatggcaacaaaaataatttttgaaaagattttcttatgtaggggtttcaccaattccccaaattattatacacaaatttagcccagaattatcccattatgtgggaccacgagctttgattcgtgtttttgttcaaaaccaaactttttgttagaaaccgagaaggatgcaaaccgaacaaaatatggttgcatattattttttaaaataaataaataaataaataaagattttgatcctgaggactctaaatgagtttttgaaatagatttttaaaatgatttttttgagaaaagtattttattttaaaataaaagggattaatttgggaagaaatagaatataagaaataaaataccaaacaaaacaaaaaaatgaaacctcaaaataaaattttttagtaattaacaaaaatgataatggtgatggtagaggccaatcttcatgattttccaatggcctctaaaaatcaaatttaataaatattcaccaaagcaacaaaccaaacgactttagatcaaataaaactaataagatattaatcgggaatttataaggatcaatcaaacacataaattgagataaacaatctagaactaatttaaaatcaaccaaacacctaaacatgtaattataataatgtgaatatagtaacacaagcacatagaattctaaaacatattaactaatcaaaaactagaatcatcaattttagaacgtgagcaaaataaacttaaaaacataaactttattacataggatcaattagaataatagactaaaaattataaaacacttgaactaaataaaaagctgactcctaaaaaaacagacttttaaaattaaatctattaacaccgatctaagcaaaattctaacttttcgaactaagcaaggaatcaaatccaaactacacaaagattctaatttttcaatgtaatataatgaatcaaaattaaaataaaacaaaaaaattctcaccttttaaaccaaagtaatgaatcaaaactaagcaaacaaaaatttacttttcaatctaataataaaaaaatcaaaactagattaaacaaaattcaaacatttcaaaataacgcaaggaataaaaaaaataaattaaataaaattttaacctttcaatctaaagcaatcaatcaaaattaaatagggatcaaatcaaaataatcgaaatcgaaaaaaacaatatgcaatctttctaaaggtttaatcagacaattgaattaaaattatgaatagaataaattaataaaccaaatcaaaacctaaaccctacctaagaaaattaattaattaaactaataagtcaaaatcaacaatgaaactaaactaaggaattaacatcacaaacacgcttaaattaagagaacaaatggtaactaaattagattgaaattaaactctatctaaaaagaaaaaaaaaatgaattaatctaataaatcccaatcagcaatcaaaattaaactaaaaaataaataaattaagacaaaacgaattagattaaaatcacaaacacatttaaattatcatatggatcaaaataaactagcatgggattaaaaaaaaaaactactatcacaaagaaaagatatctaatccgggagaaataaaaaaattgagcgagttaaagtttaaaagaatttatcacaaagaattaattaaactgatatgcaaaatctaaaccgaaaaaagtgttctgttgaaagcaaagaaaaactaacctgttttgtttcagaaaagaaaaatgctttcttgatggtcaaagtggcagccccttaatgtttgaagtcctttaccactccccaaagattctgggcgtgtcttctcttgaaaataagtttgctcgtctgtggatctctgcccaaaaacaatttcctccccgtgcctagatctctctgccctagcaaaataatctttctccgtgtgaatccctttgctctcaaaaaagaaaaccttctcacctttctccttttcaagccccaaaaatcctctctttgctccagaaaaaataatctttctccgtgtgaatccctttgctctcaaaaaagaaaaccttctcacctttctccttttcaagccccaaaaatcctctctttgctccagaaaaaaaatctttctccgtgtgaatccctctttaatttatatgacagcactctcctttatgaaatactctctttcctttatatggaatattctatttccttcttttttctccaacgcacgtggatggcctcctttcttatatggcagcctcactctcatatttcctttcctttccgaagatgcacgtgatataggaaggtgcatacatgtggttcacattgaagattcccaaggatgcagccacatgttgttttggtaagtgtccaaatcctagtgatcgcatggccgttttgtattgatcaggctgaagatcacaggaaccttatcttgcaccaccacgcacaggatttctcttctttccaatggcgaatgcgtggctgtgggcttttcggtctctggcataggtctctcaaaccaaacggattccatctatgcttcaatgttgatcctttcatgtcgatcatgtcgatatttggttcaggtctcgtgtcgactgtcctctacaccgggttgggatttttcggcatgaatcttcattcattctggtgatggctgccagcatttgattcagtctgggcaaggcggttttggagagcattattttcgagcctctaagcgaggccgagtcggaataaaaaactgcagtagcagagatcatgtcggcggagttatcctcgaagagaaaacagtttgaaggcggattcaacatgctggattttatgctaaagatcacacttatttggctttgagtgggacctcccgtcggaacgactggtgatggtgctggtgatgacgtcctcgtggcgatacggttggcggggagtgaactccataaacactgccttgtttgcttatcaccagccaccattgttgcagttctcgctatgactcacttcaccagaaacaaaactcgctacgtcgccgagaatctcagccacaacggatctgggaaggtcttccgggctcggggaatttcgtgatcgaaatgaagaccctgacgaactcaagtagaaccggttacctctatgcttgatatgggtcccagcttttgacgcagaggaaagtgcagccccaaaaggttccagctggccctgctttttgtaacggaatcttgaagtcgttctgtgagagcgtgttccaccttgcagcgtgttggcatccttggaacggcagcgtgtaaagatgtctaagggtggcggttgtttgttcttttgcttaatggagcccgcgtgctgccccagacccatatcaccaggctgcgtgttgtcttcccaatagagcccacatgcctctccacgtgtcaatgcctttcaaacaatcatgcaacccttggagcgttacagtcgtgtgtgtggatcattcttcagtggcacttcacatgtgtcattcttcttgagtggcattctttgtgtcgtccctcccatgtgcgactatgcatagagatttcttcctagcagtctctgagaccttggtgcctaggatccttcttgagaaattccggtgctcctcatgcaaaacatcataaaataaaatttaaaaagggtaaaagaaaagagaagaaactgataaaaattatgagattgataataaaacgaaatacgattttaaaagccaagaaagagaaaccaggttatataattccaccatccaatcaagggttatttgcacattttggagtctaaacaattcgagcaatttcctattacatgagtgaataaataaaataaataaaaaaataaaaatagtaataataataataatgacaatgataatgatgaacaaataaaaggtaaaaaatgaaaatgaataaacaaagtaaatataattatcgaatgcatgcaataataataataatactaataaaagttatatatatatatgtatataaaaattaagcccgatgaagtgtttaaacgggcctacatgggtgcctaatgagctaagtgtcctaaagtgatcgggatattgtctaagtgacctaaacatgcttaagaactatcctaaaaaggaaagaaaagcctaagtctaaatcaagactgccaaggatcacaataaagggtcagataatcccttaaccaaagtctccgaggtgactcagaaaaaggtaagttgtacgagtagtaatgggccaccaaggaactattttgaagcactgaaaacgaattttaaagacatgtgctaaagggacaaaattgagggtctacagtgaacatgaagtttttatttttcagaagaaatacgccaaagagatactcaagaagttcaaattagatgaattcaaggagataagaactcctataaatcaaaatgagaagctcagtaaagatgatggaactgacagaattgattaggcatatttcataagcatgattggttgtttgatgtatctcacaacaacaaggcctgacatcttgaatgttgtaagcattttgtctagatttatacattgtgcaagtgaaatgcatctcaaggcagcaaaaagggtgattagatatgttaaaggcacctgtgattttggcatcaaatttacaagaagcaaagagttcgagctggttggttttttagatagtgattggggaggctccattgatgatatgagaagtacttcaaactattgtttcacttttagttctggatttttctcttggtgctccaaaaaacaagaaattatagcctaatctatagctgaagcagagtttattgttgtcacaattgcggtaaatcaagctatttggttaaggaagatcttaaatgatcttaacatggagcaaaaggaaaacccaaagatacttattgacaaccaagatgccattgctatctctcataatcctgtgtttcatgggaaaaaactaagcattttaatattaaggtggtgtttgtctttttggctttttgctgaaagcaatttgttttcagaatttaggttgtttgtttttttactttttcatgacttattataaactttttactaaatataaaaagtcaaaaaatatagctttttctaaatagaaaaaataacatattagtttttttttttgtactttttaatacttaatagaaataaaatactacaaaaacaaacaagctaatatttaacactattaagcattaaggttctatttagaattaagtaaaaaaaaacaaacaccacctaagttattcttcttaagagaagtgcaaaaagatggagatgtgattcttctctattgcaaaacaaaagattaggtcacgaatgttttcacaaagccactgcaagttagcaaatttgaatttctaaggacaaaactgcaagttagcaaatttgaatttctaaggacaaaacttggtgtgtgtggttctttaagcaatgaggagtgttgaagacgtggttaggactgatgatgtggtgtcataatttttttttttgttgttttgtatgtttcaaagttgttgctagattttaggtgttggttgcttttctgctttacatgttttgttcatggcttaatcctttgtccacgtttatagcgggtagttgttgattaaatttttattataatttctgatgattaatgaattgctgttgctctagtttgttttacttatgcttttcttcatcattgtttttaaaaaaactaccgtgtctgagcaacttttgatgcctattgtgcaaagataattggtgttacagttagtggacataggtatattgtgtaagttttttctggtcctcttgatgttgctgtggcagcgatgcctgccttgatctgttgattgatgagatgattgcaattataatttccgagacctgttgcctttcccaccaacccaacaattcctttttactcgagggttcgaagacaatacttttcatggagatactctatgaaacatccatgtttattcaccacccacctccaccttaacaaaatgcacatttggattaatgtagatatcaaatttaaaaatatattgtcattgttgacatatccatgaaatgtttttaaactttaccagcttgttggagaagttttttagagaagctgctgagacacttacacctttgtaatattctaacaatccgagcaataagtcagtcaacatcctttttttcgggaaaaaatgtaaaaaaaaatcctccggatgcataaaaaaatgatctctttataagtgaagtttcatgaaatagaagactatgtctgggaatcaaaaataattattgaaatttattttttaaaactgttatttgataataaaagtgtatttgaaaatttaaaatatttttaatctattttctatatttttaaaataacttttagtagttatgttctatttttagtcattctcaatataattgtttcttaaaatatgatttgaaaaataagtataaacaacttaaaacgagggaaagatgttattcaaaaacattatattttttattttttaaaacaaagaatcacttttgattttataattgtcaaatgtgtttttctattattttgtttagaggaggagtattgtatttaaaaacggttttcaaacataaactcctatttgattactattttagaaaaaaactaaaaaataatttttgaaaataattttttaatgttttctaaaataattatttgtttgacaatatgaaaaaaatttactttattttctatgtttgatatattttaaaaataacttttatatatagtattttatttttaacaattcttaatatttatataattatttaataaaaagtccttataaaataatttaaactcaacgacgagagaagactaaggagtgatggaaaggtgtggaaaaacggttattggatcttacaataaatgttgcctagtaattgcatacgtgttctgagaacacattgacggctttgaatttagaaactccacttggactaccatgtgtatgatcctatgtgacaaatccatgtaaaatcatttcaagggaagcagtggagtaaacgtcacctacgtattcgaatggaggtggccatccatgatgactcaaaacagtcaagatttcaagttcatcgtctataagagttgattgtaatcctagtttttagttacatggtttgtacctagttcatcgtgtaccaaaaaagtggaggtaaatattttcattagatgcactcaatcttcctttcgacaaatacaaggatgatgagtagataacctggcaacccgacaaatacaaggatgatgaattgataacctggcaaccacgtaaccgatacaaggatgtgaaacttttcttggagaaatactctatgaaacatccaagtttattcaccacctacctccaccttaacaaaatgtacatttcgatcaatgtagatataaaatttttttttttttttcattgtttacattctttgtgggtgtgcgtttatcattttgacggggtcaatgatttgttaaaagccaaactttgttttaattataaattag

SEQ ID NO: 11195 - DNA, 7528 bp, Vitis vinifera
  Intron number 13 from transcript GSVIVT01025216001 (locus GSVIVG01025216001) derived from phytozome v7.0 (chr-ID chr 6; pos 3198596 to 3206123)
aaaatcgaggtttaagagtgctgatcctttttcaggtacatgatttgatgattttgattcgtcttaatctaatttcaatgcacaattggtacttctagaattgcactgcttgtttaaagttgtagtgtattgaagcggtttattttgtgtgttgatatccacttttttaaccatgtattttgatctcaagaactgaattttgagaactgtttaaaaaatgttgccaagcagaccctaacatttgggagaagtctgacagcaatggacattgaaacctcagttttttggtgaaatcttgtgactaggagttcaagagtgtgcaggtattccttaagtgtatttaggaggtagtggtgcttagggattgtggggattagttggtctgagggcaaggatgagaagttttcagttcaaaccttctgttgctccatggagcttagctttagaggagaaaaaagagaaggaaaagagcagggggttggggttttgttgttttccagccatgaaagcctgggctcctgtgcatccatgaaagtgggcttttttgctcgagaggttatttgggaaaagattttgaccaacaacaaacttcgcaggagaacgtggcctttagctaattaggattgtttatgaaagagcaaggaaaaataatccaatcatattcaaatccaccatggtttttctttttttgataagtaaaggagtattgtattaaaaaaaggtatacatgatgtatgcatatacaaaaatcaataggggtgagaacataaaaaacgaccgcaccctatggggagcctaaccaacccacaaaatctatcaaagaagtaacactatcccccatgtacactccaacccaatcccaaaagatatacaaaaaagaacttttgattgtttgatatgagctttctctgtcctcaaaggctctcctattcctttccttccaaatagaccaaaaaatgcaaagtggggcaactttccaagcctttttcttctttttgccaactgagcaactattccaacttaagagcacccttctgacaaatgaatgcatcacccactgtacatgaaatagagcaaaaactaattgccacaataagcttgctttcagacagtgcaacaaaatatgaactctcatttcctctgcaacctttcacatgtagcatttatttggcatcctccatcccctccttctaagttggtcatgtgtcaatatcttagcccaagttgcctccctagcaaaaaagttagctcttataggggcccaagagttccacactgtactgtgctggaaagactccgctctcctacttgccagagagaagtaataagactgaattgaaaaaactccattcttgtggcatctattattctcaacctttagcacctcatgggtgttccatgattggtgaaggtgagtcttaatggggtggcatgggagttttatagggaagaataggaggaaggtttgaaggccaaacttgttatgcttctgtgggaccatttgacaggagcaaaattgtagacctctgcaggcctagagtgctatgatcaatctctaaaagattcttttatcttttccattttcctttagtgagtttttcgctgacattcttatgaccttgttagatttcattaattatcggggaatcttgctagggttgtgatgttttagttttcctttttttttttctttttttgtactccctgaatgcttggggtgcagccccaaagttattctcactatcacattatttcaaatggtgaaatcgccatatcatgcttgtgttcccataaactgtttcctcagaatccactgatgaagaattagctaaaaagaacaaaaggattttcatttttataactgagcatctagcttattttatttcctaaagaatttctcccttaactatcagctggaaaatacatctcaaaaatgagttgtgtgcatgtggacatgtttgggacatagctctgacatgttttgggtatactctggatgacttttaaatgcatggacatggttggacatgcgatgatcatcacttacttagaacaaccttttataatatatatatttatatagagggtaataagggtttcttcaataaaattattggaagaaaaaggattgcttgggttcctcctaggagtgctgttgatttggagatagttgccttaagactttggaagggatgccaagagtacagtcctaggagtgcagttgattttgcagtaattgcctcaggttttggaaggaatgctgagagtagggtcctttggcaggtgtctgtaatcattcttctctattacccacattatgatttgatgttttctccccattttgaaggatagtatatccttcttgtactgttttattttatcttattttataatttcattttttattttttttatagataataacagatgtgtatttgaagtggcaaaaatgggtggacctggtacccagggaagtacgtgcaggaccactaagtgtggttaaaatgaaaacaacaataaaaaggtaaaaatgaaaactggcattcaaacctcacaaaagaccactctctccaactttaacatatcaacaaaataaaaatgaaatatacttttctaaatgcatccaaagaccacatgaatcaagactagagaaacatatctttgatctttcaaatgaagagctctaccgtatcaaagctctttcattccagtccttttatacacataaaaatccacacaaagtgctgtcctcaaagctttcattttctttcctacaagatttcaccataccaaagaactttgaatagcttgacataacccaaaatatccagaactgagaaaggactaaagcccaaaggtgtatgcctcgctacctctagcaaggttcaaaaatttcagccaagatcattacaactcggccgagttgtatccgcctgggccatgcccagtactggaccagtactcgagtcaaaattggtggagaaaataaaaaaaccaccaaatgaagaaatttggaaggacaatttggagcctcggtctcaatttgtatcttcatccttcaaatctaaacttttgcatcttgtatggctgatttatcttcgatttaatgccttcaaacctccaactccggcttcgagatgatgtgagaagtttttgttgggatgtgaaatgggtattttccagataaattagtatgttagcagagaaatgggtataatggggagatgtcgtgagaagcaaagaagatgaaagggtattttacaaaaatgggtctcttacagagagatggaagagagtattttgcagggaaataggtttgttgcagtcttgtagagagatgagagtgagctttgtgaaaatgggtgtgttctagagttgtgggagagaggaccaaaatgggagagaggtgcttttgataggatattatacttatgattataaatatttaaattgaatataaatatcagtataaaaatttaaaattaatgtatagaatcactaaatatgtatatatatatttaaaatttatttattcaaatgaaaataaaattaataaaaaatcttgttgttttttcataatagttttatttaaaatatatttgattggaaaaatgatatttatatttttaaaagtgattcatggttttttttatggttgaaaatattttttaaaatttttaattatttaattcaaacatatttattataaaaatatatatatatatatatatatatatatatatatatatatatatatattttatctaatatttaatacaggataataaataaataaaattaaaatctattccataatgctctctatgtatatttattaaatttttttagtctatttgattgtatttatttttgtgataatttaaataattctgttaaaaattttagaattcttaaattaatatattttgcgtatcatctaataccaatctaagataccaagaccaatatgcttcaagaccttccgagtcaataatcgataccgcgactttgagccatgacctctagtagagaatattgtgatataccaattccttctctgttttgtataaacactaccaattcccaaactactccttatgcacgggaaaaggaaaaatggaaaaaaagaaaaaaagaaaaatctaaccttaggggttgcacaagaagcctacacaattaaaacaggaaaccccatcaggagtaaagactaaagtgcttcaaagaaagaccaaaaacccttattttacaggttccaaacaggtttatttctcttctcaaaactatctttgtgtaaacaagtgtctgaaaagtctccaccctgtctagttcctaatcctgaaacctcctgatgaaaaaccagattctaacgactagtgttatcttccttgcaccagcaatcagctagcctggctttcttataactgctagggcaaaaagcattgcaaacattttgtttgaactctgcttccactctgttcatcaagccaaaacctagtcctccttccatctttcatcctccgtaggcagcaaagtggaacatttcaaaactgtggccaataggacttattcatatcgcttgaacactaccctcctcccatgtccccaattcttttccatcactgcactttcttccaatgcctatccctttctcccataggcctccataaccacttacttgatactgctcttttaaggattgctaagtttccaatctctaaaccacttgcccttttagaagagcacactaatgaccaattaatccaaaaagataaatgaccttgctcacatccatcttataaaaaatctctttgtagcttctctaatctcaaatgaatcaaagtctaaaatcacaagtactgaccacaaagtagactggcacaccaaatgaatcaaagtctaaaatcacaagaactgaccacaaagtagactggcacacatgaagggtgttgtgaattagagtgaccacacccaccacccccctcttccaataaatattgcttcttccaagatgctaacgttctgcaaactgctgaattaaaaggtacactaaaggatagacctaagtgggaagaaggcaacttaaccactttatattccagtagagggtatggtcttaatatgttctagcttccccataggaatgttcttgttctttttacaaataaccccaagccttgaaataggttcaaaataaagagacacatctaaggtatgatatgtgctccattccccctacgataaacaaaagtatcatcaggtgaacagaaaacagcatatctctgtgccaaaaccttcctttctgccagtttaaaaccatggacagacacattccatgggcctagttaatatagtgctcaaagattccatcatgatcactgacaaattaggagataataaatcactctgccacaaacctctggctctaaatgaaccttgtaaaaactccattaacccaaactgagaaataaacagtaaatacaaaatttaatccaatctgtccactttaacttgaaatccatttttttttccctggagagtaagaggagcttgcaattcacattgtcataggcttttttctacaatcccaatttgcatgcaatacctgccttggaacttttcaatctagaatcaatctcttcattagttatcagaacttgcttgaagaattttcctgacataaatgaattatgagaatctgttaccactttaatcgttcactttcttcaatttataagcaagcacattgcctaacaacttgtacagatcccccactaaactaatgggtctaaaattcttaatataattttctccatttttctatggaataagaaccaaagaaaaaaaagtacctttaagacttaacttaagaaaccctatgcatcaaactgtcaaaaaagtcatcacagttttcttaaaagatctccaattgtgttgccaaaagtataaaataaaatttgtctaaaccaggacctttgcccccctttggcatgcaaggctcttagaactcatcttcattgaagatcatctcaaggttgccactgtccttctcaccaataaaacttcttcccattgagacaaggtccccaaatccaaatataaattctggagaaggactttactcctaatcttatagcatttgtatctcttaaccatgccatgtcaactttaagcttgtccaaagttgcctcttttcatgccttccttcagccacaatgccctgaagtttggcctccaacttgtttaagagatcttgtaccattatactcattttctatgaactaaaattgtgtttcatacattcaaaaagaaacaaagagagagagagagagagagagagagagagagagagagagagagagagagagagaaaatgaaagaaaaagaagaaaaataagaaagaaaataactgggactttttttcattccatagctatttgtgtaggaggaatatttgggtttgcatttttatgcaaacgcctgcctttttttgaaaatcttttccatttccttttccttttcttctttctcatttctgtgttttccccatcattcccttcattcaagttctcactctcctttggacatcttagcactcccaagtcttcaaaaccttctgcaaccattgcatgcattcacttaaaatacggtagagaggaacaggagcaattttatagaggggggaggagcaggggaacagcaaactgagagattgactaaccaacagcttctgtgccatttttggcctcaatagctggtgtcagaaaactgatggaacactactaccatgaaaattccgtgctttctttgctttcatttttcttttctgaatccttttcaatgagacagtttcttggctatgactgacccttctatcttacaccactgctctttttctggaatctgacaccttgtcgcactttgtggttggtgaaatctgcatcacaaccattgttagcagctgcctcttccttcactctctcattcacttgctgctaatgctgcattggatgctcagattctgacatcttgaatttaagctttgaaaaattttaaaagtagatcaatggacaagggtaaagattctacactagaactcctcttttgtgaatagttgggcctgaaggcatgattctgttatttttgaagcgtatgttttggttagttgtgaagggttagctactaaatttttccctgggtccatgtcaatgatttaaagactgttcatttaagatggttatttcctttttagatccatctttggccatgatagctttaacttgggtaatcctgtttgtggaaatttagaactgaatgaaataattctgtgaaaatgacatatttattatctgcctcacgacccatgaatatgtatttcttgggacagagagggagggaggtagatttggtttcttttccttctttttgtgtgtgtgggactccatttttcttagttattactatttgttctcatctaaatgttcttgatataacagtcaattggtggttctggaagggattccattggaga

SEQ ID NO: 11196 - DNA, 6310 bp, Vitis vinifera
  Intron number 1 from transcript GSVIVT01038449001 (locus G SVIVG01038449001) derived from phytozome v7.0 (chr-ID chr9 ; pos 12554452 to 12560761)
tactattgatcaataccaaccaagtagaatttcttgtttctgttagattaatttttgtaattaatctataatttgggccacacatgtaaataattaaaatgtgtgtgctatcatttaattaagcctaaatatagtgatctaattaataattgattaattggcttaagggtataattgtcatgagattattgtgtagataccattagacaattattatttctatgaggggcagaaatataattgtgataaaattaaaaccgctctagcggtttataaatagggttatggtctccattttacgactacgcattccaatttctgaaaatcctctcagagagaaattgacacagaatctagtggctagaattggaagaccatctcaaagggttttcttcctataaggtttctccttcaatggattcaggtatgcttccgctattatttttctactcattgtttttaatcaggagattccagtatatatgaaattagggtattcaccttgttaaatattctagtatatttgaaattatggtatttaccttgttaactattccagtatatatgaaattagggtattcatcttggttgattttaacaagactattccagtatatatgaaattagggtattcatcttggttgagttataacaagtggtataagagcctactccttgattaattctttgagttattattttaatatatgtcaatggattaagatttatgaaatattgagttgataaaaatttattattattattattattattattattattattatttaatagcattttatgatattaatatttaagttattgatctagcattttaaataggctaattaaagcggaaaatcaccaaagtgacatcttccgtgtagattagtctgttcggggtgttagatatttgtgtgtatgtgattcatgcgggtattgactgacccaaaggaaagttaatatttggtcaaattgcatacatacttgtggtgataaatatgtgatgattataaaggtaacttaatgtgaataataaatcaatccaaagatagatttattatttgacataacttatcatcaatgtttgatactacaacaagagtaccacttacagttaatattactgtccaaagacttgatattaatgttgtgctaggtatcttgaaatgtcataatttgcttttaaatttaaagattatgtgtttaattgcttattttatgtgagcatgatggtttatttgattcatttttattttgttttggattcagcttttatatcaactacttctatatctgccaacatcaataatgtccctatgttaaatgggactaattttaaggactggaaagagaatatgatgattctcttaggctgcatggatatagacttggccttgagaatgcccaaacccgatgaactcaatgagcaaagtactcaagaggatgaggtttattggggtaagtgggaacattcaaataggctaagtcttatgatcatgaagcgcggcattccagaagctttcaggggtgcggtaaccgatgaggttactaatgccagtgacttccttgcgaaaattcagaaacgttttgccaaaaacgataaggctgaaacgagcacgcttttagcaagcttgatttcaatgaagtataaaggcaagggtaatgttcaagagtacatcatggagatgtctcatcttgcttcaaaacttaaggctttgaaagtcgagttatctgatgatttactcgtgcatttggttctcatctcccttcctacacaatttaatcaattcaaggtcagttataactgtcaaaaggataaatggactcttaatgagctcatttcattctgtgtgcaagaagaagagagattgaagcaagacaagaccgaaagtgctcatctggctagcacttccaaggataagggcaaacgaaagaataaggataataaggttgctgcttctaatggtccagaacaaaagaaacagaaagttgaggtaacatgtttcttctgtaataagcctggacatactaagaaggaatgtaccaagtatgctgattggcgtgttaagaaaggtatgtttcttactttggcctgttctgaagttaatttagcttcagtatttagaaacacatggtggttagattctggtgctactactcacatttgtgtttctatgcagggttgcctgagttaccgaaaaccaagtgatgctgaaagatgcatctatgtcggagacggtcagtcggtagaagtagaggcaatagggcactttagattattattgaaatctggttattttttggatttaatagatacttttgttgtaccatctttcaaacggaatttaatttcagtttctgttttggacaaatcaggttattgttgttcatttggaaacaatagatttacattatctattaattcaaatgctgtaggaaccggtttacttaatgtttatgataatctatatttgttggaaactgttccgtcctataatgaaaccttgcatgtggaatcacgaggtacaaaacgtaaattgaataaagataattcggcctcattgtggcacaaacgcctaggtcatatctctaaatctagagttgagcgacttgtgtccgatgcgattttggattcacttgacttttcagattttgatatttgtgttgagtgtattaaaggaaaacagaccaaaacaaagaaattaggtgccaatagagctacagacgtcttagaattaattcatacagatatctgtggaccataccctacggcatcttggaatggtcaacagtactttataacattcatagacgactacgcaagatatggctacctatttcttatacatgagaaatcacaatcattggacgtgttcaaaacatttaaagcagaagttgagttacaactcaacaaaagaataaagagcgtcagatctgaccgtggtggtgaatactatggtagatatgacggatcaggtgaacatcatccaggaccatttgctaaatacctagaggaatgtgggatcgtccctcaatacaccatgccaggatcacctagcatgaatggtgtagcagaaagacgaaaccgaacccttaaggacatggtaaggagtatgattagtcattctactttacccaaaaaactttggggtgaagcactcaaaacggcagcttatatcctaaatcgggtgccaactaaagcggctgctaaaatgccttatgagctttggacgggtcgaaagcccagtttaaagcattttcatatttggggatgtccagctgaagcgagaccttataagccttatgaaaagaaattggactctaaaacaattagcagctactttattggctatgcagagcgatcaaggggttttaaattttatgatcctgctattaggtcaatttttgagacgggaactgcaacattttttgaggatgttgagtttggggggagaaatcaggctaggaatattgtctttgaggaggaaaagggatctactattgcttttgataatgtacaggtttcactacctatcattgatcaagaagtaaatttggatcctcaaccaacagacaatattgttcaacccttaattgcaaatgaggacattgctcctgaagaacaaactcaacaacctcaagaaaatatgccattaaggagatccactagagagaggagaaatgcaatttcggacgattatatcgtatatctccaggaacgtgaggtagaaagtggaatgatggaagatgatccaatcaacttccagcaagccatgaaaagttccaactctcagaaatggattgaagccatgaatgaagagtacaaatctatgcaagacaataaagtttgggaacttgtcccattaccagttggtacgaagcccattggttgtaaatggatatttaaaaccaagcgggattcaaatggtaatgtagaaagatataaagcacgtcttgtagctaaaggctttactcaaaaagaaggaattgacttcaaagagaccttctctccagtttctacgaaggactctttcaggataatcatggcactagttgcacattatgatcttgagttacatcaaatggatgttaaaacagcgtttctcaatggtgacattgatgaaacaatttatatggtacaaccaaaaaattttgtgtctgaagactcaaagaatatggtttgtaaattaactaaatccatttatgggctcaagcaagcttctcgtcagtggtacttcaagtttcatcaaattattgtctcatatggttttgaggcaaatcttatggatgaatgtgtgtaccacaaattcagtgggagtaagtatattttcctggttttatatgtcgatgacatattgctagccacaaatgatattagcatattgcacgacaccaagagatttttatcaaaacattttgagatgaaagatcttggtgatgcctcctttgtcttaggaatccagatacaccgagatcgttctaggggtattttaggattgtcacaaaggacctatattgataaagtcctccaaaggtatggcatgcaaaatagcaaaccaggtgatacccctgtcgctaaaggagacaaattcagtcttaatcaatgccctaaaaatagtttagaaagtcaagaaatgcagaagattccttacgcttcggctatggggagtctaatgtatgctcaggtatgtacacgtccggatattgcgtacattgttggcatgttaggcagatatctaagtaaccctggaatggatcattggagagcagccaagagggttatgagatatttacagagaacaaaagagtacatgcttacatataggagattggatcagttagagttgattgggtattccgactccgactttgctggatgccaagacagcagaagatccacatcaggctatatttatctgttggctggtggagcaatttcatggaggtctgccaaacaaacactcgtaacttcatccaccatggaagcagagtttgtagcatgttatgaggcatccaatcaaggaatatggctacgaaattttgtcacttggctgcgtgttctggatggtattgaaagaccattgaagatattttgtgacaataaatcagcagttttatattccaataacaacaggagttctacaaaatcaaaatacattgatatcaagttcctagttgtaaaagaaaaagtacagagtggacagatatccatagagcatattggaacaaactccatgatagcggatccgcttacaaagggattaccacccaaggtctttcatgagcacactgctcatatgggtgttgtctcatttgaggatatccaaatttagtgggagtttgtattattcattgtatattgctctatgttatgtttagactttatctatacatttggattgtgttctgcagaaataaagtattcattttattgcactctgttaaattatgctaaagatttgatctcaataaagttaagttggaccagttggaaataggcatgaatagatcatattgcatgtaatttccatgctatgcactcatgattgatctatgtcatttagctgtgcagatatatgtgaccattgattggtctagtaacgattgatgtaacaaaggccaccttaatcctatgtcagtatagttaatggacgagattgttcggatataccctaaggacatgatagcaaattttgagctcataaggttaagcacatttatttgattacatatgcatgtggcccagtgggagattgttagattaatttttgtaattaatctataatttgggccacacatgtaaataattaaaatgtgtgtgctatcatttaattaagcctaaatatagtgatctaattaataattgattaattggcttaagggtataattgtcatgagattattgtgtagataccattagacaattattatttctatgaggggcagaaatataattgtgataaaattaaaactgctctagcggtttataaatagggttatggtccccattctacgactacacattccaatttctgaaaatcctctcagagagaaattgacacagaatctagtggttagaattggaagaccatctcaaagggttttcttcctataaggtttctccttcaataaattcaggtatgcttccgctattatttttctactcattgtttttaataaggagattccagtatatatgaaattagggtattcaccttgttaaatattctagtatatttgaaattagggtatttaccttgttaactattccagtatatatgaaattagggtattttataacagtttc

SEQ ID NO: 11197 - DNA, 14980 bp, Vitis vinifera
  Intron number 1 from transcript GSVIVT01021502001 (locus G SVIVG01021502001) derived from phytozome v7.0 (chr-ID chr1 0; pos 6284226 to 6299205)
cgccaagaagcagcttgttatcaagctcctcaaaggtttttctaatctcatgtgctctggtgtttgttttcttggtgctttctccgcattctagatttagggttgggattgatttttgcttttaggtttaggtgagtgttgtttggtggaattgagtctgaatgcctgtgaaataaagggtcttgcttgtgatttgatgtgagtttggtgagcttgtagcttcagttgcggtttctgctttttcttggatgtgggttttatgcatttattttagcgtgaaattcataatgattttgggatctggttgctgaaattgatgttttgatggagcatagtggcggcaatgttatggctaatcatatgcaattcttgctgtggaacttggaattgctctgatttttgggatctgggttagtgttctcccgcttgaacagagtgaaaaaggctccttttaaacaggggaaaaagcctcttctgaaacggatatcgccttctcaaacactgtatgctgggtgcccaggccaggatatgcccaaagtagggatttttcttgatggatcgaaagttagggtttgtctatgtactgtctaaattatcgtttttttttggtttgaggattccttttaccaacgtttttctgttatttggtgtggtctgcgcaataaaaaggcatgcttgctaagtttcagaaaaattaagtgtaggttctttggtatttttcaggtaactggggttttactttgagtcaaattgtgtatttaactgaatgggggcttgaatttcatgcatgtcaattttcaatcttagtttgaaacttaaattgatttgatcttgggatcttgtggaagatatggtgcatttagctgtatatagctcggggctgaatgcccctttctactggctagtgggtttttttctttgcataatctgttcaatagtaaggaatgcgctctaaattaagggtttgtacattacaatgagtagttccagaccagttgctttgatgctgataaacttgcatagattcatttattattttccccttttttgcgtggttcttaagagcttgtagcagcatatgacaacttttacgatatatttacttgtgagtaggaagcaaagatggcttggagtttctttagcaatcatagctggacgattgaaacaaacatgtaggttattttttgttgtctgacttactgtagatggttctggcacaaacattttttctgttcctattttgggacatgctgaaactgaatgtctgtttcagtaatttttttcccattttataatcaattcttggctctattaaaaacaaggagtttttttagggcttgtgggaggttctaggtttaagtctcaatagggataaaaatttacttattagaaaaaataaaatcattcatatacattttgggtctgcattgtttatattctttctagcaagtgtggattcaatgtggtagtttctatagtgttgtataacctaaggacaaggaggaagttcctcataagcacaaaatcaagacttaataatatattatataattgacatcaattagaagggatgaagaggataggttagcttggatggaataagtgtggcaaatctctgtggccttcagtatgctccttcagctaatcatatgctccctcagtatcctaaagtaaggattctgtggcctctaattttgtctcttttcaatgtggactgggcaatatattcttcagtaagaggaaaccttttgaattggcacagtttcttttatggggaaaaatccaaaaaaaacttggaggggctgctcttttgtgccttttttggatggaaagaaataagaggtcattcaaagatattgaacagtttgatcaaacaatcaagtattcctttatgtgtacctttttggattgggttagagtgaacatagacgacaattccttgaccatgataggctttttagattggttgagctcaaagtgggcagagggaggtttacatcgtgtgtttgttgttgtgcctttgcttaggtgtctttaatgcattttcactatttgcctttaaaaaacgtgagtagagggagcttgttttttattttctcttcctttctactaatttgatggtgcttcttgtatacattatgtgtactttggtacatccttttcaagtgcttttaatgcattttattcttttgcctatcgaagattaaaataaaaaaaaagaaattatggatgtcccctatcttttggcctttggaagttctaaaaagtgacacggtatggtaatatattattggatgtctcctgtcttttggtcttcaaaagttctaaaaagtgataggatgtagtgttacttttgtaattccttgtattcattttttgcatatgcacgaaggttagggataccttcattccttaaccataagttatactaaggattaagcctaatcacctctttttatgcttgccatgagataggcatcctgtgtggtgaattcttcttagatttgagaatgtattatgatatagacatgttctataggattgagaagacttaatggcagggaacattttggtcaaattttggagactctaggggtgagcaatttaactaattggaaaactggttgttttctgaacatgaagggagtttaggctttgtgaaggtgagtgaaccttggaattagacgcttgatatataaatattttggacttacccaatgaaaaatgtttattattgtattacatcatagaaaagaagcacaatgtaggataatggatgggatgccaatttgtaccatgggagacttattggttgttgtgtaagacaatttgtctatgtcattaataattcttccttgatgtcaaattcatcattggtgatatatacctctgactcatcaaaggttatttccttaactttataagattttagatggaaagtattccatgttcctagcttttgtttccctccaataatcttgatcttggaattttggtttctttaggaaatcttggctaggggaggaactgcaaatacaattaaggttcttaaggattacaaggggaagatatagctatctagaaaacaaagtgagtgaagtaggacattccatttgctgatcaaaaaaaaaaagtaggacattccatttgaaaaattgatctattctttgttcctcaaacaagataggtctggaaattagaaatctagaagttgggttgttcttaagaaaactctgtttagcaagttttttttttaatgggtagtggaggtttggggtggggggttggtttgtgcactcaattgggggattagcaaaatgctattgggaagtgtttggatgttttctatggcttggtcaacgtttatgtcagaaataggattaggatcaaattttgttgtagggaataaactcttaaggactgctttccatatctctctattttagcaatctaatcgagaagccttggttgttgattatttgtgttttcaagggtggctctagtcactagaactaaaggtttgttaggagttctcatgatttgtagttggagatgatggggagtttcatggttgctcgtgtatgctttattttttattttttttataagtaaataagcagaatatattaaagcacttgcaaaaaggagcaataaagtacacatgaagtatacaaaatgacccacaagcaagtaggatatgagaaaaagaaaaacaaatacccaccaccctaacaacaatcacccttaggaagaaaagactccaacaagaattcctggccaatagaaaaaaccgtccactcaacctcactaggaggaccctttttgagttcagaaaccttcttagcccgactgcaaaaccttccctcaatccccaacaccccttccttgttccttagaattgaagggagagctattatagttaaccgaacactcaagctttcggatttccctctcgggccgtgaagacaaaggtatcttctttccccttgacactcttaccccccgttccttttcttgattccattttcctaaagagagaggaaatttccttctcaaagtccaccagaggatgttagtttgatgtgtctaagattagttgtctttttgtgaagtttatttatttattttttatgattatagaactctttctcccaaggcatcttctcccttttaattgttgttggatggtgttctttggtccacttaaaagggaatttttaatttcttgttttgtgagggaaactatttggggtaagatgtagtctatttgtgataagggtgggaatcttatggggtgtttgataaaagagttaaacacttataagtgaaaaaaaaatggtaggtcccactttttaagtgcatttgataacataaaatttacaccacttaagactaaacaaaatcaaggacttgactaattacttgagacaaaacaatgtaagtgaattttaaaattttatagttttttcattcaatagctatcctttttgtaaaataaatatttttattatttaataattttatattcaacttctacatggaatttttttttttgatagataaacacaaaaaaattatattaaaagaagggagcaagaaggcaacccgaagcatacaggaagtatacacgagaagcctcacaaacaaaaagcacaaagaagcatacactcaccaaccctcaattagagcccaaccaatctacaaagttaattaaggagcagggctctccatctaaacaagacttagaccaagagaaaagattacaaacaaaggagattttcaatctttggagcgacaacgcctcattataaaaaactatcctatttctttctttccacatcatccaaaataaataaaggggggctgctcgccaaatcttcccacacttcttgtctacaaaggaagcggaccaaccaaggagagtgtctctaaccgtgagctgaaggacccaattaaccctaaacaacgtaaacacaagattccacaacaccctcgccttggggcaatgaataaggatgtggtttattgtctcctcgtcatcacaacataggaagcatctgtttgctagagaccagcccctccttttgagttgatcttgggttagcaccttcccccaagaagcttcccaagcaaaaaaacccaccttagtaagcacgcaagggctccatatgattctccatggaaacgggactgcaccaccagaatcaagagtattgtaaagggattttacagagaaaatcccattcttagaagcattccacaccactctatcctccaacccagcattgagcctctttccttgaaggaccgaaaggagactcgccaccgcctctagctcccagtcattaaatgatctagaaaaacaaggatgccatccccccgcatcccccatagaatcccaacaatccgctacccacgcatcttgggataccgcaaaggcaaacagagaaggaaaagcctcacttaggggaatgtttccacaccaaatgtccttccaaaatttcacccttctaccatcccctacagtgaaggaaacgtttttaaacatcagagcgccttcctttctaatttccttccacaaccccaccccatagccttccctaacctcacaagagatccaccctcctccttcttccccatactttgtgttgataataagcttccaaaaagactctctttcagccgcaaagcgccaactccatttacacaacagggccctattgaggatagaaaaatttctaatccccaagccacccttcattttatgagagcgaaccacatcccactttacaaggtgaggcctcttctccaacgcacccccaccccaaaggaaatccctttggattttctcaagccttaatcttacaactcttggaatacgcatcaaagacataagatagatcggcatgctagccaaagtgctccgaatgagagtgattctcccccccttagagatgaactgcctcttccacaaagcgagtctcttcctcatcctttcttccacaccatcccacacaaccaccgatttgtgaggaacacctagaggcagccccaagtaagtggaaggaagagaacccactttgcaacccaattcagaagccaagacctcagcattctcaactcttcctaccggcagaatttcgctcttttccaagttgatgttcaggccagaaatggcttcaaaccacattaaaagccagcttagaacatccatttgatcttgggaatccttacaaaagaccaacgtatcatccgcgaataacagatgagatacttgaatcccatttccacccctaccccttaacctgcagccggataggaagccccccctaaccgctttgttaatgaggcagcttaaggcctccattcctaatacaaacaagtagggggaaatggggtccccttgccttaaccctcgagtgctctggaagaaacccgttggcgaaccgttaatcagaactgagaaggaagcagtggtgatgcaccacctgatccagccaacccacttctccccaaaacccattttttgcatcactgacatcagaaaatcccagttaatatggtcataagccttctctaggtccagtttgcataacacaccagcttcatcccctttcagcagcgagtctatggccttgttagcaattaacgctgcgtcaaggatttgccttccttcaacaaaggcattttgggaggaagacaccaccttactcactactttcttcagcctattggctagaaccttagcgagaatcttgtacagaccacccaccaaactgataggtctatagtcacgtaaatcctcagccccacctttcttggggactaaaaccagaaacgtggagttaacacttctaatgaatttccccctctcaaaaaaatccttaaagaagcccattatttcgtctttgacaaaatcccaacaaaactgcgagaaggcaatgggaaatccatccggtccaggagccttgtccccatttagctccgaaagggctagatacacctcttccaaggagaacatcttctccagcctggcagcctcctctcttccaattctatcaaactccaagctgctcatactcgggtgccagccaccaggatccgataacaggtcctgataggccctcaccactcccctttgaatatcttgatcttctaaaaggcagataccactgactttaatctttttcaaacaattccttctactgttagagttcgccatcttatgaaagaatcccgtgttcttatctccttccttcaaccatatttgtcttgatttctgcctccacgagatttcctccatactcgcccactttttaaactcctccttggccttctttctagcctctaactcctgctcgtttaaccttctctgcctctcctgatcatcccaaaaagaaactttgcccaaagccatcctcaagttacccccactttgccaaaaacttccttattccaattcttcagcttaacttttaaggcctttagtttttctgagaggacaaagctataagaaccattgaaattaaaaccttgccaccagcccttcagaagatccttaaatccctcctccttcatccacatattctcaaaacggaaaggaataggacctctcctaactccacccccatctaacaggattggggcatggtcagacacaggccttgggagtgtgcactgagacactccactaaaatggttttcccaatcctccgaaatcaggaaacgatccagtcttgacctggactggccatttaaccccccactccacgtataaggacccccctgaagaggcaaatctcttaaagtcagctcatctagcacctccgaaaaccttctcatagaaccagacagtcttcctactctactccgttcactgggaaatctaataacattgaagtccccaccgatgcactagggatcagaccacagacctcgaattgcacctaactcttcccaaaaaggttctctataccttttcatagtaggttcgtagacccccgtgaagaaccacataaacccatcctcgcagttcttgaatcgacacgagattgagaagattcccacttccaggcttactaactccaacactctcttatcccagaacaccaccacccctccagctgcccctcttgcattcacagctccccaacctaagaatcttcccacgccaagactgtgaataaccccttgggacatttcttggattttggtctcttgcaagcacaccaaatccaccttttgcgatctgattagggccttgataaccttccttttatttctgtcattagcccctctaacattccaagatagaatttttatcttcatctaactgtcgagattctaaccccaccttctctgaccatagaattctcctttcttgccccagtataattgatagaccactcaagttttttcaattcccgatcaaacttagtggtccctgacgtgcccttcttcaaattttgctctcttcttctcttagtccttaggagcaaattcaggatttcgccttcaaaaccgtctgtggagaagcccaagaatttgctaaacctcgccaggtaactgtcgtcccaccggcacccatccagatcctgaagcatcccctcaaactccccacccagaccttcttcagccactggcttctctcccttagaggctagcaccccattgctaccgtcaaccagaatgatactcaacggagtctgctcctcttcgttgacctcagaaaccgaaacatcgatggacccctcattcaacgtcactcgtccgaaagaagaaggagaaggagaagagagatctcgacccccccataggaataaaacagagatcgacgtacctggaagcctcttcgcatagagcttcgtcagtcaagagcccccgatccatcatctgagaggaaactcgcgtcaccgagtctcgtggcagcccgacgaggggatcggcttctcctcttgcatcttgacttgcgcccctggatacaggaggcgactgcaaaaaccgagccctaggaagcgagattggggtctcgtttccataaaaggccccatcttccaaatcgccaacttgaataggcccataggcctcacccgacaccccctctcttaaggaaaggggactgggccttggatctcggctcaaagccacccgacttacaagaccaaagtcttgggcttccccacagcttaaagctgaagggccatagctcggcccactgcttggggctgccagcccacttccacagttgaccatactgatgggagaggactccctaccccctcccactaggtcgactggaccaccaacccatctcctctcaacagtcccttctgcagaggcctcatcagagggaatgagaagttttcctccattacgcgccacgtcttgtacctccacctgcaaccccaactgctccacccccttcctttgactcccacagcaagccacctgatgagacccaacaacttctttgcctgcccttagcccgcccttctcggaggagcttcccgctggtaccacctgcgagaaccaaggtgcagattcccaccacagctgaagggaaaagcacctcgtccccaaaactatatgaacagagttagggacctcccaatccgcacgcttcaccaaaatcctcgcccattgcatctcagacatggatttggttccttcatccattgctataaatcctccgcacccatctccaatacttttaaacacctcaagactccagagatggagtgggagccctaccaccctaacccatgtctctacggcaatggagttcttaaaggaacaccccacctcaggattccatttgtccaagataagccaattttccttaatgcttcttttgcctctggccaaaacacgctcagcctcttgagcctgcttgaattcgaacaacataatacccctgcccaacacggcaatcgacaacttccccttaacctcccaattttggcgggtccaattcctaacgtaatccaactcaggtaatggagctgagatagaaccccatctccctattagacaatgtttcagatgctctagtctaccacgcacctctttttcccctacccctaaccacactgactcacccgcccttctcgggatcgatttaatagcttctgcaaaagacttcatttctacccccttttccttccactgaacctttaggactcctttcggcttcaacggagcctctggcacattggtgctctttaatccttctgacggtgtcactccaagacctctcaacctcatagccaaagagttccatccactggcctgacccttcccttcagggaagataatgctgtatctttttgcttccatatctcggacagagcataggatgaacctccctgccttgttcaaccgtcgctccattctaaactttttgtttccctccaaccattcaatagcccatctttgatcatccacctctctgcaacaggtttcaacgccttccaaaagacaacaaaggctagcctccccaaatctaatccaagaatcaaagcccctacttctctcccatatgcatcctttcaactctccacccgactcctcaaccacaatctcaaacaatttggactccaccacaaaccgacttcttcctcccctaagtctcatctttttcttgttcttaagatatgttgtttacaacttatacatggaaaatgagacacatgcacacactaatagaggagaattattttccttaatatttttctttgtttttcccagcattttttgagaacctaaaaaaattattatgatgatgcaaattaaacatttcaccttttttattttattttatatatattattagctatttatgagatatttttagaataaagttaaattatgttcaatcataaatctacatataattcatttattatttataattaaattatgttaattaagataaaaaacataggaataaaagtggtggatttatggaaagtatattgaatctggtgttttgaattaaaattaaacttcttttaaaataaagtctttatcatataacatgaaattagacttacaaataaaaagtctatgtaattaattttttccttgtaattaagattttgaagttaacatagagattggatgaagatttaatatcttttcttagtgaaaggtaaactacctagaaattttttaaatatttataactacttttgaaataaataatggttaaaaattttaaatatatttttgtaggataaaaaatttactaaccataatacacaaaattgtattattaaataaagatttaaacacttcaacagtatatttttattgcatgaagtattgtgtacaaagcttaaattttttaagggatattatataataaatataagattaattttgtaaagaggaatcattttcagacttcaattgtttccagcatcaaatggtcaaattaaattcaacatttaaatctaagatcataccaaataatttttcccttttattaatttagcacttacagttcagttcttaattttaaattttatcaaacactgccttagttaactggttttcctctgccaattcgaactgaatttttaattcctgttttatgagggaaaccatctgggaaaatatactctgtgttttgtttttttgggtaccaccttcttctgttcaggagtccttgatggcaggcttctcctgtggtgagaaaaaggaggatagtgtggaacaccacccttcccagattattttggcatgtttggaaggatctgaagcaaagattcttgttgatggatggagcaggctgtgttagctttgagagatttgttccttgaatcattttcttgccttaaatccttctattcttaaaggccctcttgggaaggtagtttgcctttacctgactacatcaatagagtggatttgtccaaaggatttctggcttggtctttggatcttggctcttcacttctcctctttcttcttcccttgttggtgatctttgtttagttcatgtgtattaaggtttgtcccatttctggtgttaaattcataatttttcatataaaaaattggttagactgtgtaggaaaaattgttcagactggaggtaaaaattcaggctttgcttgagggtatgatgattaagggtgatgccttggtgatgattggattgctttggggctactgttcccatggcagtgtgttcacctaaatgcaggagtttcagacatttctagaagcttttatgtgtcctatagatgcatccctaggttgtctaattagggatctgactctttatactgggaattggggagggcgtctagagggtttatggtgcaggacaactctggaattgtctacactcaaataagtggactgggtttttaatcttgcttagggtttaaggagaggaatggggattaaaaatttatggcagcggagacaagtgaaatcaaatattagaaaaggaagcataaagaaaaagagaaaattttaaatctcattaaggccttctaggattctcacttagaagaaaaacactatagtctcaccattgagaaatgcagggcatgcaaagaaactataatgttattgattctcaatacttaatcccattttacgtcaattatctttattcataagctttagaaaatatcaaattttgaataaagccatgcaaaagtaaacctaacctatgtagtaaatagtacctaattagaactcatattactttccttttattttttgatataaatattaaaccttctgagaaattaaaacaaattagaaacttcctttttagagttagaaaattactttatagaaacttcgtctaataaagtttctaataaagaagacttctagattataaggactcaaaatggaaacttttaggataaaatgattattttagaaagtagaaagtttagaacttcttctagggagaatttaaaaactttccaaattctatataaaactcaaatactaattactaactaatggtggtaccttcaaaaagaaaattacctaaatacccttaatccagtaatttatgattgttttaattctttcattcctttctttagtaaattttggggattcatcttcatcagtttagaaactttttcagggattgcaaccacttgggttgtatcttattgttttggcagtgttcattatttttgtttctacctttttttagttgatattaagtgtattttgaaggattcttcatccatccatacctttctgctttttcctttttaataaagttttgtttcttgtaggaaaagaattatgtaagtgattaaatattgttttatattggcagtcaagtatgtgtgttttttcctgtcccttgataaattatcaaggataaaaaaggaagggccaataggccgctgtatacatgtagaatactagccctctacccttttttatgggttgtgtcccatattcatacgtccattcttgcctatcaacaaaaaagaaaaagagaaattttatatccgttttaacagtgtgcttgtttggatatgcacattctattaaattagtatgtcttatgataaatacttggagttcaatttgacatgtttttgtgtggcacctatcaaagttttaaaaggctaaaggttgtcttaaggtgtcttgcccaaatgaggtgaggtgtaagcctcaaggcagaatgaggcataagcctcaacttaaacacattaataataaaaaaactatcaaaaaatcagaaatttttttataaagtagaaagaaaattgaataatgaaaaggcataaacttcataatgttaatggtttctaatttagttccttttttgctcttatagaatttaacactctctcaaggtttcatcaaataagtcactatcacttgtaggatcctccaaggaatatgatcatatccaattgttatgttatcctctccatcggtgttaatatccatccattctttttctttgtcccctaattgcaatggtaattttttttttgtctatcaatgataagataatgattatatatgagattagtcacttggacggtcaacaattcccttattctttattctcaatctctcttcgtttccttccattaaaaggttaattagaagtcaactaagcccttatttcataaaaggtttaaacaagttgggacccaatacacaactcttgaaatctatatcaaaagcccacaaaagtatggatgatagaacctattaaaactgattgaatattggggcttaaacctcttatacaatgtatactaaaagccacaaagaccaaaaaccctttggatatttgaggcttatgcttcaatagccttgacgctatagcctcagagcagtaaaccttgacagggtaaggcttaagcctcaattaccctgaggctatagccttaaggcataagtctcaatagtcttttaaaacatcagcacctattagattatgcatgtagaattcttatgttattttactgattactgttgcatatgctaatcaactgtgggaaactaacaaaattttgttcaagtggagaataatccgtggtaaagattggaatgtggagcattaagatcaagagcttcaaaacctcttttatctgtaattttttggagtgcgttagagagtatgggtttagatgaagtgtcagtgtctatggtagaatttgttgattggttaggcaacaataatagagagagggggaggggggtgctttccccctttcatcttgtttcatgcctttagcgcccttctatacatcctgtgtacttcagtgtgcccttttgctgggcgctgttagtatatttctttgcttgcctctttgctggggtggggaagatgaagaagaaggtttgaattctgaagaatcatttacttatgtttgtattgagaaaggcacctgatatgtttactatttctttttgtttttgtttgtttgaagctaaaccaaccttacccacaaattttgaagaggat

SEQ ID NO: 11198 - DNA, 6056 bp, Vitis vinifera
  Intron number 3 from transcript GSVIVT01017976001 (locus G SVIVG01017976001) derived from phytozome v7.0 (chr-ID chr5 ; pos 5246107 to 5252162)
gataataagcttagaggtataacatgccccttcattctttatcctcattgctgctatttaatgttggaatgaccctccaaaatagttggccctttagtgagaaatcctacgcatgcattgaatgcaccaaatttttttttttttttgccattgttcagtaagtgcatatatacttctcagatgcaatagtttgttagattctgattaccatggtcatatgaatcttccttgtaggtttatgctggtttactccatcctcttattgatgattgatataaattaagagattgcttctttgagtgatatgatttttgttttgaagtaggaatagtttcagttagtccctccctgaactaatttgtattaggcgtcaggcacccatgttaagacacagtgcacatcatccacatggtgaaccatcaattcatttgtattaggtgtaaggactcctagcatccgaaatctaatgtcatttgaatgatcttatggttatcttttaagaagaacaagcacatcatcttcagtagggttgtctcaaaaggctctgggaagactatttttattatgcaactgtttttctaatattgaggcctgattggttgtctgacaaagtttgaccttgatgtatagtgaaatagttagatttgttgatacataactttgttgatgggtgttgcaaataatcatcattatcagtgtccttgcattcttaccttttcattagatgcaaaacatatagggaaagaacaaccggaaaaacaaactaaccatatacagtacaatgcaagtcatcaatagactccatttctcattttctctttcttcaacctgtagcttcaatcctgtaatactggatggcttaaacaaatattcaaattgccatttttttccccttggaagatccttattttcctttctctctgaactacccaaaatagccaaagcacccagttccttaaggtgtaatgctctcctctaagtgaaggctttcttcctttcagaattctacagaaacttaatcttttttttgatattgcttccatttctgaatacatggatttattttaatgctatatgaatattctctctgatttgtaatgtacaaatttctttgttcataagtttatgcatttcttaaggcaggggcccaacttgtccaacttggttaagattgttctccaccctacccaaatcaactaaagcttggtcttgaccaggctgttcaggttggactagaataattgtatgttgtcttttgttaatgcctatgaagtccattgaggaaaaacatttagaagaaacctcatagaataagatattaattaaaggtggcttgaaagggcttctataattaatgaactgaaaacagttctaaccaatgtcaaattacatctcaagccaactagcacaacatgtaaaacctctcccgtaagtagagccttcgcatttattcttaaatatatttgttaagaatattaatataatggaagcaattcaaaatgtgtttcaagtttgaattttttaattaatttttatttttatgatcagtggctatcttaatgttggaccatctgattttgagaaacggaaggcctttatgaatttggccctggccagtcaatttttgctaagcactatcctttgtttgcaatggtatctgtggcatggctcagtgcatttgttatgctttcatttacattgtgagttggcagtggcttggggatactcaacttgggacaaagggggggaattttgtggacagtatctattttcactacttgtgatcctttggcaagaaggaaatagtatcttttttaagatgggaatgagggtagaggtgttcagccttcatgtagaattgtaaagtgttttgtatagctctcttttagagggtttagcatgtggtgatttacgcctgtttacaggtttgtattttttgcctaatgccccaggaaaatctgcataaaggtgagcccaaatttgcctgatattctgtccaggttaaattagaagtaagatgccttccaaatttgaagagtttgattctgcataacagtttccagtttgattttagagttttagaattccaaattgagtttaatgattcatgtttcatttgggaagaaatttagagttatgtttggttctctcatctgaaagcagttctcaagaacaggttattgaaactaaaaacaaagaacagttttagaatttttgcttgaaatcatgtttggtaaatataaattcagaacagtgttcagaaagctgagtattgttaaatttgtttgaaaatctattggagatagttctgaaaagaacaataattgaattttttttactattttccagagttccaatttctttcatttttattatttttagttggttaagttgtacatatataggcatgcttaaaatttaatgcacatgtctatttctagccattaatttgcaagatcaaataaaataaagtttccatgtaggagactgttggatctttaccttactttgaagctgcttggatatttctttacattattttataatggtttttgtttctatattagttctgtacacctgtttcccttgatttttagagattaatttcttgtagcatacataaaatactaagatctcatgcacatgtccaagctcaaaggaaagatgttgctttaggtaggcagttggttcaaaaccattgttacaatgttttcctcccttcaaatcataatctaatttatagacaaatcttattcagcttttcttctgagatttctattgtaatgttgtgctattttataaaatcaagctactaaacacaggagaaaagggggttgcttttgatagagagttgcctcaaatcttttctcaaatgtttaagctagtgtcagaaaggaattgtgtaggctgttgctgagcagtttagatgagtctagttgagtcaaaagcaaattgcagacaattttgcatggatggtagggattagcacccaatgttttaacacatacattcatacatgacactggtgactcattaagatcattcaattgttacactacctgttggattgggcaggcatgaaatttttcaacaattatatagatggattgataggttgcaatgtttgataattaataatttccttccaatacactggattctgttagccttaatgtaatttttcttgattgtgtcgagttgagttcttgttggttgctagattgctgaaaatgcttagatgttttgcttcagcaaaggactaacctgactgtttagtgaccttgaacagtaatatacttccaacatttggaattgacgcctcgatttcttttcttttttttttttgataaattaatgttgattatgattttttttacatgtaggttaaattttgagtatggaatctttccatttatctttcttgtattttgcaatggtttagactttgtactctttttatttgtttcttctctttactgttaaagactttatactcttttattcatttcttctctttaatgttaaagacttcatactcttttattcatttcttttcttttatgttaaagactttatactcttttattcatttcttctctttaatgttacttgttaagtgtttgtccaataatgaaaaccatgcaaagcattaactgttttcattgcacatgatctcatcattttagtttagtcttgtttaatcaccacttggtttactcctaggtttccttgggattgcacattcacccaatgtatgtgttatgcatttgtctcaatgatccgaaccttgttgtgctcctttaatgaacatgttttttcagtttcctctcattctactccttgaagcatggattgtcaggtttagaagccaaatagtatttgttacttacggcaaaagtatgatttactgttgttatataataggctttggtcaagctttggttatgcggtgctgaattcaatgcaatttgagtcaaatcaacaaggattcaacacaaatagaatttatgcttggactgattttataatttctcatgctcaagttccaataaaaaaagaaaagagaaagaaaagctttgtctgtactgtttatgtagggttttttttttttttatcatgggaggtcagtcacgtgagatggcttacatcaagagtttgagaaagtggagcagagtgaaaggcgacagagggttggagagaatgacaataaagtcaaggagagaattaggagagtaggaatctcttcttcttcttgttggatgggaatgaagccctctatggtacttgaaaatagtaactcttatgttaattgtcctggattaaagataggatgatccccttgttatctcgattgaaatggacttgatgcatatcaattccgactcaatgagccaacgctaaccaccaaatcaaaaccatcaagccaatcctaaggtgctcagtggttacccaagttatgtgaagtccattttgagcatgctctcgacttgaggcctattccaagagtcattaattgggttatccatccttaggtttaagaatgacattgttgcgcccccataatacctctctcaacttgactcccctcccaatatgatgttcctgtgactcgaacccttaacccgtagccctaataccaattcttgaattggactttgaccatcttatccaaaaaccaattgatgtctagtgaaggtgggtcaaacattttataacatttgacatcacacctcatgggcttgttcaaagagccattttttgagtgacccatccttgggcttaagaacagcattgttgcaccccaacacatctattcacagttattttggagagaatgtgaactattccttgtaacagaaataaaacaatcatcatttttaagtgcttatggtgtcacttttaccacaaggttgagtaggagagaccccctctctttccaatatgagcaggcattcttattccatgggcatttgagttgcctgaagatttacttggagataaatctgtgttcaaaatgttgtagcattgcagcataaggagagatggaaacaagcaagcacaggagaatgtatggacataatcagttgattcctagaggtaaagggcactcaaagtcatgttaatggagacctgtcttggtcatgtgacacacgcaatagtcatgttagtggataatgaccttgatcatgtgacactaagtcccaggacatgtgctattctataattgtaatgccacgataaagccttaatctcataagctgattgtgttcaataccttgatcatgtgacactaagtcccaggacatgtgctattctataattgtaatgccacgataaagcctaaatctcataagttgattgtgttcaacacctgcatcagtgggactcaatacgcactttatgctatgttagtcacaacttagttgccatttaatggtctgttaaatagagattttctgtaaggtacaggatgggtattaccccatgtgtttgctgattcctttggcatcccgattcttactttgttgtcgaaattgtattaaaattctcacatgttcatctgtgaattcctatctgttagtggaatgcatttttcaccagtaacaaaatgaggtgggcatctgcatgtgagctaccttcttaggttatatctggtgaactgcttttctatttatgtcctctattgattggtttgctagaatctgtcactttcaacaaatcgtgtgatggtttgaacatctacgggttgccattctgtagagcctcatagtgctagaaactatttggatgggttgaaattgtctcttctcaggatatgaaaatgctagctaattggtgattttgaaaggtgccatttatggctgttgggtgcgttattatgaaactgacaacctagatgaatccatcaggaggattatatctttacagatgatgaccttttgggctttgttgtccacgcctcatttgaaagtcttcttttaatacaagttattttttctcttttatgtttgtggctttcagatcttggatttgggggtggcaagtcaaagtcctta

SEQ ID NO: 11199 - DNA, 5862 bp, Vitis vinifera
  Intron number 10 from transcript GSVIVT01029147001 (locus GSVIVG01029147001) derived from phytozome v7.0 (chr-ID chr 11; pos 19198664 to 19204525)
cattgtgcttctataattggtaggagctatattgaaacataactatatgttctgtttcatttacaacgtaatttgtttctattcttcctgatcttgatatgcatgtggtcattatcatctaattattataatattaaggaaatagttggttccagttctctgcttcaatctgctcagtctatcttgtagatgtgttgctctgaaaggaataaacagttccaccaagaaatgatgcttgaacattttagtgggcatgggtatttaggaaggaataaacagttccaccaagaaatgatgcctgaaccaagaaatgatgcctgagcattttagtgggcctgggtatttgggaaggaataaacagttccaccaagaaatgatgcttgaacattttagtgggaatgggtatatttgggaaggaataaatagttccaccaagaaatgagttggtttaattaggattggtgatgcagctcatttattagttggtttcagttcttcacttcgatctccttatcttgtagatgtgttgctttgaactttttggagggaatgggtatttgggaagaaataaacagttccaccaggaaatgagttggcttaattaggattggccttgcagcttatttactagtatttcacacagcccttctccccaattattttggatcataacctgaataatgctgggcaaggaaattatccttttgtttactgggtggtgctgtatgtcatttttctatgttgggcaggggtgcaagagttggtatctaaaatgtgtactaatgttggatttgaaaaatatcaataaattagggttcttgaacacattgcatttgaatagtattatttgtgaacttaagatgttggaagaacataaattgaatagatggtacatattaagaatttgatcatgcattccatttatgtaattatattggatttgatcctattttggtctctcatgtatagatccaagtgcatatctctgtgcatggactgccaacatttaagaggaaatgatttgttacctaagtcatggttgttcacttatgaaattcatgtaatgacttatgctttggacatgtaatgatattttaaatgagcagtgtcataacaaagccatgtgggttggaatgacttgtttctgattgtggattctaatgcattaaaactattcatcttatgcaacaactttaatcccaactacctgtggttggctacatggatcctttctttgccataggacttctgtttgatctttgtgaattgtatgtctttttcattgcatctctttttggaccttgcatttaatccattgacaaaatcaaacatgtacatggacccaacctctaagcccccttttgtccattctagaaagttacacaaaaacagggatttaagcttttgatctgataactcaacattttctaatgctcttctatttctctctctctctctctctctctctctctctctctctgtctctcgatagtccaaaacaatcatagaaaaccaacattccatgcttggcttctcttttttccaacgaaatgacctttaccatttcatgtacttattctaaatgattcaatatatgttgcaagacagttttcatatagacctgtgcttatcactaatgtcataggtgtatctgattattcaattggatgcccttatgagacggtgtgtacaataaacgctagtaggaaaagtcaaattttgaacttttccttaaagaagatcattatattattgattaaaggatgcttttcggtaaagtaagttttaggaagtctcttttgtggcgcttagtcaaaaattttgtatgcaatttttctttttaattattatatattaaaaatgggtaatcaaatataaattagaagtgggttgaatgatgggagaaaaggggatgatcttgtgtggagacgaagtgtatgtgttgttgaaggtgtaccatcgaaactggaatgtaattattgttgcaatagaagggagctttatttgagtgaaacacatgatttggttaaatagatgacaaagagggaagaaagagagaccatgatcttaagtgggaacaggtacaattcggatgatctgaatagtaaccttaaggatgataataaatatagaatgatttcttaatatattactttttccttttaaatttatcttcccttcttattgagggaagggctaggaacaatgaatttaagagtatagaaatcttaacatgagtataagcaagtgtatggttgtagatgcttgtcgtttcttttttagtatattagttggagatttgtctcaagtttggaatatcaaactatagttaaaaagttaagtttattttttggattttttttatgaatccatgttatttgtcatatgttgttaagttggtttcatgagaactctaatgtccaatgctacatgtgtggtattataggttttatttatctatttttcccttagtatcttttatgatgttggttaaaaattgttatacttaattttttctgtatgtatgtactccttatttatgtgcctatccttgtctatctatttcccaatgtacagaaacacaatatggtttacaatatgacaactggatacaagtccttatatttgatgcaaatgcaagagaatcaaggctttgttagtcatcttgagagctcttgtaatgtatctatggacagtatcagtacttgatcttactgtttagcagagtttttgtttggttatgtggctaagatgagctcctatattcacttgagattttttttttttttaattatcattcaggttttagttgtttttctttaagaactgtattttttccttgttatcttttatttgtagggctgctatataatgtttccataagcaaccagccattgtctttggttttctaacctctagaaccccatttttgtcccttcttcctttgacttttaccaaaacatcccaaagcctaaactagttgctatccaaaatttcagttgcccatttggaagtttcctcaatacttgtacttcatgtgtgagaactaaatccataatccaacttcacaaccatagacccatctattatccggagtatgttttacttgacatttcaggaattattattttgggccctctaccaacgtgattagggatttgtatcttgaattaatcaagtgaatgcaagtgtaggatttatcaaaaaaaaaaaaaaaagtgaatgcaagtgtaggaaccatcaaatctattctttgaccttgagcatgacatatactcatccacatatccaagcacaaatcggtatcacaaccaattcttggatatcttttaaacatattagagtagatctttatcaaaaagagatcatctagttagctgggatgtagtgtgtaagccgaagacaaaagggggattgggatttggaaagatttctataaggaatttcgctctcttagggaagtggttgtggggatatcctagggagggttcagctctgtggcatcaggttattttaagcatttatggatcacactccaatggttgggatgtcaacaatatagtcagatggtcacatcgttgtccttggaaggccattgcacaagtcttccaagagttttccaagtttactcggtttgtggtaggagacgggatagaatttggttctgggaagacttgtggtggggggaccaacctttgggggtccaatatccaagactacttattgtagtcacggataaaaatactcctatttcttcaattcttggatctactcgcccattctcttggaactttaacttttgtcgaaatctttccgattctgagatagaagatttagaaggcctcatgcggtctcttgatcgtctacatatatcaccttcggttccagatatgagatcctggtctttgtctcatttaggactttttacagtcaaatctttctttcttgccttatctcaattttctgattcgcctctagttttccctactaagttcgtctggaattctcaagtccccttcaaagtcaagtcctttgtctggttggtggttcacaagaaggttaatactaatgacttgctacagttgagaagaccctacaaagcacttagtcccgacatttgtaagttgtgcatgaaacatggaaaaacagtagatcatctttttttccattgctctttgacgatggggttgtggcacagattatttcaattagcaaagacggattgggtccccccaaggagcatctctgacatgttatctattaattttaatggttttggatcttctaagagaggggttgttttatggcaagatgcatgcatcgctataatgtgggtggtgtggcgggaaagaaatgcaaggatttttgaggataaaacaaggaattcaaagaatttttgggattctattcgtttcctagtttctctttgggctttttgttctaaggtttttaaggggattcctcttaacgtgttacaacttgattggttagcggtgtgtaatcctaatgggttggtctaactagagtaattgcttgttttttctttgtattttcttatatttgattcattgtagttttgtttttctctggtgggaggattcctcatccttctcttgtacttcctttttatcaatatattccttcgtcgtttcctataaaaaaaaaataaaaaaaagaatccaatcaacatttgaattttgaagtattattatttatttatttattttttataattgaggaatcttccatggccaagctcttaggactctccatggggacccaaacctcggggtgctaaccaccctgcaacaaccagcaccgggtaaattcagggtatcatcagtagcaggattcgaacttaggtccatatgccacttattgtgaccacactgaattttgaagtattattggtgactgtgatttctggtttgccttaattctaaagggaatgttcgctcatctatctcatggtaccctatgacatcatcgttcctttgtgaacacccatgacatttcgaagaatatgcaacacgagaagtaatgtcgtttttttaattatcaaacaaaggagcatgaaaatttaaaaaaatactttgtacaaaggaaacctgactcagaatctacttaaaattcctaggaatctaggatatacttaaagagcatatactgaccaaaggttttgcaacagtattcgcattatgtttttcctcttaaatgattcatgggagggcttgtgattcgctagatttatattcaacaggaaaattatgagcttcacccatgacacctaagttttacctataaaatttattaactacatgtatgatgatagaacacatacataatatccttacttgccttcccatatcataggttgatgattcatgaaatagtatctaacataatctttgcgtttgctcttatgggagtgaggtgggtaggtgttgcccatgaagtaatggtcactctgaaacatgtaggacattcaattaatatctccaattgcctttcatcctcaagatcatcttgacatttcaacgttgaagttaatgctttagttatataatacctttcgttttgatattttctgaattaggattggggaaacttatacatcttgaggagattgattttgaataatttctccttttagaagggtgtgatttttgatacagcgtatttctaaacttcaagttgtgtatgtatgagactgaaatagaaagggaccaaaacctaataaagtagttggcaatcacggtaacctgggtgttagtacacaatctctaattcatttgtttgtttctgtttctttcctcttcttttataggaggaatcgtgaacaacacattgcgtccacaaatt

SEQ ID NO: 11200 - DNA, 10856 bp, Vitis vinifera
  Intron number 10 from transcript GSVIVT01012985001 (locus GSVIVG01012985001) derived from phytozome v7.0 (chr-ID chr 2; pos 10669202 to 10680057 reverse strand)
tgcttgtgggggtgagttttaaatcattgcatgcatgctgtattcaactctctctctctctctctctctctctctctctctctgcgctgcttactatgcaatgatttaaagaattatattagatagactaattatgttatttatcaagactccagcatcatggaaaatgaagatgtatgctattttgatatgatagtactagtaattaacgaagtgtttgaggcagatggtattgtctaaatacatcttcataataagtaaagtttcttattggttataactgtcctgaattcaggctatgctgatgaccatatgtttaaggttcaaatttcaaccgtggagaagtccatgaagttataggactaatataagctgaaggttgggggttttaataaattaaatattgattttatgaaagtccctgaagttttatgactaatgtaagtagaatcacagaagaattgaataagtggctaagaattgtatgggatcctttgttagtgaagttgacctagcagtcaatgctgatgtgcattgtcaagttgattactagcattgcagcagtgatgttatccctcaacgctgaggtattaagatggataaggatacttggcttgaggagagagcaaggcaactaaggggtgtggatcatgggtggggattagtaagcttaaactgcctttcaagtctctagctaccttggtctaatggttcttctgaatggtcttcaagatttctgatttaggattgctgaaccatcgataagatctctgacttgaaatcatctttgagttattctctataaatttctgttagagaattcttattaaattctcccattgattttgatatagttctctgaacattcttaaaaatattcttagttcttccagaagttttttcccttttaggggaggcttatgtatgaagaagcttgataaaaaatatttttcagaaggttctcttagtattgggatgacaattaatcgtcaataagcacccaacatgtctaaggaatggattatgagtaagatacatacatagcacaatctgatccacacttgctcccctcagaaggttggggcaaggaattaacctgctctctggtttcagaacaggataagacattagtttggttggccctcactcaagtcatcaagccaagatcttcaggccttcctatcttcataaaagtggaacctttgtaacaaccaaaaaattgacactaaatattgggatattttaggacttctgaagtgaacctggagctcaagagctgtcaagtttttaggtgtataagaataaggagatcgtttaccttattccatatttagtgcatgatacacccgactgcattctatgccttgtacttggtgcctgctaaaataatagaagtgaacctggatctgagaagctgtcaagtgtttaggtgtgtaacaataaggagttagttaacttattccatatttagtgcatgataaaccctactgcattccatgcccagtacttagtgcctgctaaaataatattttctatgctaaattggtcttttgcattaaacctttttacatgattgcctcatatggtcattgccacatgtcattaaaacttgacaatttatgtatgtatcaccttgtgattaggcacatcaacaagaagaatatagggcatatttggtaactattttcgaaaacaattctaaaaaatagtttttgagaatagtttttgaaaattgttctctgatttttatagaacaaaagtctatttaaaaatctaaaatgtttttaacccatttttaatatttttaaaataatttttatatctagtgttttatttttaatcattttacatatttgtataattatttcttaaaacaacccttagaaaacaagtaaaaataatataaaacgactaaaagatgttatctgaaaacatcttgttttctgttcttaagaacaaaaaattgaaaacaatttttgattatcaaatgtgttttttgttctagaaaatagaaaattgttctaaaaaacaattcctaaataggcccatagtctttatttgagacttaagacaacacatggttggtatgcttcttttttttgatagacaaagaaagaaatatattagtaattgtcaaaaaaaaagtgcacaaagtatgtgggcatatacaatggtgccacttggcagaaaacaagatgagggataacaaaaaaatcccctccccttacgtcctaaccaatcaacaaaaggaatttaagctcttgatatgataactctatattgtcaaaagccctcatatttctcttttttcatatagttcaaaataaacatgaaggagtagcactttcgatgctttatcctgaagaaaggtccctactaacttagtagaattgtttttaacttatgagttagcacccatactcttgtaaagaaagaaaaggctacttgctatacaattcttgccttggaagaatgaaggagcatgtgctcaacagatcctttcttgcctttgtacataaaacatctattcacaaaagtctatcttctcctctgtaatttatccatagtcaaggtttcttttcaaattgcttcccaagcaaaaaagctcacttttgttggaacccaaatattctaaacaacatgtactggaaaaaccttaatcacccatgttccaactaaggttaatagaatttaactaagaacttgttacttttttaagccatcaacaccgccctatcctcaacatccctttttatagaatttctttgctgtcgcaaaaggaatgcttcaaccccagccaactcccaattatggagttgtcttgagaaagatggagaccaatgcccgcccatcgttgggcttgctcccatacatcaactactaaaacatcctttgaggcaactctagcaacaacgacaagaaagaaatcctcaaagaagaatcctcacaccatatgccatcccaaaattttaccctccttctgttgaccgcactaaaataattttacttttgaaaaatccccatcctctccttattgacttccataaccctacgccatacccctctcttacctctatagaacaccaatcctcttcttctctaaacttctggataatacaacttttttttttttcaagagttcaccctccccacaaaatttccctttaaatcttttctactatcgtgctcacccttcttggaatgacataaggacatgaaataaatgggaaaactagataaggtatttttaattagagtcaattatcccccttttgtcaaatattgtcgcttctacattgcaaatcttctttaacacatttgggaacgtgttcgttatgtagaacgcgcctaagcagagacttagatatgtggatgggagcatatccactttggccttgttagggatagctccctgtttttagtttttggctttagctggaagttgaagtcacaatttttgaagggtaatattgatattataaattttttattatagatgaaagaacaacttacataagttaaactaaagtttctacaagaagcaacatttttctggctttcatattaagctctttttaagccataataagctattgggacaaaactagtgcacaaaagctcttattgagctctaaaaaatgctcttggcttcttagaagttaattcaaacaaggcctttgtggcctaatacaacaaccgaatcatccacattgaaacaaccttaatgggaatcaactcactatttttctaaattgatctttagcataaatattgcctcatatcacattaaagtccaactaagatacatcatctgatctttacatgcttgacaaaaaatcaaggtggtgttagcaaacaaaaggtgagacgtttccacttccacctctcatcttaaaactcaaaacccctccctcactctctttataagacaattaagtgactccatctttgaaatgaataaataaggagaaaggggacccccttacctcaacaccctaaaagtttgaaagaagagaataggagaccattaacaagcattgagtacctagttgtagagatacaacattatgcccatctaattaatttttagctaatagtcattttctctaaaactgcaagaaggaaaccccaagtttcatgatcataggccttctcaatgttgagcttgcataaaatgccattagaataacccttcaatcttgcatcaatggctcatttgcgataagaattgcatccagatttgccttctgtttgcaaaggcattttatgagcttgagactgctatgcccaccacttgcttgagccaatttaccaatgccttttctagcactttttataggctccttgccaaactaattgccctaaaatgtttcaaatcttctacacttttttttttttttcaggattaagaccaagaaagtagtgttgaaacttctctcaaagagatcttgcttaattcctcaaagcaatccattacttcactcatcacaaaatccttacttagttgccaaaaagccataggaaatttgtctaatcctatagctttatccttattcaaggttgagagggtagagaaaacttctttgaaaatggtaactccaaccttcttcccttcttaaagaagcaaagaacatcccgttgatgcaaggtctctatcctttggactcaacaagaaggcttccataggagttagccacactctccttaatctcctcctcacttgttaaccaaactacattcactcttattctagccataaaattcctttttctatgtgcattttctatcttatggaacaaatttgtatctttgtctccctccttcatcaacatctctcaacttctgcctccatgaggtttcctttagtactgtctacttgtcatattcttcaatagttactcttttagcctcaatcagaggaccttccctctccttggcatcctaaaaacctatcttattgaaggcttctaatttcttgactagcacacttccaaacagctcttgattccaagattttaagtccatcttaaaggctttcaatttggcagtcagaataaaaattctggagcccctaaacctgtaggccaaccactaaatttaaaccatgcctttgaaaccctccactctaagccatgtattctagaatctaaatggggggttttgcccctcattccttccttatctaacgaaatgggtgaatgataaaaaaccaacctcggcaaaaccctctgcaagaggtgcattgatgctaagtcctttgaacttggatccagatgggtgaaggtgcatgtagagttgctgattgtggagaggggttttaggctatgagggatggattaagaagagtaggaaggtgttgggatggcttttaaacattatagatttgtgttgtaagtggagggggtttaggctattgtagaaagaaatgaaggacaatgatagaatgttcaaggtggctatgttgccaaatgaagtgggaagatacctcatgctgttaatcatgtcaatccccaatacactccacctctcgctatctcccttgtgagtggcctccacctcattgccaaacatcacaacaaattttggtccaccccgatttgacttcacctctttgtggacctcaccttgaactcccaactcacccccttttgtagagcacatgccttttagtctcctttgcacgaggagccaagttcctccctctctcattggcttttgatccttcatcacaccttccattgcctccatccttttgctcaccacacctagaaccacctactacatccgtggtcccaccataattgaatagaaaaattccatcaacccacaactacttgtactattcctaatgccttcctcccataagttttcacaagatctcttgcccattgtaaattatgtcattctgcaatatcttcatctactgcaacaaagccaccgtaagaatcccccaaccttttgatgaattccctatctcaaaaaagcattggcaaccctactactttaacctaagcttttttcatacaaatttcttttctatagcatacaacctttgagatccgtttatttaagaaaaggtccttttttgcctgttcctcatcaacttcaccccattacttgccttaagagtcccctttgggcaaagattagaacctgggtgaaaaggaaccaccccaaggcttcataaccttttagcaaaaactagccaaccctctagaaaccccttacctttgggaatgctagagtgaatcactttgtctccatagatcaagataagcacaaaatgtaattgcctgctccatgacaatttaggtatgtgagtagcccaaatttgttataaaataactactttgttgaacctatgagttgactagttactatagagagaatttcaagccatgcaattcaaagagaatagtcattgaaagaaaattcaagcattcaaacctcagaaaggaagacttcaaaattgatagtcaaatttgactagtgagttttcaagtgggggttctaagaagaaaataatctactagataacaggaagttgatttttattatcgttattttgggaatttatgtttttcaaaagttcctttcctatttggtacttttaggattttgctagttaaaactcagtctaggtcattttattcattaggtataggtttttaaattatttaagggttttctaaagctttatggagcctattaatttgtatcttgatcataaagaagtcttttaaaagacaatatacatggacaagagtagtataaaaaaaatgaaaaaactagagctctttacaaaaaatcaatctagcttctcaacctaaagggttgacaaatctcaagggggtatgtgattgccaacaaagttaataaaagacaatgaaaattattgagaggaatatttctttctctatattttttattgtatacacgacatctatataaataggtgatacaaggcataaaaataggaattaattaactattgattataatttaaatttaaaatttcctaacctgtaggtgttgtctaattctatgtatttacaactatgatatccctaaaaatatgtctatatcttggctgaattatttccatttccaacactccccctcaagttggcttgaatatgtcttctatggctagcttgtcaattaagtagtcaaactgccttttgtgtagtccctttgaaagaacatctgcaatttgctctacggtgggtatataagacatgcagatcaatcccttctcaagcttctctttgataaagtgcttgtcaacttccaaatgtttagttatgtgtgaaggacaggattatgagcaattgcaattgatgccttgttgtcacagtacactttaattggtgaagtagttgcaatttttaagtcttctagtagccttctgatccacaaagcttcacaaattccacgagtgactgatctaaattcagcttcagcactattttagccactatattctgttttttgcttcgccaagtaaccaaattccctccaacgaaggtacagtagcttgaggtagattttcgatcagtaatgcttccagtccaatccgcatcttgattgcaacctaaagatgtccttgttttttaaataacagaccttcactaggagttccttttagataccttaggattctatacattgcttcaaagtgttcctgtcttggtgaatgcattaattggctcacttactgcaaatgctatattaggatgtgtatgagataaatagcttagtcttccaacaagcgtttagtactattctctatttaccacgtcttttattttagcatgttgtagcttcaagttgggctcagttggtgtttcaaccactttacatccaagcaaacatgtttcacctagcaagtgtgtatttgtgttgagtgacaaagataccctccttggacctatcaaactccattccaagaaaatatttcaatgctcctaggtcttctatcttgaagtttttagcaagtcccttcttcaatctttccaattcagcaatatcatcacctgttaagagaatgtcatccacataaacaatcaagatagctatttttccttcttttgaatgtttataaaacatagtatggtctgcttgacttggacagtaactgtggttttttataaccttcccaaagcgttcaaaccacgcccttggggattgtttgaggccatatagggacttattcaatttgctaactttatcttcaccaaacttcttctcaaaacttggaggtagaggcagatgaagaaggaacaagattaggatcagtattacctgaactactcgagggaccttttttcatagattctgattggttttgtggcagaatggttggcaggtctttactcttttgttgagtccttttccaagcatgacccaaaaactcaggttctgtaataatttgttccttttgtagtatttctccccctgcttgcgagccatctatgtttggagagattcagctaagatttccttcgttctccatgtcttgagcaccctgtttctgtgtttttttttttcaaagacaagggaaggagatgagagaataggatttggtaagggatctgaagtcgtctcccaaaatttttcttcttttctctctttctccccctgaagacaatttttggcaaaataggattgattttctagaaaggagacatccatactcacaagaattttctatgtttgaggattatagcacttgtatcctcttttgtttggggtatatcctatgaaaacacacttttctgctctcggttcaattttagattaaaatttgctaggtatgtgaacaaaaacagtgcatccaaaattttttaatggcaaatctaaattaattctgcattcaagaaaggtttctttgagcattatttgttcatgagcggaaattgaactaatattaccactatagccttgagctgttttattcaaagagattatcatcaaaatagtaaagaccattgaccattcttgcactaccaatcatcttccctcagttatggtcctaaaattcacaatgagagtcaaagaaaacaacacgacagttggagtctttggataatttactgacagataacaaattgcaggtcagtttaggaacataaaggacatatttaagagtgatattttctgaaatttttatttgaatttttcctgcattaggtgagaaactgccataagcaatcctaactcttttacttctagaacaagataaataagtattgaataaataagaggaagaggtcctgtgatcagatgcccctgaatcaattatccaaggagcaggattttgattacaggatagagcactaggattgttacctgcctgtgcaagagaactgctaggagtaccggattaagaattggactttagcagtttaagaagatcatctgctcttttactaaacggacttgtctcagcttcatttgcataggagaatgcatcagttggtttgtcacttggcttgctgctcttcaatttgcaggcttcccatggatcttccagcagttttcctgggtatggtgtggtttattgcagtaatcattccacacctgaggcttttcattctacctttgctgattactggtaaagaccttgtctgcatttgcatctgatgcacaatcatggctgagttttcaacagatgcagcagccccctttttcccaagcataacgttcctgtgactttctttccttgtaacttcggcaaagacttcactgatagaaggcagaggttggcgacctattattctccccgacttaatcaaattcaatgtttaatccgaccagaaacttgtagattcgatggtcttccaccaccttttgattgtgattgcagtcgtttggtgatttccactcatagtcattgaataggtccagatcttgccacaacctctttcgagaattgaaatacatggtgacactgtcctctccttgatgaatttcttcaagttttatagtcaattcttatatttgggactgatttcccaaatccaaatagttctggtttacattttcccaaagttctttgtctgttggataacacatgtagttggaactgatgtcttcctccatggaatttactagccatgtcatgaccatggaattttcagtattccaggtagcatatgctgagtcctcttttgagggtgccttcttatctcctgttaggtatccagattttcctcatcctcaaatgtacacttggacagattgagaccaatgcagaaagttatcaccattcagtttaatgttggtaatttggattgagtgagaatcagagttaggggcatgggttgttcttgagggggtggatttggatgtagtttctgacatggtgaaggacaactaaacaggttctagggttttgggaagagtcatagattaagtccctgttctgatacgataaaatacaaagaaaattattgagaggaatatttctttctctatatttctgatagtgtacacaacatttatataaatagatgatataagacataaaaataggaactaattgactactgattctaatttaaatttaaacttaattattctgtaggtattgactaattctacatattatcagctatgatatccctaaaaatatggctatatcttggctgcttttccaatagttaacaagagaggtgacccctctcttggccaaactatcaacttcttgatttgccgatctggggtttccaggagaatgaacaacctataactccagaagagttcttttctttgagttgattatctagatacaactaatattgtctggcttttctgcagattttctacttaattgggtttgccttgttttgctt

SEQ ID NO: 11201 - DNA, 2387 bp, Vitis vinifera
  Intron number 1 from transcript GSVIVT01000816001 (locus G SVIVG01000816001) derived from phytozome v7.0 (chr-ID chr1 2; pos 523361 to 525747 reverse strand)
acacttgttgcagaagacccaatctggagcagttggtaacatgcttttattcttccctttactgtattacaactagaaactatgcaaggttgaagctagcttcattgaaaccgtaattttcaagtcaagggtgggttttttttttttttttttttctgaggcaagaaaaaaaaaaatcttttaaacggggtccattcaaaccctcagaatttaatgtttataccttatatttctaccctgatttttcctgtttttaaatgctcatctagcttctatgatgaaacatctctgtatagccaccaaatatggttattgggtgtggatgattgatcaaatataggttctgagaacttcaaaaggatttaggttagatttattgctggcagttcttgaatcaacctgtcaaatgacctaatgtttctaaaggtttaggttggggttttgactaatttcgataatggatggagtcttggtctctcttttcaactgatttactagcagtttatgtttggattgtcactcctgattttctgagtcatatttaccagtctttcggataataaggtatgcggctattaaattttatttcatctgttattggccaatcctgtgttttaaattagttatcatggcttagtatcaattagtataagttgtatatgtttatccaaagaaatttaatggggataaaacatttaatattttctcattgagattttggaaggaaaagaaacagtgagagtaaatggggttatttaggtttcattttggattgatagaataactgttataataggcatgcagcctgatccaaattcactgccacctctgattagaatgataatggtaaaaggtaagctgataatattttaaactggctagacagaactacatgattgctctgttgatgttcccttctgtcgacatcagttgaaattagaatgcctttttcattttttgtgccaacactggtattctgtatgagggcccttgttttctcattctttctcaggatgagtgagaatttatataaaaggtgttctctaaattttcttattgcttagatgtgtatggatttattcaatgtgagaaaataagtggaagatatgtatctggagttgtcaattagtcttgatagtgttttttagaaccctggtttttggagaaacctgcttctgcgagaaatgtggggagagacatttcgggtctacacatgattttgatggatctatgatgtcccttgttggggtgcttcagggtatttttcaatttttagcaatggataacactttctttactttctttattttcttttattgtttttacatcatatgctgtcctgttaggggcccaatggctacaatttatttgatccttaaaactctcttttaaaatttcgcttctggtttgtgttaacaaactggtttcgccaaatagctagttttggggacaagttaattgggacgatggtttgtaaaatttgattctctatcatgctagcagtgtctgctagtgaacatttgaaggttataatgaggatagcaaaatttataattctgaaaatggaagaatcagcttcctttattatacttattttgtgaacctttttatcataacgagaaacgatgatttattccttttatatcttgtaaatatataatagattcgtatgtacttgcatcttagtgggagatcagctcagcacaagttctttttttcctttcctttctattttgttttatttttttgcgtgggggtttggggtttggaagatagtatttctgagatcttattaggtcaggttagggatggattatggcctttacagtcccagtgattttttgttttagtttttatcttgttttgtttgctccttgtaacctccagtctaccagggttgcagtctgttttgctaggtccatttatatgtgtctttattttatttattaatttttgtagaatatggtacttcttatttacctatcataagaaaagaaaaaaaaccatgtacatatttcatagtatgtcataccaacattttagccagaatgacatgatgtatatttgatagtataatgtactgacattttaacctcaatgccttgtgcctcctccaataatggtgcactttccattttccatgatttcatttttctgataaaatcacacctctagttattcttgaagaaggggttgtagtcactccaacatgaatcgtttgtgtttcttgattggactttgtaaaaggaagggtgcttaattgaatttgatctctatactttgtttattttttttttctcacttaatgggccaattatagtagcttgagtgtttcttatggtctccccttttctctttttgtagtctccatcattggtttagtcata
